United States Patent Application Publication US 2011/0183924 A1 - sequence listing, part 253

SEQ ID NO: 721904 - DNA, 820 bp, Homo sapiens
gcccagctctggttacccggctctgcatcgtgtctgccatgatgggccatcgtccacgtgctcgtgctcagccagaacactagaagcgtgaatccggaacgaaatacgttcgttctggacaacatcaatggctgccaagactattgcagatctcgatccgacacatggtttggggatcccaagatccagtgatgaagtatgcgtttctggaccctaatgtgggaggctagttagtgatagactcgaattcgatggctagattgccattgcttctgagcagtatatcaaggctccaggctatcgctagtcgtggcctacagtccactgcatccgaacagttaggccgtgcacccgaggactggacagacggttggaggatgggcaccacaatcagtagagttattctttggctatggcgcaacaatgcgtgtcgtgtatgctgacgccactgtccgtgtgagcacgcgagatgtcacccaaccagatggtgatcagttggcttaccgcaagaggccattttgcgcatgcgatcactgagtccaggccacccctctaacagcagacacatagaagtatcaccagatcgcaacatcaaggtgaccagtgcattatgaatgcctggaaccatctatcgaacaagcgtctcatttagtactccaaagcccatcgaagtcggtgagtcatctctgggcgttgcaacatttgccctgtgatgctgtcaacgcatggtacagttccgacggagaccggtcggacccgacgatcgaccttctccacactttatgcaagaagtggaccctcgatagcctgggaggcatcc

SEQ ID NO: 721905 - DNA, 260 bp, Homo sapiens
  misc_feature (243)..(243): n is a, c, g, or t
gaatctcgcggtcgatatacttatgccacgcgcttgaaacggcatattttttcttcttggtgtccaccgatagtggagtaagataacggatctctgattgtgattgtgccataaataaaaatcctccttgatttattcgttagtttttttcttcttgggctgtctcggctgcaacttcggcagtagcaggttcttcagcctttgcgctctcttgaacattctttttcatgccacgacgcttgnctgcatattcgaccgcg

SEQ ID NO: 721906 - DNA, 103 bp, Homo sapiens
tctatagcggagcggcacgcctgctgggggtatgttgtgttgtcaagtttggaagaactgttggtccatgtgggtgctaagggttccgctggtgctccgctta

SEQ ID NO: 721907 - DNA, 1358 bp, Homo sapiens
  misc_feature (1358)..(1358): n is a, c, g, or t
gcgctactttgtgcttccgccgttccgccgctcgcgctttctctgccggtctgcaactggaaggaatgagatcgccgcgcttggtcacttgacaaatggtctcctgtgcactgtgtcacagaggctggttttggcttggggacgatcggctctccctgagcgcgtgtttccgttccgatctgtcgggcgcctcctaggacggaccatggggcgtctactggtgtggcatgggtgctagagaggatctctcctatcgtgggcgatcggagggcccaagatgcgaaggtcagttggtcaattcctttgaccttcgcttgaaggtatccctcgatctgcaagccattgggcgactcagtcgatctccacagcattggtgcacagatccattggcatggaaggattccttggtctacccaatcaagctttctacatacgaagcattgtcgcaggtggccccgggaggaatgcgacccatttgcttgcgtgatcctgatgtgccccgccttgaagactcgccgagagggacgctaaacgacgagaagggaacgatggactcacggacttaatcgttttggcaagagcactttacaactacactccgggaccgagtgatgaccggttgtgcgcgaatccgatgggcctgcttgtccttgttcgcctttcttacagcccatcgttggtgtcaccaagccccagcctcgggcgcaagttagtccagttggaaccgtccttgtggtaaggaccggtgggtggtttcacacccaactatctgtggttgtccccgaattcattaccgggaagtggtggcctacctgcgcgcgtcactcgcgccaagccgtcgcaattcgcttggcggtacgttgagaaacgccttgcggcctggaggctcggggaggaaacgccattgggaagctcctggagcttttatcccctgtcacttgagagaaggaatttcacgttcctagcgttgaacagaccgaatgggccttacgaatggctttcttaccacaatccctacgtgggaccagtaggccgggggggaaaagaattcccggttggccggtccgaagcacatttcctcaggtgggagggaaccgcctttgttcggcttaatcggttaaccggagccccttgttgaaacattttccggaaagccacacggaacggacttgtgggccacatcgctgtgcggggcaatttcccgttccccttgcaatatttcctactctgggtaagggaaaagaaacgagcattatagtgaaaagtagttgggcgccagaaaattgtgtgcccacgcgggtgcacgtccacacacattgtggtggcaagctgaagccgggtttatccccggtaggtan

SEQ ID NO: 721908 - DNA, 120 bp, Homo sapiens
  misc_feature (1)..(1): n is a, c, g, or t
ntttctttcgctctgtacatgtacgtgctagctcatggactgcagtaggtaggacctttgtgtgttcgacagtgcaattagggaatctccccccaaactaggtgtcttctctttgaagac

SEQ ID NO: 721909 - DNA, 292 bp, Homo sapiens
gagaatgtcaatacatcatcaagtgccacatatctagcacatgtgcatatgatgcaagtaacagtaaacattagtgaataaaataagtcactaatgtaaacaggacatttatacaattaataatcaataatacaaaacaagtatctcactatgtagcacaagctagagtgcagctattattcacagccataatcatagctcagcgcagtctccaactactgggcttaagtgatcctctcacctcagcctcccaataattgggactataggctcataccatcatgactggctt

SEQ ID NO: 721910 - DNA, 162 bp, Homo sapiens
cacgaggtcatcatcaatgacatagcgtcacaaggctggaattaccggccggatgttctctgcacacaatattacaactgatcaagagacttgtccaaacactggaacattacaacctggggattatatatctgcgcccacatcgtactaaattttaccaca

SEQ ID NO: 721911 - DNA, 148 bp, Homo sapiens
  misc_feature (56)..(56): n is a, c, g, or t
gaatgatatggtgtgtggagatattccctttcgagcatacgaagagatcatcaggngccaggttttcgttcaggcagagggtctcttcagaaatgtcagcatctcattagatggtgcttggccgtgagaccatcagataggccaacct

SEQ ID NO: 721912 - DNA, 380 bp, Homo sapiens
cacgagggcggcgcctcaggtcggcgccaacgagttcagccccgatcagcgcaaggcgatcgaagcgatcgtaaaggactacctcgtcaagaaccccgagatcttcctcgaggtgcagagctcgctcgaagccaagctcgccaaggacgaggccgatcgcacgaaggcgatggttgcggagcacgccaaggagatctatcgcgctcccaatgcgccggtcgcgggcaatccggacggcgatatcaccgtggtcgagttcttcgattacaactgcggatattgcaagcgcggcttcggcgagatcgcgaagctcgtggagaaggacaagaacgtccgcgtggtgttcaaggaatttccgatcctgcgtgacgaatccgagc

SEQ ID NO: 721913 - DNA, 347 bp, Homo sapiens
tttggaaggaaaaaaaaaaatgggtgggggccccctggaaaaaatgggcccaaaaaccttaatcctccggggggatcccctgggggaagttcccgtttttggaacaggtttttccctgccgggaaaagcccagggcttcctttaaacccccttccctcccattaaaccgggaggaaaaaagcccaaagggaaccccccccgttttaagctgggggttttccgtcttttaatcctggggatgaaaaagaaccccgggtggggccctaaaaaaatgggtttttttccttatccgcttgggtttttttggggttttgtaaccccaaaaaaaaatgtttttttataatcca

SEQ ID NO: 721914 - DNA, 187 bp, Homo sapiens
tggtgatctagaggatcccttggggctccatcaggtctgccaggtgaagcccctcgggagaaattttacaacaaagggtcaagaaagcttggtttcttctaaagaaatatgcgtttttttctttctcacaaatagggtgactttaaaacggaccaggcttctcatttggtcttgggggtaccgagct

SEQ ID NO: 721915 - DNA, 177 bp, Homo sapiens
tacagcagacaacagcagaagggcatagagtacggctcccacagcactaattgacagtatgcctccctacggttgaaaatgcaaaaagcagtgtgacccccacatagctccggggagctacatgcctttagttttcttctgcaacatgggccacagggcaaaacatctgatatggca

SEQ ID NO: 721916 - DNA, 85 bp, Homo sapiens
tctgctgggatcttaaggtttaagctctgtacacagaagactaaggtgtgtgtcagtgccttgaggagaaatcgcttacagaaca

SEQ ID NO: 721917 - DNA, 97 bp, Homo sapiens
ggggcgcagagatgagcacacagctttgggcacggtccaggcaaactgaaatgtacgcctgaatttgtaaacagaagtattaaatgtctctttctac

SEQ ID NO: 721918 - DNA, 276 bp, Homo sapiens
  misc_feature (155)..(155): n is a, c, g, or t
  misc_feature (241)..(241): n is a, c, g, or t
aataaagcttgcaggttggaagttactctgggtgagtcagtgagtaaatgatgagtgaatgtgaggcccttggacatcactgtaccctactgtagactttataaacactgtacacttaggttaccctaaatctattttaaaattgttttctttcntcaataataaattacccttagcttactgtaacatttttacttgacaaaccttttaatttttaaaattttctgactgttataataanacttagcctgaaatacaaatgaattgtctaagtgt

SEQ ID NO: 721919 - DNA, 248 bp, Homo sapiens
  misc_feature (46)..(46): n is a, c, g, or t
  misc_feature (126)..(126): n is a, c, g, or t
atatgttattagatgccctaacgctgacgataactgtcatcacaanctgtacagcagccgtatcttcaaatgtgttgttttcaccacgtatttacgtatagcataataataattggtacttgagtncaagacgacatatagatacttcagctttgaagcatatagtaacatcattgtctagtcaggcagaggaaagaaattcaaaagcactttctttttcttctgtcagttcctttgcagtaagatcc

SEQ ID NO: 721920 - DNA, 107 bp, Homo sapiens
gcccagcacacaaccaaccaaagaaacccgaggaagacctgttatgacatatgtgggcagtgcgctgtagccgaacgacgagcgcagcgaagctattgagcgaggaa

SEQ ID NO: 721921 - DNA, 1171 bp, Homo sapiens
gctgacacatacctcccggccccctgacttgctcttacccccgtgcctcctttcccaggtgataccttgatcccatcctcctcgtatggacggaccgaagacgaaccgacatagttgggcgccagtgatgctaggtggctaggccttattgggggtcgcttctggtacgagcctcaggtcggctcctgcgcgatagtgcgatagacaagatgatctcggaattcgtgatagagcatgacaccgcgaagtgccaaaaggcggaacgggcgttgatagcatcgtccccaacacttcgcgtgcgagtgcatccccaggtgagcctgctcatgctgattactggacttctgaagatggtagtgagtgagagacggaggtagagaggaagaaaggacaggaacgcagactgggcaaccaggtgagtagcgcgggtgaaatgcaccgcgagatcgcacatagttggccttgactagagcaaaacgccccagtgaagcgcgtaccctcaggaggccccacgcgtggaccgactaggagtggcggacactcgtgcagagggggaagttcgcgcttgcacattgcacgttgaagcaaagcaggagacaagccaaacaggaagggtgggggcaaggacaccgatagaaacaccacagaggccgaaaggattgcgcgaggaagtggcccaggcatacccacagcatgaacaagggcacgcaagaaatgacaggtgctccaattgggcacgaggacaggcgaccaaagtgcgatggggctaacgcgcacaagtcccaagggcatgaagatggaccagtcaaagtggcgcgaaatccatggacgttccacaccgatgttggttagaccggatggctacagggacacacgcaacccagttcaacggtgccaaggagggacacaaggagagacgccaagtggccagtggtggcaaatgtcggatcaagagagagcgtgggtggacgttggagcggacacagcgatggggacacattgcacgaagccccttctctgacccttggactggcaacctcacacgagaaatgcgaaccgagaaaagcgatgcccacgaaagatacgaccgaccggaaagctatcatacagtcaaagtgaacttgtggcagccaagagaacacaagtggacgaagagggagagaacgatggc

SEQ ID NO: 721922 - DNA, 270 bp, Homo sapiens
acagcaaatatgtggagacttgcatttttactaatgcttcctgatgattacctacatctcagataattttggtaactacgtatagttatctggaacataactttcagtttcctctgctgttctcaagtgctgtactactgatcatccttgagatcacccactgaaaagtcttctcttatccagttttactatacgaaagtcttcttaacatttggtttgatgtcatgttctccgaagcatttactttacttgccttttccactttctgtg

SEQ ID NO: 721923 - DNA, 174 bp, Homo sapiens
cccgactagccctgacaggcattgcaatctcagcctcctgagtagctgggattgcagatgcctgccatctgtgcccaacctgggcaacaatgagtgaatctccgtcttaaaaaaaaaagaagacttgaccttgtggacccttagcccgtgtctggctacgtcgggggggtacct

SEQ ID NO: 721924 - DNA, 473 bp, Homo sapiens
tcttgggcctgtgttatctcaccttgggcctgtgttatctgtcacgcaggctggagtgcattggcacgatcttggctcagtgcaacttctgcctcccaggttcaagcgattctcttgcctcagcctccagggtagctgggattataggcatgtgccaccatgcctggctaatttttgtattttttttgtcttgcagttcttgcccttgatgtttccaggctctggagagtctgcaggcccaagggcttctctggacacccagaagagcacccacctcatggaaaagtggtcagactgttctccacacagtttccagtcctcaattctcctcactgggcagggctgcctgacctgggacgccaggaaaaccattctgcccctacatgaccacttcaatcagaaacagctcggtagtttggctgggtgtggtgcctcatgcctgtaatgccagcattttgggaggccaaggcaga

SEQ ID NO: 721925 - DNA, 86 bp, Homo sapiens
taaaagaaagccaatatacgtgtttggtccataattgaggaatcccacacacttctcaactaggttaaattaaatgccaggtaccg

SEQ ID NO: 721926 - DNA, 121 bp, Homo sapiens
tggggtgatctagaggatcggccaggtagattcacggtagatatagcaaattttttctttttgtatttctatgttctcacttttttttttttcctgagagagtctcattctggtcacccag

SEQ ID NO: 721927 - DNA, 124 bp, Homo sapiens
tctacgggaacagcgtatcagcttaacattaacgagagtcactatgctatactaaccccagggttggtcaatttcgtgccagccaccgcggtcacacgattaacccaagtcaatagtttatgct

SEQ ID NO: 721928 - DNA, 490 bp, Homo sapiens
  misc_feature (2)..(2): n is a, c, g, or t
  misc_feature (56)..(56): n is a, c, g, or t
  misc_feature (129)..(129): n is a, c, g, or t
  misc_feature (155)..(155): n is a, c, g, or t
  misc_feature (166)..(166): n is a, c, g, or t
  misc_feature (237)..(237): n is a, c, g, or t
  misc_feature (242)..(242): n is a, c, g, or t
  misc_feature (301)..(301): n is a, c, g, or t
ancgagcgtctaagagcatttaccttttcaaatgaccataggggttttaaagcganactgggcatgggagatatgggaatggtgcaggcacagagtctgtgtcttgtccccatggtgtctcaggtcatngctggtctggaggtctgatgggtgtnatggtgacttnggcccaatggtggtggactaatggttcatgactccccctaagcgggagtattccacagaggctccatgccnggttngtttcaagattcgcctctggggtttcttaaacaagagcataattagataaacatgcatngccggagaggagtgtctacagagggaaggaatgaaggggtgagagtggagaggtgaaagaaaaacaaagtaggtgatttttaaaactgaggtcccagcagccaaacaaccactggcctcgagataagcaacattaaaaccatttacactcctctaatgttgactgacggacaaccggggggtaccgagc

SEQ ID NO: 721929 - DNA, 107 bp, Homo sapiens
ggaacttggccacctccattgttctttgcttctgcacaagatccatgaaaatccattgatcaggagaacttcaacctgcaggacctctcaaggtacacatattgtag

SEQ ID NO: 721930 - DNA, 162 bp, Homo sapiens
agcctattaagaactcgtgaatagtttatctaggcactggtctaatgcacttcgcagactgtgattggcctggaagctcactatgcaatgattggcatgcagactcagctacttgttacaacgcaactctcatgttacggtctaccgtggggggcatctctc

SEQ ID NO: 721931 - DNA, 658 bp, Homo sapiens
  misc_feature (18)..(18): n is a, c, g, or t
  misc_feature (78)..(78): n is a, c, g, or t
  misc_feature (80)..(80): n is a, c, g, or t
  misc_feature (87)..(87): n is a, c, g, or t
  misc_feature (90)..(90): n is a, c, g, or t
  misc_feature (116)..(116): n is a, c, g, or t
  misc_feature (124)..(124): n is a, c, g, or t
  misc_feature (134)..(134): n is a, c, g, or t
  misc_feature (166)..(166): n is a, c, g, or t
  misc_feature (177)..(177): n is a, c, g, or t
  misc_feature (235)..(235): n is a, c, g, or t
  misc_feature (282)..(282): n is a, c, g, or t
  misc_feature (293)..(293): n is a, c, g, or t
  misc_feature (343)..(343): n is a, c, g, or t
  misc_feature (388)..(388): n is a, c, g, or t
  misc_feature (391)..(391): n is a, c, g, or t
  misc_feature (400)..(400): n is a, c, g, or t
  misc_feature (406)..(407): n is a, c, g, or t
  misc_feature (418)..(418): n is a, c, g, or t
  misc_feature (422)..(422): n is a, c, g, or t
  misc_feature (437)..(437): n is a, c, g, or t
  misc_feature (439)..(439): n is a, c, g, or t
  misc_feature (457)..(457): n is a, c, g, or t
  misc_feature (466)..(466): n is a, c, g, or t
  misc_feature (482)..(483): n is a, c, g, or t
  misc_feature (510)..(510): n is a, c, g, or t
  misc_feature (513)..(513): n is a, c, g, or t
  misc_feature (527)..(527): n is a, c, g, or t
  misc_feature (548)..(548): n is a, c, g, or t
  misc_feature (552)..(552): n is a, c, g, or t
  misc_feature (554)..(554): n is a, c, g, or t
  misc_feature (560)..(560): n is a, c, g, or t
  misc_feature (563)..(563): n is a, c, g, or t
  misc_feature (577)..(577): n is a, c, g, or t
  misc_feature (580)..(580): n is a, c, g, or t
  misc_feature (583)..(583): n is a, c, g, or t
  misc_feature (589)..(589): n is a, c, g, or t
  misc_feature (594)..(594): n is a, c, g, or t
  misc_feature (655)..(655): n is a, c, g, or t
ttgttattaaatcattcncttacaacccgtagttttaaaagtagatgcctaactcgttgtttcgagtccggagggtananactgtgnagnggtgcctgcaccccgcgagaagaatntgcgcctngttcaatatnctggtctgaaattggcgtgttggtcatctcgngcggtaaccanggtaggcaattcagaggaggggaaaaaaaatgggcgggcctcagtgcgcttgtatgtnggcgttcggacgcactgacgagcgtaatgttgtaacggcgggagctnctgggacggtngcggttggaggcaacgatgcaatatttggggcgctaatgaagtaagcagnggtggggcagtggtgctgctacgtggaggcatggctgtgtggtgnggngcgtttttngcagcnngcacggtattnctangacatccccggtggngngaaacacctacgtgtcgntgtcccacntcaacgtccacctctnngcggccctgcttgctcctgctgttttnctngggttcccatccgncaccccgcctccttcggactnctgngncggccnccncctgcactaccccnccngtngtcttncccgncccctggcgacacgcctgcgccactctggtgtccctgctctccttcccatccctattcttnggg

SEQ ID NO: 721932 - DNA, 728 bp, Homo sapiens
ggcctgcccttgacgcatagcctggggagcatcctgactgcttatgctgctccgatggcacagcatatgtgcgtcaatgatagaagaacatccaagtttcacactggccctggcaaaggtacatgggtctggacctccaagggaaggctctaacgatatcttgagctgcctcgagaggcagagagctgggagctggcatagtcctatcttcatggcgtcgtgaatcctaaacggaacatatgacaatgacgtaaggctccaaatgccgactatgcagagtgacaggcctgtgttcttcactctgggtttctagaagagtcctcacctctccctactccaccctgtgctagcacatatgcacttgacactgtctggatgtagatcgatcaaggggccgaacgagaacgaaagtgtccactctagcagggtgctgcacggtgtactctgggaggttcgccatgagtgcccagagataggctctgatgagcagtttactctacctaagaggatgcctctggtgagttacacgtatagtaggttgttcacttgtgtggtgcctgagggagtaaggggccctgaggagaagcgcagaggtggtcctcatgaccctgggggcggtgctggccgggggtggcttgctcggacgcgggagcatatgcctctgccgtccttggggggggacagctcttggcgccgtggccaggttctgtgggaaccttgtgggcctg

SEQ ID NO: 721933 - DNA, 651 bp, Homo sapiens
gcgtggggagcaggtgccggggtcagtgctacgtttaaattatggccgaacaagggcacgaagccgaaggagggaaaaagggcgagccacaacccccacgaaaaaaaaagtaagacgaacacgaaaagagggctggaggctggtgctttcttttacataacgggcctcggccttgcagtttcaccaagccttccctttagtgtatttaatcgccttctgattttctttttcaatgttcgtcttttcagccgcgccattgttgtttacgccggcgcggtgcctcccgttaaggttggttagccagccggccccctccaaacttctccacgttccccctattcccactcccccctccccctacgcccctacctctatacccctcaccaccccttcattcgcccccaactacccccatccatgccccctccactatttactcatctccataaccttgattctcacttataccctcactccctgttaactagctcaacatctcacgccctcactctcccacaaaccagaaatcaaatacgcaaaaacatatacacaaccagaacccacagaaaccggcggagcaaagtccccactgaaccttcccccacaacgcctgctcattggggggaggcgaccagcgggggtggaggggtg

SEQ ID NO: 721934 - DNA, 662 bp, Homo sapiens
cagcacgagcctcatatgactaagaaagtggattttgaatctctattttgctcaaaagttcagttcctagatatactagatgactagacagtgctactggaaaattttcaagattgtatggtcttttaaaggttttttatttttttttttttaatacaaacttaaccactattcactgtccacataatcaattgtcacattacaatgctacatgctaattaattacataatatacaattccagtgatggaaggcaattataatggatggtgctatatacaacataacactaccatctttaaccataacccatctctacagcaccacttcatctttttaaacaccctgagaatctatttattattactattatcctttatttttaaatacttacaatataatttacattcctaattaacttttatattatggcattaattttatttctattttattttatttatcatttacctatagtactattactattacatactatcacctataccctatttctactaaatactcaatacactattatacaatcactataactaccacttaagacttcccaaactaccctttagcatatcagtgacactccaatattgggtaacaaaaaaccttttaattgtccttcttaacatatatttctcccctgtt

SEQ ID NO: 721935 - DNA, 306 bp, Homo sapiens
ctcagtatagacggaagcccgatcataatagctgtacgagatttactgccttagacttgcagagagccagatcacttataccaggacccgatcttacacatccgtaagacactgacagatccagatccttataccatgcacccggatcctacctcctcagatactgacagatccagatcctcacaactgaaccagatcctacttcctcagacatagaaagacccagatccttataccaaggcacgatgttacctcctaagacactgacagatccagatccttatacctgcaccaggatcaaactca

SEQ ID NO: 721936 - DNA, 1153 bp, Homo sapiens
  misc_feature (18)..(18): n is a, c, g, or t
  misc_feature (29)..(29): n is a, c, g, or t
  misc_feature (59)..(59): n is a, c, g, or t
  misc_feature (73)..(74): n is a, c, g, or t
ggcgcaagacagatggcngtggcctgatncgggcccgttggcggcgtcactgacgcttngctccggtcctcgnnatcccgagcgcggggaggcagaccgctgtgagctgcttgtccccatcctgcggccgtcctggggacacagagccctccgtggtgcccggggattggattggagccaggacctcacttcctcctctgcccctggccctggctcctcccagggacctgggccgaggccctgcatgccggcccatggtctggtccctgcgatgcgcgagttgtgcgtccaggtagagggtcccctcgattggacctggcttccgtgctgcactcgtggtctcctggtgggcagctccttctgatggacgcgtgctgtacgtgactggcgcaaccactcgtgccactcgcacaggagtgagtagtgccagacagggtgaggagtactgagagtcctgtgccccagaaacacctgaagcgagggtgaaactgtgagagtggacggtcaccttcaatcgcggcttccagcaggaggtcttcctaggcaaggacctgggtggctttgatgaggacgcggagacgcggccggagccggacggaagctgcatggtcagtctttgtccaacggtggattgtcgaaccactgaacggaagatcagtgcccaaggacgatgcatggctggatcatggacgaagacggcgagcacttccaggaggccatggcacgacagcaagacacaacttccgcgccgtgggacctgaacggggacggtcacgtgtctcgcagacgagtataagggtgaacgtattggcgagtacagggcataacgaagaaggaggttgccgagcccattcaggctcaaggaggaatcaaaggggaccaaggaacccagggaagcccgggaaaaaccgaagagcacggggacacaaggggaacacccccgatttaaacccatcgcacacacagacgacaacctactgatacccaaaacgaaaacaaccaggaaacaccagacaaggggcaagaaaaacacgcgaaacgagaccgaggaaacacaacacagattgccaagaacctacatatctggagtgcacggaacacactgacaataaaagaatctgcctccacaaacaggtgcagcacgacacaacag

SEQ ID NO: 721937 - DNA, 887 bp, Homo sapiens
gggtctggtgggggttacacgcgggtacatcatgcgtatcgaaaagtgttattactagttcgtgggcccatctatcctggacacgggttgatgtacgtccgtggacgattgcaaggtgtacagagttggcagaatctaagattgtcgtaaagagtttatagaatgaagcgcaattcctcgcgaaatgttaggtggagccataagcattccgtgaaaacgcggcttgggttatagagcttaccgtgggtaatccattttgatatgttcgaaaatatgtggagaaatgaacctatcacaaatatgagggacgcaagctatgggcttaccaaggtattgtacgcgatggacgtagcgtgtggagagagttcaacacaagaagcgccatgcgtaatatttatgatcgagacggattgaataaccatatatagagctactatgaatgtgtcaggcatataaaacgaagtcctgctggaacagtccatcttgatccagagatcccttctttggcgggcacgcgtaaacagtcggaagagaatatggttcatgctagttactaggaggatgtgtgacctggaagggatgctcctatagacaatctctgtaacctactgtctttttgtgtacatcttgaaaaactgcccttgtgggatacttcgggcaactggtcggattatttaattctgtccccatgcagggtccctctctactgaaagcgatcataggcctcttttcctgcctgggcagctacgttgatatcgggagataccgggatgttggaattgctctcaaggggtaatctttctggcgagatgtcttttcggggctctgcacatcttactggaactatgaagggcatcgggggcgccatggcgggccttgggtcacgg

SEQ ID NO: 721938 - DNA, 1551 bp, Homo sapiens
  misc_feature (18)..(18): n is a, c, g, or t
  misc_feature (29)..(29): n is a, c, g, or t
  misc_feature (59)..(59): n is a, c, g, or t
  misc_feature (73)..(74): n is a, c, g, or t
ggcgcaagacagatggcngtggcctgatncgggcccgttggcggcgtcactgacgcttngctccggtcctcgnnatcccgagcgcggggaggcagaccggtgactgaggggcccgggacggacgctgtgggtcgcggggtcaatgtgctacgccggtcggacggactagggcgggtctggaggccgtcgccgactcccgacttgggctggggcattcgtccggttcgctctgccttgagcccttgtgcagagagctccgccgctagcggggctcccgggggcaagtgatcaggtcgcgatcgatcgctggacctccccggtgcgtcgggatgtctggtctcctatctggtcaaaaactatcgaatggcagcgggataacggagtgcccaaggggtctggttggactcgcgtttatcggcgaggcgaccttggacaagctgccccgcttccctgcgcctgcgcttccgcttctgaaccgcgtggaccctcatccccgactgtgagctgcttgtccccatcctgcggccgtcctggggacacagagccctccgtggtgcccggggattggattggagccaggacctcacttcctcctctgcccctggccctggctcctcccagggacctgggccgaggccctgcatgccggcccatggtctggtccctgcgatgcgcgagttgtgcgtccaggtagagggtcccctcgattggacctggcttccgtgctgcactcgtggtctcctggtgggcagctccttctgatggacgcgtgctgtacgtgactggcgcaaccactcgtgccactcgcacaggagtgagtagtgccagacagggtgaggagtactgagagtcctgtgccccagaaacacctgaagcgagggtgaaactgtgagagtggacggtcaccttcaatcgcggcttccagcaggaggtcttcctaggcaaggacctgggtggctttgatgaggacgcggagacgcggccggagccggacggaagctgcatggtcagtctttgtccaacggtggattgtcgaaccactgaacggaagatcagtgcccaaggacgatgcatggctggatcatggacgaagacggcgagcacttccaggaggccatggcacgacagcaagacacaacttccgcgccgtgggacctgaacggggacggtcacgtgtctcgcagacgagtataagggtgaacgtattggcgagtacagggcataacgaagaaggaggttgccgagcccattcaggctcaaggaggaatcaaaggggaccaaggaacccagggaagcccgggaaaaaccgaagagcacggggacacaaggggaacacccccgatttaaacccatcgcacacacagacgacaacctactgatacccaaaacgaaaacaaccaggaaacaccagacaaggggcaagaaaaacacgcgaaacgagaccgaggaaacacaacacagattgccaagaacctacatatctggagtgcacggaacacactgacaataaaagaatctgcctccacaaacaggtgcagcacgacacaacag

SEQ ID NO: 721939 - DNA, 520 bp, Homo sapiens
agtagctccttcaaaagattcctttcggtcctaccaacctaacaacagcactctcttcacgtaatctgagcaagcgagggatatcgtgcaaagtatgagtcaaagtgcaaatttatgtgaaaatcttttgaacttattcatacttggtttgtagcatttcagaagccacagatattacttactagctgacgtctatttcttttccaggtttctgctttccttttggaattcatgttctggaaaggtgaaatcactggggaggctgtggttcagattcctataaaattctgtcctatgtgctttttttcagtcctgtgcaaagaccaaagtcagaaagtttcacatggccctatggggaagaaacaaggtgatagatggatgagtatacttggaggtagaacagaacattacgttctgctccttacagcatccattatagctctacagccaaagtacactgctccttcttttatgactaggaaaatcctgtaattgcagataaattttttactccccaatc

SEQ ID NO: 721940 - DNA, 1274 bp, Homo sapiens
  misc_feature (943)..(943): n is a, c, g, or t
  misc_feature (1274)..(1274): n is a, c, g, or t
acgcgggtccgcgcggctgcgccgacggacgcccgggacggcctttcgcccgacggcgggctgcgggctgctggggtctggtgcggacgggccaacctttcgggacataacccatggcatgtgaggcattaaaaacatcgataagatcaatttcatatatcacaggcgaatatcatcatcatcatcgaaataccatattacacattatatatcagaactagatattagatatcccaacaatccaaactcacgtagaacaagagcttggagatctcgcataataatattccactagatttggacaatcaacaacatcccatgcaatctattaaaggcgccatcccacaatgcatccatatcttccatccccatgcaatgacatggagacattccaagcggactcggtcctgaaatttttcacacttttctcccttatgaagcaacttttcacagccagggtctatttcttccacggggtcatcatttttgcgtggcctttcacaactgggctccaatccccagcacttgtctcatagctgctcaagggtgcggcctcttcttcaccttggccttcacttccttatccttgtgcggccaaccccaacttttgcctcctgccccgccccctcgttgcccctcttcttgtctcgctttcttgcaccctttcctctttcaccaacgctcattggtcgctacgtaccttggcccggtcccccccttttctctccgctcctctccttttcttagcgatccctgtgcttgccctccccttccctgtcttagccttttggccccgtcggtgttcttttcccactttctgcgggctttcccactatggtgcctcctttcttgggctggcttgggccacgttccctaccttcccccacatttcggttcctgggctcctcttccctctctcggggtctgcttggcgctacgcctncttttctccgcaggctcttgtggcctttctccaatgcctctctcgcaatctcttctgttgttccccctttcgttcgtcgtgcctattttctcccacaactgtttcccgtaggttccttcctttgcgcgtagcgcgcggtcttcgccgacatcttcgtcttcatttggctcttccgccccttgctcggctttccccctctgcggctcttttctccttctcctatcctcctctcttccactccttcctccattgtggcgcccccttctcgcgctttcgcttttgcttcacttttctccatttccggcttttcttctcccgccctcgcgcttgn

SEQ ID NO: 721941 - DNA, 323 bp, Homo sapiens
gtggcgccatctcggctcactgcaagctccgcctcccgggttcacgctattgtcctgcctcagcctcctaagtagctgggactacacacgcccaccaccacaccaggctaattttttgcatttttttttagtagagatggggtttcaccgtgttagccaggatggtctccatcttctgacctcatgatctgcccatctcggcctcccagagtgctgggattacaggcaggagcaccgcgcccagctgacaactgtttcctacatctgaaaatgtcactgtcaaatcagagcacttgagtagaagtttatcatggagtggaggg

SEQ ID NO: 721942 - DNA, 991 bp, Homo sapiens
  misc_feature (2)..(2): n is a, c, g, or t
  misc_feature (120)..(120): n is a, c, g, or t
  misc_feature (160)..(160): n is a, c, g, or t
  misc_feature (170)..(170): n is a, c, g, or t
  misc_feature (179)..(179): n is a, c, g, or t
  misc_feature (206)..(206): n is a, c, g, or t
  misc_feature (221)..(221): n is a, c, g, or t
  misc_feature (230)..(230): n is a, c, g, or t
  misc_feature (232)..(232): n is a, c, g, or t
  misc_feature (235)..(235): n is a, c, g, or t
  misc_feature (244)..(244): n is a, c, g, or t
  misc_feature (330)..(330): n is a, c, g, or t
  misc_feature (376)..(376): n is a, c, g, or t
  misc_feature (402)..(402): n is a, c, g, or t
  misc_feature (404)..(404): n is a, c, g, or t
  misc_feature (417)..(417): n is a, c, g, or t
  misc_feature (420)..(420): n is a, c, g, or t
  misc_feature (434)..(434): n is a, c, g, or t
  misc_feature (446)..(446): n is a, c, g, or t
  misc_feature (448)..(448): n is a, c, g, or t
  misc_feature (451)..(451): n is a, c, g, or t
  misc_feature (458)..(458): n is a, c, g, or t
  misc_feature (476)..(476): n is a, c, g, or t
  misc_feature (498)..(498): n is a, c, g, or t
  misc_feature (548)..(548): n is a, c, g, or t
  misc_feature (564)..(564): n is a, c, g, or t
  misc_feature (610)..(610): n is a, c, g, or t
  misc_feature (639)..(639): n is a, c, g, or t
  misc_feature (646)..(646): n is a, c, g, or t
  misc_feature (651)..(652): n is a, c, g, or t
  misc_feature (658)..(658): n is a, c, g, or t
  misc_feature (662)..(662): n is a, c, g, or t
  misc_feature (666)..(666): n is a, c, g, or t
  misc_feature (697)..(697): n is a, c, g, or t
  misc_feature (700)..(700): n is a, c, g, or t
  misc_feature (709)..(709): n is a, c, g, or t
  misc_feature (719)..(719): n is a, c, g, or t
  misc_feature (726)..(726): n is a, c, g, or t
  misc_feature (746)..(746): n is a, c, g, or t
  misc_feature (758)..(758): n is a, c, g, or t
  misc_feature (767)..(767): n is a, c, g, or t
  misc_feature (787)..(787): n is a, c, g, or t
  misc_feature (812)..(812): n is a, c, g, or t
  misc_feature (836)..(836): n is a, c, g, or t
  misc_feature (869)..(869): n is a, c, g, or t
  misc_feature (875)..(875): n is a, c, g, or t
  misc_feature (885)..(885): n is a, c, g, or t
  misc_feature (894)..(894): n is a, c, g, or t
  misc_feature (904)..(904): n is a, c, g, or t
  misc_feature (915)..(916): n is a, c, g, or t
  misc_feature (930)..(930): n is a, c, g, or t
  misc_feature (990)..(990): n is a, c, g, or t
tnaaataatatggctatatttataataatataataattatctaaagcaaatatcatcattggctctgaaatgcgtgtaaagatgttattcttaagttaaaaaatacgtagtaagaatgtncaagaaagaaaaaaatataaaaacaagtgtgctgagtgtngggagtgggngagggatancctaccatattgtgacggagttcaaanagaaaacatgccgcnacagtgctncngcnttatcagcnccctggaaaataaaccagtgaccctgggagtgcagtgaccatttggttaacaggacagacttcctgagggacagagagagtgattnactgccttgccctgctctaactgctctcttcacaccaatgcctttnctttcctttaagaggggtttcatccngnggacaaaagagtnggntttatttgtgaagnaaagcagagaananccngattgangtgttcaatgatttagtngaggatgcgtggggatcaaacnttgtgaaaaggtcaatgaagccagtgagcagagactatgagtggcttgcngagaaaaaattcgganaagatgtgtgtgaaaaagacaaaaagaataagcggtgaaaaatccnagggattactgttacccagacaatcaaangcgaganaggtnncccccnattnaatncatttacttgtggagttagcaaaaaggaggnttnaagaaagantttggtttcnaacagtnttcgtggtcaaagggcacantcagaaggtctnctcctcttntaggaactggaacacggatnataagtttttttttgagtggccctntgcacacatcatcctgtagatctnatgggccagaatgccaagaaggattgggctctntgtgcngggagcaganttttgttcnaattccagancttaagccatnngttttgttccaaantcaccctgaaagttattagccgagggaacgccaccaatcattccaggtacagggattatna

SEQ ID NO: 721943 - DNA, 833 bp, Homo sapiens
gttatgcggtactgactctcttattaacggcgctacgaacaccacctggaacacagctgtgacttgataaacaagtgaaacattctttggtgtggtgaggggaaaacaaatttctcaaaggacacgcaccatggtgtatgagaggacactggagcccagccagcatctgacatgctgaattcaaagtgcaggtgaaagtaggacaactgattcacaagctgggatgcctgtgttgttgtttgccagtgtgcgtgtgtgtgttttcctggcacccttcattcattccccagcacagttgacatcaggttggaagcagtgagttctgagggagactgctagaggacccaacttggagaatcaacgatctgcgatgaagataatgaagataaagacaatgtcaatgtcagcgtccaaaatcataaggaccctttaagaagcttccagagcagaagtgactgtgcaagaagggccaataaagtctaggcaatgcacgaccaggcgcggtcgctcacgcctgtaatcccagcactttgggaggccgaggtggttggattacctgaggttaggagtttgagaccagcctgaccaacatagtttcaccccatctctactaaaaaaaaacaaaaacaaaacaaaagttagccaggtgtggtgctgcacacctgtaatcccagctactctggaagctgaggcaggagaatcgcttgaacccaggaggcggaggtggcagtgagctgagattgcaccgctgcactccagcctgggcgacagagtgagactctgtctcaaaaataaataaataaataaataaataataaagtccgatgcgaacg

SEQ ID NO: 721944 - DNA, 925 bp, Homo sapiens
ctctgggttttctctctgggtccctctctctgtgcccccttcgttccttgcagtgggtgctcttcctttggtggctctctcctctcctgagggtctctcctgtcttcgtgtggccccgtctgtgctctgtcccgaaagtgttgactgtctatttggggcgctgtgcggctggcttttcttccatggggaacggggtccttactcctgtgtgtatcagtgggccgcccccactgtgttttagatcgccccgtgctcgtcccctgtgagtgtttcgcgctctgccgctctcccgtgttgcagcgctccctgcgtaggacccccccgccttttgtctcccgccttgggttagtggcgtcacgttcgcgcagattgtccccctggggtttatattgcccacagggtacaaattgtgccttgtccctcgggcaagctaaaacttgtctcgcgcaagatcttcagcgcacggggtgctgcaggttgtgcagagaggacgtacccgctgtttgtgaacacgggatgcgatggccccgcgctgatgtgtgggcgagcaaaaaagcaattggggcgccaatttttagaatcaagggtatatcctgttatggccgccccagtataccagaaggtcttggtatgcccctagcgactgaaaccacccctttgggtcgtccggtgtaccagagcttcgcctcttgtaggcgagaatggttccccccggtagtgcgctcctatgtccccccctccctcaacagttgtggtataaccccgcgacgctgttatgcaaacgggtgtggaaacgcaacaggtccggcaccaaataggagccgaaccgtgcaagagctcgggcgcttttcacgcgccactggcggataccttcaatcttgcctaacaagagttctcgtcaaactttaacaataaaaaaaaacca

SEQ ID NO: 721945 - DNA, 540 bp, Homo sapiens
atactagagggtcatagccaaccgactaaccgaataacacggcgggcactattaacgaggagcattcatataccgagggcaacacacacccgctgtccgaaaagtccttcggtacaggataatcctgtgtataacctcagaagttttataactacgaaaagattttccatgagcctatcttaccactccagccatagcgccgtaccccacaattgaggagggcactggacaagaacaggcactcaccccgctaaatccactagaagtcccagtcctaaacacatccgatattactcgcataaggagtatcaatcacctgagactcaccatagtctaatagaaaacaaccgaaaccaaataatacaagcaatgaaaataacaatggtactgaatctctatttaacccacctacaagacctcagagtactacgagtctccctatacaccataagcgacggaatctacggatcaacataataagtagccacaggctaacacggaacttcaagtaaataaagactcaacataactcaatatctg

SEQ ID NO: 721946 - DNA, 122 bp, Homo sapiens
taaccctgaaatgaggtctgtaccgccgcggacacgggtgtattttctgtgcgagaggcttaccccggggaaatattgattttttgagtggcccctttgactcctggggccagggaacccac

SEQ ID NO: 721947 - DNA, 260 bp, Homo sapiens
  misc_feature (203)..(203): n is a, c, g, or t
tcctaggtatatgtcgtgcctaccatggtgaccatcggatcgacggggaatgcaagaagaccacgacgccaactaagaatctgaacccactgccgatgagagccaggatgatggcgtccttgtagcagctgttgctgaagcggttgtagctgcccaggtctgtgaaggcccccatgccaatggcgtaagaaaagaaaatctgngtccccgcatctatccacacctttcccgtggatttaacccccttccagacacagaag

SEQ ID NO: 721948 - DNA, 445 bp, Homo sapiens
tctgacggattgaatgtatgctaatcttccgacctgccgacaccaggacgcccctgacatgaagaaaaaatagacagcacagtaccgacacctgcgctggcagatcttcgcacggtattaactacggttacgccgggtactacctgctgagcaagaacttctccctggccatgccgtccctgatcgacgagggttacacccgtggacagttgggcctggcgatgtcggagattgcaattgcctccggcctgtccaacgttcctcatgggactggtgtccgaacgctccaacccgcgctacttcctgcccttcggactcctggtgtccgacggggtgatgttccttttcggtttcgcaccttgggctacgtccagcgtgcccatgcatgtcattttgctagtcatccacggttgggcccagggaatgggctggacgccaagtgggc

SEQ ID NO: 721949 - DNA, 1095 bp, Homo sapiens
taaaaaccctcatcaataaatggaaacttacaaaaattttcaaaccacttttacaaaatgccagtatcagccgggggcttcgaaacccaaagtgtatgttgggtatgtaacagtgaacattattaagtgggcggatgaaagcaaatacgtgaggaaacgttgagccaatatatgcacgtgaagtccgtggaaccctgtggctcacaaacaccatgttgacccgtaaatgcctgtcgaaaattgggtgacgaaggggaagacttcgaaagtactctggagggctttgtacggaggtgtgtaaaataagaagacccaggtaaacattttgtacatacggcatgtggtttagaacttattggtgttccagagttgttctccatattaagacctattgtggagacgcctacaggtgtgatttggacaaccctcctgaagtgtgcgagaataaacagacggaagatggtgatcacacgcgcacggtggcgaccacacaagggggacaatttaacccaggcagcgtaaatgacccgcaatgggagagcaccacaagacgccaccccaacaatggcgagagggagtacagggacataggccctcgtaccagcgcgcaccaaaagggggtctcaaaaaaaaaaagttcttgtgtgagtaggaacagaaacatattttcgtaggacagttattctaagatgtagatgaattatagccccaggttatcgaaaggcgccctttgtgtgtgaccaaacacatgttagtatcgtatgatttagaacccctgtgcgatatttgatcgttactccgctctagtggatcacacccccacgtttcggcccgaaaaattgccgtgaccacacaaggggagaatacctggcacgtcaccaacgagagaaccaacagcaaggcccaacaaggggcgatagggcactggcgcccatcagtcacagaggcggacgcacacaacagagagccgccgtaaaataggagaagatactcaaacaaccacaaaagacaactagtaagcacaccatatgtaacatacacaccagcggcgaatcgagaaggctcacgaacaagctgtgcaacagaacgacagag

SEQ ID NO: 721950 - DNA, 192 bp, Homo sapiens
  misc_feature (81)..(81): n is a, c, g, or t
tcattgctctttgcaccagtgcacatggacgacgctgagcaccaagagtttcattcttctggacacacttggtgcattgcntgtaacactgactagcatggctgtgggaggcagcagcctctactgggctgatcctccaccatgctcataagctgcatctgtgctgtgacaccaccttggccatgtgccaca

SEQ ID NO: 721951 - DNA, 90 bp, Homo sapiens
gccgttggaagtggttgtattcagaaaactggtggatagaggaaataaaaataataaaagagaaaaagaataagaagagtctgaacttag

SEQ ID NO: 721952 - DNA, 365 bp, Homo sapiens
  misc_feature (114)..(114): n is a, c, g, or t
  misc_feature (138)..(138): n is a, c, g, or t
  misc_feature (210)..(210): n is a, c, g, or t
  misc_feature (237)..(237): n is a, c, g, or t
  misc_feature (249)..(249): n is a, c, g, or t
  misc_feature (274)..(274): n is a, c, g, or t
  misc_feature (276)..(276): n is a, c, g, or t
  misc_feature (316)..(316): n is a, c, g, or t
  misc_feature (341)..(341): n is a, c, g, or t
  misc_feature (354)..(354): n is a, c, g, or t
tcagcaactgaaggccgccctgcacatgaagactgagctcttttccagctcatgccccaggtggaatcatgctgaatgagacaggcccagggttaccagcgctttctcctctanaatcgctcacccacatcctcccgnaaagtgtgtggaggaattcaagtccctgacttcctgccctggactccaaagccttcttattgactcctaggnatcaagaggcctgtgagctgtccaatnactgacctgtancttcatctaagtccccagatgggtncnatgggagctgagttgttggagggagaagtggagacttccngctccagctcccactcaagataatnaagataatttttnaatcctcaaaa

SEQ ID NO: 721953 - DNA, 347 bp, Homo sapiens
  misc_feature (138)..(138): n is a, c, g, or t
cctcctgtgagtcctttttcctgtacaaaacctgcctggggtgggtgggggtttgccattccctcccccaggacttccctgccccttttttcccctgtaacctgtttattaaccaaacctgtcctgagttcatggccnaaacctttaataagaaaaaccaaagaaaaagacagtggaaaaaaaagacccaggggcctgcccccctgcggggactttcctgtttcaaccttgtgaaagaactgggtttggttttggttttggttttttttttttttttggttgtttgttttttaacacttcctgtgctgtgcccatttataagaggaaataaaattaagctgaaatga

SEQ ID NO: 721954 - DNA, 481 bp, Homo sapiens
atgcgtggtacgcccggagactgtacttccaggcagaccctgatttgtattccagatcagcagctagtgctggcttgaggccactattcagctcgttcgtcatccttcaccgaatagagctgttggacttgctgtattaatcataatcttatgtataggcttcactaaaataagatatgtattaaagagtcaggtcagaagctaaagaaaagccgctcggttcagagccgagaggaaaatgaaatgagagaggagaaggagagcaaagaggaagagaaaggtaaacatactaggcatggcctcgctgacctctcagagctgcagctgaggactctttgcatagaggtgtggcccgtgctggctgtgataggaggagttgatgctggtcttagagttggaggtcggtgtgttcacaagcaaagtgggcgccatgccacgctgctgggagtggtctaagagggcagcacgtctgccaaggtcc

SEQ ID NO: 721955 - DNA, 137 bp, Homo sapiens
cacgagggtttagggagataacaatacctaagattgtctgaggttccatctttctcatatttcctaatgaaggattctcacttctgagcagatttgcattagagttctgttttgtttctgttttcagtgtctagtgt

SEQ ID NO: 721956 - DNA, 237 bp, Homo sapiens
ctgtgtaagaattctctttgtgcatcccctgtcattttcccctatccacttctctctctcgtcgctaccaacaccaccctctacactgctaattgacctgataggatgccttctttaccatttgcctacaccctgattcccaaaacctatttgctttcacctggactgacccttacaccctccaagccacggtcaacccacaagccacggtcaacccacaagccacggtcaacccac

SEQ ID NO: 721957 - DNA, 392 bp, Homo sapiens
tccccacactgggttcgagttcgaggagcccagggtgattgacctgttgtcctggcgcagccgcaacctcacgggagggtgctggaggcgttccgggagccgctcaagcacttcgaagccaaaatcgagaagcacaaccactaccagaagcagctggagattgcgcacgagaagctgaggcacgcagagagcgtgggcgacggcgagcgtgtgagccgcagccgcgagaagcacgccctgctggaggggcggaccaaggagctgggctacacggtgaagaagcatctgcaggacctgtccggcaggatctccagagctcggcacaacgaactctgaaggcactggggagcccagcccggcagggaagaggccagcgtgaaggacctgggctc

SEQ ID NO: 721958 - DNA, 183 bp, Homo sapiens
atcataggatgtatttcttagctcagattcctttatctcagaatatcatttcttcttcatctaatagcatatctagtcaaccatcatttctctccctactctataaaatatagttctcatggattacgtcttacatttctgtccgttcactacacagtcaacaaagtgatcattcaaaaagat

SEQ ID NO: 721959 - DNA, 1051 bp, Homo sapiens
agacagtgtgctcggatcgaactacttttacctctgcgtctcctctgacttaagcagttcatcttcgacgtctacgggactcgtgaggcgtagccacgatcaggcaggcctgcgatcggtaggagaggagaatcagcgacatggtgacgagagctaagatttgccggtgacaaagcgtccgctcagcagcccagtatgctacccgtggttaggtccagacctctcaagccattaagagactctcaagtagggtagtggacgagttagagggacacaattattctagctaccgctcagggtgtctgccatgaaggttctcgtgcagctgaagtggcctgtttcagtctgtgcatggctatgcacatatactccacgagtatggagtcttagagcgatcaggtacaactgagaaagtcggagatagatggcttgtgagcaaaaaatcgtcggacgagcgacgaccatgtcctgatcacattggaaacgtagcggacttctttgggccacgcagtggggtgagcaacacgaacgtgggctagccatgagacacgattcgaccgcacacttattagaacgctcggttgaccaagaatcgatgaggaaaactgaagcatcgaaatacttggttgatagacgagacattcaagacgacacaccctgcgtcttcaatagtacggaagagattaatgctttgtgtccgttggttagtaccaatgcatataaatctcttgagccagtctcgcatagagtaagacgtttaaagagtatctcatgatagtacgaacgagaatttacctcgaaacaggttgcccaatctaacgaagggggcataaggggggcgtgccgccgcactagaaatatcttcgccgtctggaggctgggcgtgtgcagggggaccatgaccccgatttatcgtgcgaatgaaagaggtgcctccacatgaagcgaagggtaaaaaagatacaagcaaggcacgggccgcagccggggaaaacaggggcgaattgggggaaaagctgggctagggccacccctggaagaggcgagccag

SEQ ID NO: 721960 - DNA, 292 bp, Homo sapiens
tatatacaccaacaaacaatggtcaccagtaactactactaatcaacgcccataatcatacaaaggcccccgcaccaataggatcctcccggaatcaaccctggaccccttctctcttcataaatatattcaggcttctctacacatattaaaggtttaccaacaacacacaaccccaatcatactcttttcacccacaggcaccaattccttacctccatcggcttaacccacacttaaaacatctcaccaaggaccttcaaccccttgacccccggtgctgtggatcggg

SEQ ID NO: 721961 - DNA, 573 bp, Homo sapiens
  misc_feature (516)..(516): n is a, c, g, or t
ggcggggctcactgacagcggtggtcgggtgtgggtgtggagtttcccagctggcccctcgggtgcgacccttgtgagcgtttctgctccggtcgccagtcgttacctcgctcctcgggccatgaccacaagcaccagcttcaagggagtcgatcccaacagcaggaatagctcccgagtgtagcggtctccaggtggtggatccaattcacatcaggtttgatgaaccaagagaacaacctgtgaggaagaacaaaatggcctctaatatctttgggacacctgaagaaaatcaagcttcttgggccaagtcagcaggtgccaagtctagtggtggcagggaagacttggagtcatctggactgcagagaaggaactcctctgaagcaagctccggagacttcttagatctgaagggagacggtgatattcatgacaatgtggacacagacttgccaggcagcctggggccagagtgaagagaagcccgtgctgctgcgcctgtgccagcccggntggcccggcccagtgccatccagaagaatccccttggggagtcagctcgtctgggta

SEQ ID NO: 721962 - DNA, 464 bp, Homo sapiens
cctgtacagaaagactcagttctttttctcatttatggcttgcatgttacagctcaataagggggaaagagctctgtttaggtcatccataggaatgtcaaaaatacctgcgagattaaattggtcatcagaattttgcttgatgagcatgaaacacaacaaaggattttaatgatatcattgaagctttgtagaaacctgctgaaccattcctgatctaaaaagaacactcttttttagatttattcagctgaatctctcttgaataatagtgccagatgattactcaatatgagggaatagagaaggagagggggtgtcagctgctgggattacaggcgtgagccacgggcacctgacccggagcttttcattcaaagacttctggtggccagatcttgatctgaaccttcctttctctagtcctttatgtaacctggactccatacatgccaaccaaaatg

SEQ ID NO: 721963 - DNA, 2296 bp, Homo sapiens
tattttagttagcgaaaggacataatcatcaatgtttataatctggagtgcgttatcatggtttatagcaattagttcatttgcatttatgtttttatattcatcagcaaaattgcaatgggtatttggattgattggaattagtcagatacttttatggctactaatatggcgtttttcacgttcagacaagaacggtagcgattaaaatatttcggcagacatgtgcgtacagtttatagcgtccgctttgttagcatgtattagacgttaacgaacgattcgcttacatcaaatttgaacgatacggttgctacatggtataattttgttagaagaattgtggtttggagtcttatcttcaatccagagcttgtcgtctgtcaacgatgagctttttttgtgcaaaaaaatagccccgtcctgtcaaacgaggcacttgtattagcgacgattgtcgaaatacttttgcaacaagattaatactaagccagcaaaaatctgccaaagtgtggcttggagctgttgcattagaaggattgcggtttgcatggagtctcacctcccttctgggcgtctaatctcaacgccacgagaaatagtataccatgactttaaaatggcttagaacgcaaataagagccgtttaagagtatttaagtttgcggtggtatcttcgtatcggtggcgcgaccaaagggaagcagacgacacacagcaggacactccaagtgtccagtgtgctggggtgccgttaagaaatgacgaccagtcattttaggcatctcgtccttgccgatatggagataccacctctaggcgaaatgaggagagctctgctcgacgattggagactttttgacgggaggcgatcagcgccagaaaaaaccggctgttactaacagccgaacagcccgctagaggtttcctttaggtaaccgcacaaccaaaaaagcagtcagaatgacaagccaaataactagtaattcgcccgtaaaatggaaacgtagaactcgtcatgacacttgtggtaaaataacattattcgccttgcaaaaaacgatgtactttgacaatttaagcacaaaaaaacacaacctcgacaatttagagttagagaggtcgtgttttgagattagtgagactatggatagttcattaagtattataacatactcaatgagtgtacatagtctccagaaaaatggagaacccatgaaacaagaaaaacagcagtttataaaaacggattggacgattgacatgataaatcgtcggcaatttgagaaatatgccattgatattctcacagctactaaggatattcatcgcggtggatgggtagaacgaattgataataaggcttggcagtatgtcagagtttatgaaaatggcgacattgaagttttaattacacttcagataataagattccacaaatattttgatacaccagtttggttacagtttaacccgaatcatcttttacccgcagattatgtgcaacttgatcatgtgatgaaatatgttgatcactcacatttaactcgcgccgatttagcaaatgatatttataacatcaacttgcaacgttacgattttggattgtttggagtaactagagatatctatcgtagtttatctggtgatttagaaacacggtattggggacgccgaaaaagtgagcgccaaattcgtctttatgacaaaatgcgcgagatgaaaaaacatggcaaagcagatgatattccagacggtattactgattggtggcgtttagaatttcaatttagaggtggcaaggttgagtcatggcaagaagaagtaatggacaaaatgcagtcgttccatgttcttgctgttgatgataatgatgatttaagtgaaatagataaagccattttagcacgtgttaatgccgataaatttgattttaaaagagtcggtaaacgttatgctgcaaaaattcggaaaatggtacgtgaaaacgttggttttgatacgaccgttgcagaattatctctcaaaacattcaacgaacaaaaagatgagttgcagagacaactagatagcatgcttgcaaaatataatatcggtgcacaaacagaagaaatgacagcatattttgaggaagagcttaaacaaacaggtaatcttgatttttctgttgttgagagtgaatctgcgttagagcgtaatgtgatacgaaatattgctaaaacttggcgtgaagaaaatagtttaacgcacagaactaatactaatagttgatgcgtattttttatttttctaatat

SEQ ID NO: 721964 - DNA, 361 bp, Homo sapiens
  misc_feature (24)..(24): n is a, c, g, or t
tcagaagctgcttaaacattcccntgagcttaaagaattgcactgcactctggcaatgaatcagcgttcctattgctccacatcctcaacagcatttggtgttgtcagttttctggattttggccattgtagtagatgagaaaattgagaaacggagagatgaaaacatttgcctaaagtcaaccagttataaatggcagaggcaggatttgaatgacagctgtacaacttcagagcccctccctttatttcacaacactgaagtgctttggggcgggcatgctggtcaatgtataggggtggtttatttatttattttctaactaagttactgcaggcagccgtggcttagttagaaaaa

SEQ ID NO: 721965 - DNA, 125 bp, Homo sapiens
tatgagactctcttatctttatataattctgcaaaaggagatttaagctttgcagttcaaaatacgataagctcattttaatgactgaaatctatactatacactcagaaggcaattgctttttg

SEQ ID NO: 721966 - DNA, 220 bp, Homo sapiens
aggtggaatgaggtttttgagccaagatagtgccactgcttccattctgggtgagagagtgagacgctgtctcaaaaaaaaaaaaaaagggccaggttcgggtggctcacactcacacttgtaatcccagcatttgggaaggccagggcgggcagatcacgagtccaagagatcgagaccagccttggccattgtggtgaaattggggactcctctagag

SEQ ID NO: 721967 - DNA, 115 bp, Homo sapiens
  misc_feature (24)..(24): n is a, c, g, or t
  misc_feature (28)..(28): n is a, c, g, or t
  misc_feature (95)..(95): n is a, c, g, or t
gaagaacaggcgccggctcagtcnagcncagcagttaggaaactgactgtcgctctctccggcctcggcgctgcttcggacgccccggcaccggnccccgttgctttgtagcatt

SEQ ID NO: 721968 - DNA, 323 bp, Homo sapiens
tgtgggacatcatactaggatcagttttgcaggtcgtaacgccatttaccaacgatcaattgtaggtaaatgaagggcagcatcagtagaaaaattgtgaaaatatgttgcagtgggcagctcagcagagaatgggctagctgccatgaggccagggctgggggaaagttttatagggtcctgctgcagggtgctccgtgtggaatgaggtcattgtgcccgcaggttgttagtgattagctgtttctaacaattgttcatacaataattgttcattattgttctcaacttggggccctccccaagctggggacccttcctta

SEQ ID NO: 721969 - DNA, 735 bp, Homo sapiens
tcttggagtatgaccccagtctgttataaactgcttaagtttgtataatttgtacttattatcgtgtgttaatggtgtgtgctccctctccctctcttcccctttgcctgacctttagtctttcacttccaatttggtgggacatgatattttgaggaactaaccggaccttttaaagaagcaaaaacacaagactgaatttcctgtgcttacttgtgcatatacagactggatatacaacatttgtctttatattaaacgagcacattgttccccaaagagggacctgtgtttctgggaacttatatgaccgtgaccctttgggctcggttgtatccactacacgttggggaatttactcgccgtacactatgtcacaagggttgttgtttggagacacaggccttggttaagaaccgactaccggggaattgtgggacgaacgaataatctgggggaacgcgcattgggaaaaaagaacgctgaacattggggttaaggtctcctatgggaagaaaagttctaggtgagataacgcatttcgtgggtgttagtggcaacaaaaattgggggcattgggggacaacattttgggaacaaacttgttgggatgatcctaccacgagggtctttgttttaacaaagatggggaatacatagaggacattggaacatattttatatgggggagaaagggggttacacaaaaaggaatttttaaaacccaataatggt

SEQ ID NO: 721970 - DNA, 234 bp, Homo sapiens
cttttggggtctttgctgctaaaaattttatttcttgaaactagcgccaaagcatccagacaattaaaattacattattgatggtattactctcataacaggctggatctagacatagaaacaaccaattctctctcattggagatgtgaatcatacagtcacgtgatttcccacaatttgctggtctcccattggactctgatattctgttctctctctctctctagcaaaga

SEQ ID NO: 721971 - DNA, 479 bp, Homo sapiens
  misc_feature (479)..(479): n is a, c, g, or t
acacaacgaggggacgtaccggaggcaggttctgttccgctgccgtcgccatgacccggcgtaaccaacgggggcttgtccgccaaaagaatatgaaaaagcccagccgctcggttaagggaaagccgcccagatgacgggctttttgctgccgcccgcaagcagagggacttggagatcatgcagcacaagcctaaaaaggcaaaccatacgaggaacccaagtccctttggggcttcctgtccaacccttttgcccttcgcctgtgttgctggagccagtcccaccacgcttgcgtttcctccttgtatgctcacaggtccccacccatggcattcccttttccctgagtttgcagcgggtcccttttgtgctccctttcccttaggtagccttttttcccctgggccacttccggcggtgagggggttaccccttcccactggtttttatttcctgggcgctcccccgttttcccn

SEQ ID NO: 721972 - DNA, 187 bp, Homo sapiens
acgattcaccggcaggatgcttcaattgcaaaatcatgaatatttttaagttcaaaactaatactgtcacttaatatgtatgtatgcatatgttttatctttattttctagaaatgcatctacttgttccggagatttcacctggcagcaccatatcctacctccagtctactgttcccgggggtac

SEQ ID NO: 721973 - DNA, 345 bp, Homo sapiens
gtgtggtacatttacatgctcatggaatacactgcgtcaatcgggatgcattttaccatgctgcatggaatcgcactgcattcagtgatgctgcatggaatggcactaccttcaatcgagatgctttgggccatgctgcataaaatccactgcatttaatctgggatgcattgggccacgctccatggaatcaactgcattcaatcaagctgcatggaatccactgcattcaatcgggatgcattttaccacgctgtatggggtatactgtattcaatcacgctgcatggaattcactgcattcaattcggatccattgtgccaaaatgcatggaatccactgag

SEQ ID NO: 721974 - DNA, 306 bp, Homo sapiens
aaaaaaaagtgtttggcagttcccctctcacttgctgtctctcctgctatcatgaaagatatgccttgcttccccttcactttctgccatgattgtaaatttcctgaggcctccccagctatgtagaactgtgagtcaattaaaacttttttcttcataaattactcattctcaggcagttctttataacagtgtgaaaaagactaatatactgcatgattccacttatatgaggtagttaaaatagttaaattaataaaatcaaagagtagaatggtggttgcgggggctggatcactagtgcgg

SEQ ID NO: 721975 - DNA, 383 bp, Homo sapiens
gtcgacaggcacaggactatgtgttgtgggagaccaagctgaaaaagacatggtctttggcacaaagaccctactgtctaatggtaagtttgaaaacaagaggtttttgaaggtgtgatgtgtgggaaatgcccaggctgagatttctagtacaattaatattctcaaaggtagtttcatccaattctctgataaaagagccatggtaacaatgaaccacagcaaattgttcttattctctaccactcttaaactccaggggtcttcctttcttctggcctaataggactctttcgttcatgccacacggtattttatatttagtcaaaatttatcttaggcttctcaaatgattacctgttgcttgatttcttgagtactta

SEQ ID NO: 721976 - DNA, 562 bp, Homo sapiens
acgtatagctgctgactagaagagggcggcccagtaaagctaaggcctctctcccagatgcgagtggggagggaacgtcccggagcgagtggggagggaacgtcccggaggcgagtggggagggagtgtcccggagccaagacaggagcctgggcgtgcaccaggagtacaggaggaggaaggaggcagcttcagaatcgaaggagtgacagggagcgatccccaccccaactatgcaaagagacacacaaaagccaggccagccacccagccaaggagctctggaccctgcctctccctgagctgttctttgccaactgcaggctccacctgaagagaagccatcacaatgaagctactgcaagagagaccgatggatccagggatgaggccaccagcaacaggcagcgacacacaacctcaaaaaagttctctcacagaaagctcaaggaacagatacaagacttcagagaagggataccagaaaaaaggtggcacatgagctaggagagctcaggagaagaaaggatgatcccgaggagaggcttccgaggggagccga

SEQ ID NO: 721977 - DNA, 201 bp, Homo sapiens
ggcaagggtcgggttcgggctctctgctcagctgggccccagatgtggcctgcggtgatcctcttgcccgcctgggctaaatcctccgagttctgattggtggattgggtctgatgtgccgtgatattacccctaatatcacagggatgtgtcctgcccatttgaagttagtgtttcagacaatcgaagataaaacaacat

SEQ ID NO: 721978 - DNA, 717 bp, Homo sapiens
taggtgaaatacaggaaaactacatttgttattcctcagtttttaatgaccttttcagcatcaattgttaatcagattattttaggttttcgtaaataattttttggcctctttcaaaaggttaacaattaagcatactttctgcagtggttgatggatttttttctgaggtacagcatttaatactaagttccaaaaatgtgtctataatgtgatcctaatgatgatgaacttatatgttgatcagtacagtaagggagtggaatcgagaatagttcgtgcgtgcgggggtaaaacttaaaagtttactatttcttattgggtaaatagattttaagccaattctagtaagaaattaataaaactaccttatttgtatttcacttaaggtggaggaccttaactaaaggaccatatttattcattattttaatattataagggaagtaaaaaaaagtgaggtatagtctaaatggtgcatataggaaatactgacagtgtttagcaacattgcagcccttttgagatttcatgtcggtaatgctaaatgtgaataaggatggaatggtgaacatgtggttagtcttttattttaagaagacttggaattgatagatttggagatgagttttgaagggctgttggttcatgtctataggtctgtgattgtccttttcaaagcatttctgaagttattcaaatgggtatagtaaggga

SEQ ID NO: 721979 - DNA, 739 bp, Homo sapiens
agcgggttgtccggccgggggaggcggaggtcgctcgctcgctcgctcggctcgctgactcgccggagcgctctgtggtcggtcggtcggctatggtcggtcgcgagagcgggctctgtggaagggggctgaggctatgtcgtcggtggcacgcccggatggtgccggcagggccgggcagtaacgggacgtcgccgcggagcttcttcccccggatacagtgcggcccgagcggaggccgcggctgccgccctccgatcttgaacgagccatgcagcgtgcgcggagcccgtcccccgccgtgcgcaccggtcaccgacgcgtgagctggccagctccagaccagacccggcccggcgcggcctgatctaacccgaggccaggcagggcaatagctgagcccctctgggagcacggtagctccttgccccaaagtagcatgaaggctattggagaactcaagtcttggtaaggccatcaactcacagttgactgtggtagaccggtagatgcccacatcattggcatggattgatgagctactcatgtacagatggcaggagacgacaaactacaatgttcactgcatgtcatgccaggagggcctagccccagagtgctggacggcacttgctccaacccagagcttcaggagtgagccccagtcagactcagcaaaagccgaggcggtgaggaggaaggtgcccctctagtgacaagttgcaggcgtggagagccc

SEQ ID NO: 721980 - DNA, 186 bp, Homo sapiens
cagaaatcagctttggtccttcagctgcttgggcttctggaacttggggtgggtgcctgctcctgcatcaccttctccacgacgctcttgtctgtggcttaggggaaccagcactcctcgtccagcagggccagaattgccgggcggcctgctggcttctcaatgaggtcgatgcagggccttcag

SEQ ID NO: 721981 - DNA, 460 bp, Homo sapiens
tgagctctttgtgacgagatttgtaaatccgagcaattttatttctacaaaacgaagaaagaaagaaaagaagctgattttcttgtaattttgcgaagcatacatgtttaaaatgtatttaaaaatgactttgttacgatcagatgcatcgccgctcccctcctgaacattttatagcattatacatgccagattaatcatataatttaatatattttattttattagctattagtgttgtttttaccctttatactcaatcagtgatattttaaatgacggaaaaaatttttgtcttgtttaagcttttaaataaccactgtgtagttcagactagtgtccgctagcatcatcttgctcttcgcattcttctgtatcacgcagtgtcattataagggaaatgtgctgttgttgaatcctgctctgtgctttggaataaatcagacttgttttgtaatta

SEQ ID NO: 721982 - DNA, 352 bp, Homo sapiens
atactgatacttttctagtctgccctgcctgtctcgttcatagtagagagtggtgggggatgatacctagttaaagttgtcattcagttttctagtaaatattgtgtgtggtctttggttttgctatgttgcttttggtaggatatggctaaaatcagtgccatagccagcatgtggttactttaaaaattatgtctgacaaaatattagatggttagatgaacaggtaaaatattaaaagtagctttaaaaacttggatttaaaatatggagaatatcttgatatatgctttttctatttacatcttcattttggtgaaggaggtattgggattggtgacccgagctcgaa

SEQ ID NO: 721983 - DNA, 356 bp, Homo sapiens
aaaactggataaaaaagggggccctttccctgcccccgtttttcactcaaaaggggtttttttttgcccccgtttggcaaagttttttgttaagcccccccccccccgcccccgttttccagggggggtactatttttggggtcaagggggcaggtttaggacccctgaacccttttttttcccccctcccctcccaggaaatggggcaggggcccacggggagggggctggtttttaactttttaggggtcccggtaacccccaactctcctttttttttccaggggccggggtaaaaggacctcatgggtttccccctcctaaaaaaaagggggttttgggggaaaaaaaggga

SEQ ID NO: 721984 - DNA, 616 bp, Homo sapiens
cctgattcaggttgcagttactgaactgtccttcttgaagaaggtctcatacagagtctaaactatcctgataactacagtgacaaggctaactgtgactggatttttcaagcctccaaacatcacctaattaagctttcatttcagagtctggaaatagaagaaagtggagactgcacttccgattatgtgacagtgcacagcgatgtagaaaggaagaaggaaatagctcggctgtgtggctatgatgtccccacccctgtgctgagcccctccagcatcatgctcatcagcttccattcagatgaaaacgggacctgcaggggctttcaggctatagtctccttcattcctaaagcagtatacccagatttaaacatctccatatcagaggatgagtcaatgtttctggagacatgagatgtgccaaatggagaaaccaatgtttctggccaaggggcaccagtgactgtcagtaaaccaccagaagctagaggagaggcttggggcagactcctcgtcacagccctcagacagagccaaccctgctgacaccttgatcttggacttctagcctccagaactatgagacaataaatttctgttgttaaaagcc

SEQ ID NO: 721985 - DNA, 169 bp, Homo sapiens
caaaagaatattaatggttaaacagtgaccatgcaaaagcccatgaacaattaaacaagtagcagatgtggtattttatcaacggcagctatgaagacactaaagggactgtatctgcaatcagaggattattgggaaacaaaatgctttttaaaagacatacgtcaat

SEQ ID NO: 721986 - DNA, 559 bp, Homo sapiens
gtgcctgctggaggtcctgtggggggacatcctgccctgggagaaggggaggatgcataaccacaagctggagaatggccaaattgccctggactacctacggcaccgacaggtgaagctggtgaacatgaggaatgatgacatcgttgacggcgaccccaaggtgacccttggtcttatctggacaatcattttgctcttccagatctcagatatccaagtgagtgggcagtcggaggacatgacagacagagacaaactgctgctgcggtcacagccaatggcggaggtgtaccagggcctgccaggcgacaacttcacgcacacctggagagacggtcgcctcttcaatgccatcatccacacgggacaagcccctgatcatggacatgaacgaggtgtaccggcagatcaacctggagaacctggaccaggccttctctgtggcggatcgggacctgcgagtgacgccggtcctggaccctgaggacggggatgtccctcagcccgacgagaagttcatgattacctacgtctggtcgctgaatgacgccatgcc

SEQ ID NO: 721987 - DNA, 120 bp, Homo sapiens
cgcgaggtgcgtcattcacgctcggaaactgcaggagctgtcctcaaggcggatgaggccagcgagctggcatgcccacgcccaagggaggatgtgtctaggcccagctagcagactcag

SEQ ID NO: 721988 - DNA, 1449 bp, Homo sapiens
agcggggtgggaacgggtagtcccccgagccggattcgcaggccgggtggagaccaactctggggtctgaaggtgggagagtggcgatcctctggcgttctgctgatgtgcttgactgacgcctgtacccagcgtccacgtgcgaagagtgtgatagctttccgttccgcgtctgtgaaagcccagggcatcaggcgaatcacatggcgagccgtagattgtgagcaagtcagacttcgcagcaccgtggcacgtaacgtagaagaaaggcttgcaagagaactagcatcctgatgtacatggtgcccctcgtacttttcatcttacctcgcttgccgatggggcaagtaccaagtacaatcccacacgaagagacggcataggaccatgcactgaaactgctgactagaagttctcgactagaggaggaaggcaaacactttcctcgtggatcagagccatttgctgtgcaccgtcaacctcgtatatcactaggctgagcagagtacggcgcgaaacgcagccagaggcgtctgcaactggcgtgggcacacgcatacacggcttgaccgcatggcactatacgagcccgcaacacctacaagcaaccatgtcgatcctcacacgtctgcaggtttccatccacaggaaaacacatggacggggccccatacgccgggccacacacccctaggcccgactagctgaaatacgctcatggagacagtggcactacagggaaagcagctgacgtcggaggcccgtgggcaccaccaaggaaatggcatggagcaccggcgtcacagatcgagggccgtgacaacgtcaagctagctacgggcacgatgaaggcgaacttggcactgtgacatctcagtataagaccaagacgctgctagccgcaagaaccgagtaccgtacaccggacaggcagcaagagcacagccaaaatacgtaactacaatcacaagggagtgtagcgtacacacagaaaacttggaagagagagacagcggaaagcagagacaggaaagggagtgaaacagagatgggaatagacaattcgagaagttaaggatgaaaggtggaacaaaatgggccagtggaaattccacaacggagagatgtaaggtgaaacaggaaattacagtggggtgaatatgggataagggacccccccccacccctcctctcctcctcccctccccccccacctctactactctcacacctactcctactcaccctctttcctccaccatcacttcctgcatccccaccattcacattcccagctcctacacttctgaccactcttcctccgcgcttccctgacgctacctctcacccattcttacctaagctccatcaccctcatctcctctcctccattccaacttcctcattctctttaacctacgaactattaccctcacccaccactgacgc

SEQ ID NO: 721989 - DNA, 764 bp, Homo sapiens
cctgtgttataaaagccgcccctttttcggtgggggaaccctgggtccacgagagcgccgaagaaagtcgggtgcgagagtgagatgggtatgacaaagggagccaagaggcaatttcctctgtgcgccagaaagtttatacggaattagtgcgcgccagaaaagcacagctctctatgtcagcggcgataagatctatttaagcagggtgggagatatccacccccccgcagcggggtgtgattgtctctacggcgccgcccacagatccctctcgctttccatagggggtacaagaaatcatgtgttgagagtggcccgccccccccacttaaacccgggctgtacactcttcttggggcacacacgacctggtttcccccggagattacctctcattggcgccaacactggcgcgcccacctgttggagcgcccctgcgcgccaatattccccgcccctggggatacaaatattttgctaaaaatacattgttatcctctgggggcccccccctgttgaatgccgcttttatgtgtctatacacaccttagatgcttttgagagcggttcacccaccaccacgctggtggatgtctgtagggatgtccaccgtgcgagcaggccctcgacaggtggttcctcccaacaccttgaaaatattcttcttaagctacctccccttatattgagaagaagctccttcgcggacccccggtatcgggcaaactcgacccgcgaaggaaaaaccggcctcataacaa

SEQ ID NO: 721990 - DNA, 232 bp, Homo sapiens
gcgtgccgtacagttgcgactggacgaaatgcgccgtcgcgacgtcgcgggcgtgcggttcgatcaccgtccacaattcgcgcgcagccgcgatgtcgtcgttcgagatgttgaacaggcgcaggcgttcttgcagatcgatcgtccggctcacgctttccggtgccggcagcttcctggtccccacgattcgcttcccctgttcgctggcgttcgcaactggtacggcggg

SEQ ID NO: 721991 - DNA, 917 bp, Homo sapiens
ccatgatgtcgcatgttgctagccacaggagcccgcagttcaacctatgggtcccctcaggccgctactttgtggagcccccaattgtaacgcaaaaaaaattttcttgccgcccagaattcccgcttcccctttccggggccttttggccaccacggggtcttttacagggaccggtggtttttgagaaccgcagaaaattctttcctctaagaaaaagagggtaatcccctctgtagagcaatggcaaacggtaaaacacaattcctcgccgcgtaattgttacgaaggtctttaaagccacacaggggtttaacccaatatttgagatcctcatagcaggttccctcggaggcaggcgacaaacttaaaaaggcttttctaaacacccgcgggggtaacgaatacacctttcctcctcagggggcataagaaaaggcttattgaaaagcacgacattgtggggacacaggtagctccctcgtgctccccgcgctgttgataacccccactagacaagagggccacactccctctgtaaagtggacaaccaggaaggcggacactctctaccacgcgcttctaagaagatcatgtttaataaaggtcgtgtcgggtcaataaaacatatttttaaagcggcccattttttaaagaggagagatatcccggcaggaggtgagttattaacagcccccttgtgtacatccccgcccgccgcgaggatacaatcgctctccaattattgaacccctaagttgttaagccgcctagttgttaagccaccagtcgcatcatatttcggaaagaagattattgtggggatgtgcgggagtcacaccacaactccgggcaaagaaaacaaagaagttgaagggcaaccggaaaccaagggtccgggagcggccaaaataaca

SEQ ID NO: 721992 - DNA, 479 bp, Homo sapiens
catttttatccttttggagtctcaacccatcaggttcagaccagtaggaaccaggctgggtcaggcttttaatttccctatggtgggggacaaaatgaaccctggcttttgttccctttgcccctgaaagatctagtcctgtcctgtgatggcttcccccaaccctgttggaagtttgggttattcccataactgtatgtgttgagtggccgtgaggctatggacctagcctggaatttaaatggggagctattttttaatcttgttggtaaaagctcaaaggtttgtgctacctctgtgaggtatatactaaaatgaatgtaaaataagggttggattccctgctttaaggaactggtagttttgtttgggtgattagacaaagttttttagacctttaaactgtatttaccagtgtgaaaaaagtcctttatggagatttattccttatggaaataaaacaatgcctcagcccctta

SEQ ID NO: 721993 - DNA, 384 bp, Homo sapiens
tgtaaggggaaatccctatgttatcgttccagtgctggctagtcgatccaggacgccttgcacgactgatcctgtacagggtgatgaagtgccctgggttgacagcacacttagttagagttattggtgttaatctattcatgatgctctaagctgaaggcttagaaggctaagaccaaggtgtcagcaggttctgcgtctggtgaggacccacctgttgtttcatagatgaaacctgtttgctgtgacttcacatggcgtgaaagggcacgacagctcacacagacctttcttatgaggacgccagttccattcatgaggggactgcctgcattctcttgcccctttaaaggtcctgccctgctattatcgccactttgatga

SEQ ID NO: 721994 - DNA, 787 bp, Homo sapiens
  misc_feature (632)..(632): n is a, c, g, or t
agtgagccgagatcgcaccactgcgttccagcctgagcgacagggcaagactcagtctcaaaaaaaaaaaaaaggaaaaaaaaaagaaaaaaaattgttgacccattggtgaattacttttgttttatccatttctcagggggagagtaatggcttgtggaaaaaacatttacattggtaacacgggcgctatcagtttggggcttcttggttatatgtccagggtttaggtttacaaacccaatttaagtatggaagggattatatatgggggtcagggtgcttccacaaaaatagaccttattgagaccaaaaattgaccttagggctatttagacggacaggcatgaaacttccacgttagttctcagtctataagggcacttaccgggtctcgggtgtgggtatgaccaatagaaacaccttatagttggcttgggacctcattttgggaaaattattcgtgcctttctaatggtcctggcataggttaacaatggataaatttgacattcttggaacctataccagatggtgggtgtccgagggaccggcacacggtctggacacacacgtcagggtgcacgtattggtctgagtgaatgaggaaacctgaaaaacgggggacgtgncacgggaagccacgtggccaggatccgacaatggccgaagcagaataaacggtgacgcaactaagtggatttacctcacaataaggtcctgctgaaacagacgtacccactgtaaagggagccactggtatgacagggggggccttaggtgatgc

SEQ ID NO: 721995 - DNA, 159 bp, Homo sapiens
gtacaacatcaaaagaacttagtggatgtataggtacgacattatagaaacaggtacaggaaaccccgaacatgcatgcacatgccttggaagaccagaggaagtcaccccacggctatggcgcaattagcaccgaggcttagcttacattatcactgt

SEQ ID NO: 721996 - DNA, 301 bp, Homo sapiens
atgtgaacttgaaagcctttttagtaggactctttgctactacagaaatgctcatgatgtcttaaaactgaaaaactttataaatagcatatgtcctattgttttaaaattttctttatgaacctgataaagcgcaatgtttttggagaaaatattctttaaagtcaaaagttagtttggtaactcttagcctccagatttctctctaacctaatggtttttgttttgatctcgaaggaagtattaatattagtacaatgtcagggtcttagttggatactttctccgcgatcgaagtgtg

SEQ ID NO: 721997 - DNA, 186 bp, Homo sapiens
tggggaaaaaaaccaaatgggggggttttttttggttttaaacccgaaaccccttttttttttttgttccggtggaaaaaaagggggaaacccaaaaaaggaacggggttttttttttgttttttgggccccccccttgaacccttaattgttttttggggttttaataaaaggccctttaaccca

SEQ ID NO: 721998 - DNA, 468 bp, Homo sapiens
agaggatcccgtccatttactccatggccttcttctaaggagtgtaggttcctgtcttagtctgtttgtgtgctataaaggaatacctgaggctgagtaatttataaagataaaaggtttatttggctaatgactctgaatggttggaaagttcaaggttgggcatctgcatctggtgagggcctcaggctgcctctactcatggaggaaggtgaaggagaactggagtgtgcagagattacatggcaagagagtaagcaagagagaaaggagggaggtcaaggatggtttctaaccaccagctctggaggaactcactcacccctgagggagggcattcatctattcataaggatctggccctgcaacctaaacaccacccattaagccccactccaacattggtgatcacatttcaacttgaggtcaggcttggcggtgctcacctgtagtcccagctactacaga

SEQ ID NO: 721999 - DNA, 513 bp, Homo sapiens
ttcatgtggaacagtgtccacttagaaacgggtggatcatacagacccatccaagagtgtgcgactaaaatcataccgacgtgctccagtctctaattgcgctgaacattccagataagtcattgcagctcaactagttgacgtatgggtgctaaaagatgcagactacaaaccacagaggaatcttttattccagcgtgacaattaatttgctggccctcggagagtggaaatggctgtgatgtcaacatagcaatagtgagctacaagaagataatttataactgaatgatgtgtgttatcaccatcccactcccgtctggtgtcggcgcgcctgttatcggtgacatcgatggggaatatcgacatgacagtcgacgaaataccctggagtggtgcctgcctgtgattgatgccaaaaataagagtggcagcctggagtttagcattgctgtgcatcccaatgacttcttccctgtacaagtatcctttgtctccaagccaagcttgaac

SEQ ID NO: 722000 - DNA, 1039 bp, Homo sapiens
tgggattccaagtccccgggggggcttaattttttctttacaacatccgggtcgggggctctcctgggctcttttgggcccggtatgccggaaaagccggggcgtgggcacggggccatacgggagactagcgagggcttggaaattctctctcttcctcagtggatgactcgagctttctccttcttatagacgttccgggaggggcatgaccgggtccgggtcagtggggttggccagttccagtctcttcagcagaactggtctcccttctggggggccgagggctctccgggggaagaggcatgagttcgggagcgggtaatcccttcaagccgctgcacgtgggcctgcaggggactccggggcactggttcccggcctcctcggatccacagaattgccgagggtcggggccacctcctggtgaactggccggcacaccctgagctcctccaggctgaacgccgcggccggcgcgcacctatcggggggtaccgaaccggggggcacgtgccacgacggggccggatgggcccgacgcggtgcccgcacccgattgcggcgcgcctggagctttgccggtgccataacgtcctcgcgaacctaccgggcccgggctgtggttgaacccacgtgggccaacgccgccgttcgccagtcccttggtcagaacctcgggggctcaaagaccagtgccatacccaggcaggagccgccatggctggcataacgggccctagcggcttggcgactcacaaggtgcacccgctttcaaagggcccggacccccagtgggcgctgcgaacccccccctgggggcctccaggcccgagaactcttcccagtatcggggtccctatccggcgccaggcgcttacagagcctcggtggccctgggacagaacgctgctgcctgcagcaccaacaactggcggccacatcaatccccgtgtagcgttaaaccccccggccgtatcgtccttgattcgttgcccaaagggcactcatcttgtcggttgcggaaaccggcggaccg

SEQ ID NO: 722001 - DNA, 474 bp, Homo sapiens
aggtataaagaggtcacagtcgaaggcacacaagaagctgcccctggaagacccacgaggctgcgcaaggtggcctgtataggggcatggcatcctgctcgtgtagccttctctgtggcatgcgctgggcagaaagtgctaccatcagcgcactgagatcaacaagaagatttataagataggccagggctaccttatcaaggacggcacgctgatcaagaacaatgcctccactgactatgacctatctgacaagagcatcaaccctctgagtggcttagtccactatggtgaagtgaccaatgactttgtcatgctgcaaaggctgtgtggtgggacacaagaagcgggtgctcaccctccgaaagtccttgcttggtgcagacgacagcgacagggctctggagcagattgaccttaagttcattgacaccacctccacgttaggacattggcgcttccagaccatggagg

SEQ ID NO: 722002 - DNA, 319 bp, Homo sapiens
ggaaaacatggaaaatgcatccttaacaactgagcctctggtcatcttaagaaatttctatcatttgcaaaagctttcagaggacattgtgtatccgtaataatgtccaagaagtcagagactggaaatgttagatctcttagtctaatatagacaagaaggtcaaacaggagtgaatgttataacagttgaaaaatatatttgaatagcaaataacaaaatcctttaaaaatttaatcaagaagaccgctattctttcaccctgttaaaaatgtaaatcagttttcaaaagaacaaacattatattaacaaaaaaaaa

SEQ ID NO: 722003 - DNA, 388 bp, Homo sapiens
caccagcctcggcctcccaaagtgctgggattacaggtgtgagccactgcacctggcctattattatttttaaattttctgttataaattgatcattcttgggtgtttctcacagagggtgatttgtcagggtcacaggacaatagtggagggaagtgtcagcagataaacaagtgaacaaaggtctctggtattcctaggcagaggaccctgcggccttccgcagtgtacgtagtccctgagtaacttgagactagggagtggtgatgactctcaaggagcatggtgccttcaagcatctgtttaacaaagcacatcttgcactggccttaatccatttaaccctgagtggacccagcacatgtttcagagagcacagggttggggg

SEQ ID NO: 722004 - DNA, 232 bp, Homo sapiens
taagatccatgggaggattacgcatacccacgatcactctatcgagaccccaagtcgtgatgtggaggaagagccacctgcaagatgagacacagagaccacaagactgcactgtgaacctaggcactccgacgaccgaatgccaccggcactgtagagtctctagacagggaccccccacccaatcgagactgccaaagttctccgacagatcgaagtgatgggggaatcc

SEQ ID NO: 722005 - DNA, 467 bp, Homo sapiens
cgctttcggcatccgtatcacctcaccagtatgtctcaggctgaatttgacaaagccgctgaggaggtgaagcgcctcaagactcagccaactgatgaagagatgctgttcatctacagtcacttcaaacaagctactgtgggcgatgtaaatacagatcggccggggctcttggacctcaagggcaaagccaagtgggactcgtggaacaagctgaaagggacttccaaggaaagtgccatgaagacctatgtggaaaaggtagacgagctaaagaagaaatacggaatataaatcaccagatttggtggccagccacacgtgtgacctgtgaggacataatgccttggttttttctaatgtagatgatatggctgtgatacattagggccagcgttaacctctgctcctcctccctctgtagtttttacctacaatcaattaaaagtacatttgttactctaaaa

SEQ ID NO: 722006 - DNA, 113 bp, Homo sapiens
ctccacccaggcgtcaatcatcttgccgagcacgtgggtgggatgctcaatctgctgaccagtacgcagcttcgggtccgaaccgatcgggttaaagtaccgcaagctcaatg

SEQ ID NO: 722007 - DNA, 469 bp, Homo sapiens
  misc_feature (385)..(385): n is a, c, g, or t
tggaattaaaagttcctgaccttggccgggcgtggtggcttatgcggtaatcccagcactttgggaggctgaggcgggcggatcacctgaggtcagcagtttgagaccagcctggccaacatggtgaaaccttgtctctactaaaaatacagaaattagccaggcatggtggtggacacctgtagtcgtagctactcaggaggccgaggcatgagaatcacttgaagtcgagaggcggaggttgcagtgagctgagatcgcgccactgcactccagcctgggcgagcagagcgagatgccatcttcaaagaaaaaacaaaaagttcctgacctttccacacaggtccttcgtggtccgcggattccagagtggttcttagctttnttatttaattttcacacagtttttccttatttttaagttattgcaaagggttctgttgccggggattgtgaggtttttaccacc

SEQ ID NO: 722008 - DNA, 101 bp, Homo sapiens
agagcatatgacggcgaacgacagcacatagcacgtgtctgtggactggaaaaggtcacctgcaagaacgggcagggcaactgctacaagagcaactccag

SEQ ID NO: 722009 - DNA, 135 bp, Homo sapiens
tcccaagcatgagacactgtctgttatctagaagactatgaagactatctatgctaacctgaattaaaatgtacttgtttgatctactgaatatgctcactatcttacaactgtacaattacctacatacctatg

SEQ ID NO: 722010 - DNA, 1426 bp, Homo sapiens
taaattactttgactttttaatcagtaaggcaaatgccctccaagaatgggggcgggcctgtgttcttaattcaggttgaaggcctctccactatatttccacccacagtataaccaccctctcccacacaggcagggcctctccctctcctctcatgtgtgtggcaacacagaaagttcaggacacgtgggggcgtggaacaacacaacttctttatacaactgtgaaagagggccgagagaacaagaaacgtggttagaccaccctctcccgagggggaggttcgagaggaccgagagagaggtgtgggtggcccacaagaagagtttccaccgagaacagcgccccaagagagaggcccctatttccacaccaaagtgtgtgtccgtgtggagatatctgtgggccgtgcttgtggagagcgccacaaagaggggcgccgtgtgtggcccctcattcacgcgctgtgagacctctgggagaaagtgcctgtggagacccctctctgtgggcccccttttctctcatcacacactgcggggacagagagagagagaagagtgtttttctactcccctgttgagagagtgggaagagcggggcacaagtgtgagagagggcgcgcgcgtgatgagacgaccacagagaagagcagaagagaacaacagcgagaagggcgtgttgtgaagagagtcgtgtggggcgaggaaattctctaacacgcccccgtgtggtgctcccgggtggagcgcgtctgtgtggaggaaacgcgccaaccctgttgtgctgagaacacccccacataagaggagaagagtcttttcctccacaactgtggtggggcaacaacaggcgtgacactgtgtgttggtggcgcccccctacttcacccctgtggggcgccattaaggtggtggtcccccctgatgtggtgccgtagaggaccccccccacctgttgaggcgcccagttgatatattcacagagaaggccccccacagaaggaaaaaccaagtggggtgggggccccccaacagttgttgggggggggaggacaaccaccccgcccctgattaatggttttcccccccaccccctattgaagggggtggcaaaccccacaactatcacgatacaacaggcagcgcaccaaggcctgcgtgggagtagtcgtgacgaccacgacgataagttgggcggagtgtcggcacccacggagcgtccacatgccgacaaccacgggcggtggtctccaacaaaccatccccctatgtgagcgacccccgcggtcatgttggggtgggggccccccaaagagagccagttatgcgcagtaggagggagctaatacatcgcccctcgccactgttggtaagtcgttgatgtttgcttgacccccaacacaaaaatagggggggcgacatc

SEQ ID NO: 722011 - DNA, 262 bp, Homo sapiens
gtacgctctatgtgcatgaccgacttgaggacgagcgaagaccagtggggggtgcccacgtgcctgtaccctccggggcagcgccagtccatcatcgtggccgccagtctcggtcgagatggagaagtgggttgaggacatccagactgccattgacctggcgtaaaagagcagcagccccgcccatgagttcctggccagcagcccccgcttacaacaagtcccctgatgaagccaccgcggctgaacaggagtcagagga

SEQ ID NO: 722012 - DNA, 330 bp, Homo sapiens
  misc_feature (129)..(129): n is a, c, g, or t
  misc_feature (202)..(202): n is a, c, g, or t
cctgctggagcggctgcctcaagcggtaacggaatattggcaggccttggcgcatggatcgtggcacacacgtcaggaacgctgggctgaatcatacgccgcagcttttgccgagcaggctttcatggnacggcaactggatgagatttccattgcgggaatgaccctggtccagcaattggtggatgcccccgacaccgangcgcgccagcgcgccgggggcagttgggccagcgtgcgggtaagccaattgatgtggccaggcttgcctgcagtcgcgattcccggggcacagcatatttatcgagacggcgaccccgagggtgcgcc

SEQ ID NO: 722013 - DNA, 132 bp, Homo sapiens
cgtcggggctgctgccttgctctagaggagatggctggggccacttccacagggtgaagtggcagcggctctgcaaggggagcctggccaccaggggctgggggatgcgctctctggaacctttgtgcttgc

SEQ ID NO: 722014 - DNA, 876 bp, Homo sapiens
ccattcacacttggacgacctatcacatcatatcctcattctcttccgcacagaacctcgtctaaccccggtttatactatagcgcttcccctcacgacccactatttttgataaccccccaattttataagacataaatatttcctgccgtccaataattccgggtttcccactacccccggaaactggtggaaaccaagcaacaccaaatgtgctgtacatatcaccacactcatttgtctttaccgcacaaccaggccatgtgccaatccaagctaccaggtccgacttgcagaactcctttcaacctgtccagttttaactacctaggatttccccgtcgtcaaccccccctcttcccaaaaaagactgtccacccacgcaacattgccacctcccttcctttactaggcggtccacaccccctatatcagcactgggtaattcccaccacccccttccttgttcatgtaattctttgatgtgctagaacccctgtcatcaaacaccacaaagcgtgagccaacctcttatacatctttctaccccttcacctccacagaagtttgtagtccccagcaatgcttgtggcatctcccagcgcagtattggtcttcgcggcgcctcccgtgacagaagaacagcactccttccatctcggtgtgtcgaatcaacctcggtggaaagaacaatggatgtgggctcccgcgtctatgtcttgttcacccccgactgccccgaatgctctcgaccccgccgccataccggtgtttaaaccagacacccccttctgttggtttttgccccaacgaggtttatatacgggcaccctgtttttcaccaaccacaaaaaaaaaatttacagaccacataac

SEQ ID NO: 722015 - DNA, 390 bp, Homo sapiens
ctcatacttgctaataacatcgataccgtgcgactcctcaacgcagtgaggtgcaacttgaagctcatactctacctttcacaacacagaagaaatcagggcagcttaaaagactactacggcagtcacttgactttggactccacacctccaggcccgcgtggactttgagtgttgatctaaacaaccatatttgatgtccccatagaccctatctcggcatccatctcatccccacttatgcttattttgcacacatcccacgccgcccgtctttacaaaaatatcattccgatttgaagcactcttagcggccacagctgagactcagatcacaatagaacacattttctggaccaaggcacatccttcagttgctgagaattacaa

SEQ ID NO: 722016 - DNA, 366 bp, Homo sapiens
aagcatcagcagcggttcacagtcgggtcagccagccccatggaactcctatcctacttcaatgcagccggtggcagacaccaggacggaggtgagggccgatgactacctgcacgtggctctagacctgctggagaggaacgctgcggtccctgtggcgaaggccattcaatgtcactgatgtgcagacgcccgcccacctgaatgtgtagtccaagtcaagcggatgcgccctaccaggacgtgggggtgacttgcccggaagccaggatcgaaatacccgcaccatcaccgggatgtgcaacaacatacgcaggcccacgctgcgggcctccaaccgagcctttgtgcactggctgccggcgg

SEQ ID NO: 722017 - DNA, 119 bp, Homo sapiens
tccgtacgtgcggtagacacagctcatcgcttactggagtccgatgcccagaccacagaatcactacgggttatacctgagatgtggccgacgagggactcgaagcacagatacaccaa

SEQ ID NO: 722018 - DNA, 346 bp, Homo sapiens
  misc_feature (1)..(1): n is a, c, g, or t
ngtacatttttgggggggacaaaaaatcagactatagcaatgaatatttagaaattaagcagttttggccaggtatggtggttcatgcctgtaatcccagcagtttgggaggctgaggcgggtggatcatgaggtcaagagattgagaccatcctggccaacatggtaaaaccccgtgcctgctaaaagtacagaaattagctgggcgtggtggtgcatgcctgtagtcccagctactcaggaggctgaggcaggagaatcgcctgagcctgggaggtggaggttgcagggagctaagattgcaccactgcactctagtctgggtgacagaacgagactccatctc

SEQ ID NO: 722019 - DNA, 150 bp, Homo sapiens
cggcccccttctggtgcaaatgaataaagagttgaggtttctgtaaggtataatttagatatccccgtggcagagtggagcggggaaactcatggtctctggggcagaaattatgccttggcggggccgccctgccaaccccaagcccag

SEQ ID NO: 722020 - DNA, 169 bp, Homo sapiens
attgcgtcaagcatgcaggtgtgcaaggcatctttgcatcagttgcagcacacattcatgcaacagttcctcagaagtgggttatgatgctatggctggagattttgtgcatatggtggaaaacggaatcattgacccaacacaggttgtgagaactgctttattggat

SEQ ID NO: 722021 - DNA, 112 bp, Homo sapiens
gttacatagtgttcatgatgtatatgcacaatttcttatccagtccacgtgagggcatctaggtgattccatgtcttgttatgtgaatagtacgtgcatgaaccacaccagg

SEQ ID NO: 722022 - DNA, 158 bp, Homo sapiens
gcttgatcttgacgcccagcattcggagcatccttctcccggcgcaggtcctccatctttttctctttctccttcagcagcctcttcttctcttctgcatatttagctttaattacagtgtcttgggctgttatcacctgtttttgcttgttccgctg

SEQ ID NO: 722023 - DNA, 268 bp, Homo sapiens
tcagacgcgcactactctgcactacatccgacacgtacaaccgcttcgagaagcgccactagaacatgtctgtacacctgtccccctgtcttcagggaccgtccagcatctggtgacactcgtcacacgtgtggcgacgtgccggtcctctgtagcaaggacagtcgcgctgtcacacgtgtctccaagttcaccaaagtctgcccggtaccaagaaagccagttccagaagtttctgagagctggtacatcgtgcccgcctccccac

SEQ ID NO: 722024 - DNA, 1118 bp, Homo sapiens
gtcatggcacacaacccagcacagcaaggcagtcacaccaagattcccctcttcccgcggcctcgccatggagaccacggacagacttgcgcgcgtccaatgtgtattcctccatcatatgctgaccttggcaaagctgccagagcatattttcaaccaaaggatacggtacggggtgggtgaaactggcatgtgaacaacacagtcttgcagtggccgtgcgcactattcaacgtccggttcatctaactacagacactggtacagtcacttgggaccttggagaaccaaatacaaacgttggtgtgagtatggcctggaactttcacagaaacagtgcgaacaacgtggataccaactactggaaaccagacaatcgcaactggacagaccagattggctcaaggcttcgacacactggaccaatttcgactactacccgttctacaccaaaatcaccagggcaccaatgcacacacgctgggtacacacttccaacgttcctttcttttaccaagcacgcgcacacacgtggtaatacaaaccctttggcgcacggacaacggatagcactataggcaaaatacggctgggatacctgcaaatccaatggcgtacacgctggacctaaggcgtcactgcaaggcatgggccatgtaggctggggagttacaccacagtattggacccctttcgtggcaccagttggcccaaactccaacagctctggacgcgtgataatacacttttggcaaacagggcgtcacacgggcgaactgcggggcattcacacagcctaaacaacactcaactgttgccccgacactggcgacccgaccattcgggcagcgcctccactttataatccaaaacaacgtatgggttcacgccatttttgacccacctccgagataccccctgtgcactctggaaatacagggtacccaacgttgtactccacggtagtcgcggacctggacgggcaaccaactcccacggtagatccccgtgggcactcgcacttctgtcgcaacagtcataacctcccgagcaacagtagcagacacaacaacaccaccctgtagcccgacgtagtagcgtacacctgtgcgtgagcg

SEQ ID NO: 722025 - DNA, 126 bp, Homo sapiens
  misc_feature (83)..(83): n is a, c, g, or t
ggcactaagttgagtccaaatcgatttcctgcaccgaggggttaaaattcagccacagagtagagggcgttaggagttttttnggggggtaatttaccttcaatccaaagctcttacaaaacctcc

SEQ ID NO: 722026 - DNA, 249 bp, Homo sapiens
gcgacactagaagacccctctgcatcgctaatccttcggggaatctagatttgtataggtagagagatcagaggaagatcttaactcaactaggtataaaaaaaacataggtataaatatcaggctaggcaaagtgtatctccaaaaatggttcgtaagatataaataggtattattaaattttttatacttgctttttagcatgttaaagtttttgagatatcctgtgggaaataaacctatttaagg

SEQ ID NO: 722027 - DNA, 229 bp, Homo sapiens
ctcgaaggaaatcggaatattccgaaattatagaaagagctgatattgtgaatatacatttagggcataggtttctcagaatggcctcctgccatccacagggttaagcactgattcaatctcggtttcgtactgtttggtatataccttgaaagcatatacacctgtaacctaattttataactaaattaattatctaaatgtacgtaactgcattataaccatatag

SEQ ID NO: 722028 - DNA, 264 bp, Homo sapiens
agtacatcgagagagctcacacttccccgatgaggtcacataatacaggctgactgcgattggtgcaaaagcggatgccaaccggaagggctcatgccaccaggccacaaacaacacaacagcatctccaggggcccaaaatgcctgtccaggggacacattctcagggaaccccttaagcaccagagattgttgccagtctcgacatccagcacgcagagcacagggaattgcttttggaaaacccatgtattctccccaagt

SEQ ID NO: 722029 - DNA, 899 bp, Homo sapiens
gggcctatctggccttcgctgcctcgacgtgcgcggatcgctctgtccctcatcggtggtgctgcggcgggccggggcggcgcggtgtcggcgcgctcgtgctgcccgagaggcgggcgcgcgcggctcctgcggaggcggggcgggtcgcggcgtggtggtgctgaccagaagccgcatggagaagctgcgagaggagagcgccgcgcgtgtcgtcctcacctcgctactcgattgactacccgccggccgcgggtctacttcctcaaagggggatatgagactttctactcggaatatcctgagtgttgcgtggatgtaaaaccatttcacaagagaagatgagagtgagagagccctcatcagccagtgtggaaaaccagtggtaaatgtcaggctacaggacagacttataaacaggttggcccagttgaaatccttcccttcctctagcttggaagtgactaccatgcatccaagtgcgagttcctcgccaactggacatcacagccctgctgaatgtctcccgacggaactacgaggctgatgaccactaaataaaaatggatcctgtggaagacagccacacggtgacattagactccactttcaagaagcaatagacttaaattgactgtgtcaggcaacaaagggagggaaggtcctggatacactgatgacgctgagatctccagaacccaacatctggcatggttacctatgaaacaaagagttcgcataaaaaggctcaataatcaagaagagaaatgctcgccattagtcatggcagtctgaaacattaaacggtcaacaacaactcttgcaaagaaagctacagaaaaaaaagctaatggcaaaacaacagagaggaaaaaaaaaaggaaaacaaaaaccaaaat

SEQ ID NO: 722030 - DNA, 104 bp, Homo sapiens
ttgctctagacggatcccttagtcaccacctcaatcactgctaagctctcttcatgtctatctgtaccacagtctcccatcttagactgtggtacagatagaca

SEQ ID NO: 722031 - DNA, 165 bp, Homo sapiens
tcgcttgggaggaggggactgtggtgcttctgatgaggcagtggagacaacaaacccccacttcatgctggtcctcagtccttccatcctgccagcccgacccctgttccacaacagcaggcccaagcctgtctttatgggtgaggagaacaaaatcttggaacc

SEQ ID NO: 722032 - DNA, 540 bp, Homo sapiens
  misc_feature (46)..(46): n is a, c, g, or t
  misc_feature (70)..(70): n is a, c, g, or t
  misc_feature (93)..(93): n is a, c, g, or t
  misc_feature (136)..(136): n is a, c, g, or t
  misc_feature (146)..(146): n is a, c, g, or t
  misc_feature (164)..(164): n is a, c, g, or t
  misc_feature (194)..(194): n is a, c, g, or t
  misc_feature (205)..(205): n is a, c, g, or t
  misc_feature (210)..(210): n is a, c, g, or t
  misc_feature (226)..(227): n is a, c, g, or t
  misc_feature (232)..(232): n is a, c, g, or t
  misc_feature (234)..(234): n is a, c, g, or t
  misc_feature (242)..(242): n is a, c, g, or t
  misc_feature (276)..(276): n is a, c, g, or t
  misc_feature (290)..(290): n is a, c, g, or t
  misc_feature (339)..(339): n is a, c, g, or t
  misc_feature (364)..(364): n is a, c, g, or t
  misc_feature (368)..(368): n is a, c, g, or t
  misc_feature (394)..(394): n is a, c, g, or t
  misc_feature (402)..(402): n is a, c, g, or t
  misc_feature (409)..(409): n is a, c, g, or t
  misc_feature (439)..(439): n is a, c, g, or t
  misc_feature (444)..(444): n is a, c, g, or t
  misc_feature (476)..(476): n is a, c, g, or t
  misc_feature (538)..(538): n is a, c, g, or t
tgacacccaccgcaactttttgtttcatatcacgaacagcaaagcnacccaaaggtggatagtttgagangctctcaacacacatgggcttgntaggtaccatatcaacaatggcggcatccccagacttcaaganttttgggccntcttccagcttttttccngaacggcgatcaatcttttccttcagctcngcaaacttgcntgccntgtgagccgtgtggcnntccantncaggggcntagccggcgcttatttggcctggatggttcgggntaatctcctgagcngtgaagccagctgcttccattggtgggtcatttttgctgttcccagcancgttgccacgacgaacatccttganaganacattcttgacattgaagcccacatngtccccangaagagnttcactcaaagcttcatggtgcatttcganagaanttacttccgttgtaacgttgactggagcaaangtgaccaccataccgggtttgagcacaccagtatccactcggccaacaggcacagtgacaanac

SEQ ID NO: 722033 - DNA, 307 bp, Homo sapiens
gacgtctacagcagtctgagttacaatagcaagccagcttgggaagagcaggtagaagaggatccaggatgggaacagcagggcaaggttggaggaggagaagtttgatgccttggtaacctggaaggaaggactttgtgactggggtagggagtgagagagaggagagcagatgaacacaggtgcacgacggccacgatcacgggcgtggcgacgcgacggacgacgcagatgacaccagacggtgccgaacggccacgatcagggtaccctggaaggacacgggaccttggtgacctggggggta

SEQ ID NO: 722034 - DNA, 575 bp, Homo sapiens
caggctgcggtaatgtgaaccctccaggctgctttgcagtgcgctttcccaggctcggggcagctttgctgggttcgcatctatcccttggagctctgtgagttcaggatgcctgtcagtcacacaggggagctgcaggttgtggtggtttcatcacttgctgctgtgtgacctaggcctgtccatctctttggtggtcaatttcgtcatctgacaagtgaggggaatgagcttgactcagtaggttcactgtttcgcgcagctgggagagaggagtataagatcaggggagggcttggtgaagtcaagaggcagggacagggccaggcgcagtggcccacacctgtaatcccagcacttggggaggccaaggcgggtggatcacctgaggtcaggagtttgagactagcctgggcaacatgatgaaacccccgtctctactaaatatacaaaaaaagccaggcgtggtggtgggtgcctgtaatcccagctactcaggaggcgaaggcaggagaatcgcttgaacccgggaggtggaggttgcattgagccgagatcaagccactgcactccag

SEQ ID NO: 722035 - DNA, 274 bp, Homo sapiens
aaaaaaagggggttttcccgggtggggggggggggttttaaacccccccccccgggggggccccccccccgggcccccccaagggtgggggtgtaaacaaaaacccccccccgggggtttttttttttttttttttcccggggggggtcaaaaggggggggtttttttgggggcccccccccctttccccccaaaagggggggcccctttttcccccctttttttcccccggggggggttttttaaccccaaaaaaaattgcccctggggggga

SEQ ID NO: 722036 - DNA, 410 bp, Homo sapiens
  misc_feature (13)..(13): n is a, c, g, or t
  misc_feature (58)..(58): n is a, c, g, or t
tgctggcttcccntgcgcaaccaggggtaccaagtgtttgcgcagggaggccccgccntgggacgccccttttagggacccaccctttaaacaactgcttttaggggcagtatttaaaacttttcagccctcggggcccccctcggagggtgccctttggtcaggcctccctagcacctcccccttaccaaattttccctgggccccctttttagcccccccctccccatgggagggggggccccaatttaaggccttccccgtcaaaagggggttgtggccaaaaccccctttccaactgccctcccccccccgtttcagtgggccctgtggcccggggcttttccccaccccccggggggtttgtgggggggggcgtgtgcgtttccataaagtttgtcccctttcca

SEQ ID NO: 722037 - DNA, 295 bp, Homo sapiens
  misc_feature (17)..(17): n is a, c, g, or t
  misc_feature (23)..(24): n is a, c, g, or t
  misc_feature (31)..(31): n is a, c, g, or t
  misc_feature (123)..(123): n is a, c, g, or t
  misc_feature (159)..(159): n is a, c, g, or t
gagcctccacgcccggntaattnnatatttnaagtagagacggggtttcgccatgttggtcaggctggtctcaaactcccgacctcaggtaatccgcccgccttggcctccaaaagttctggnattacaggcatgcacctccacgcctggctaattttntattttaagtagagacggggtctcgctatgttggtcaggctgatctggaactcccaacctcaggtgatccacctgcctcggcctccccaggttaaggcattctaacctacaggttgagataggaggttggcacaag

SEQ ID NO: 722038 - DNA, 482 bp, Homo sapiens
ggtacgactgcagcaaaccactctggagcacgtttaggaatgtaacacacctgcacatcctgtgcatatatccctcaacttaaaagttggaaataaaaaaataaaaatgaattggctttccatttacccctttgattgcccttacccctatccatatgtaaagcagcagcagggtggtgattctgaatgtttcacgggagcagttaaaaagacacaatgtgggccgggtgcggtggttcacgcctgtaatcccagcactttgggagactgaggcgggtggatcacctgaggtcaggagttcgagaccagcctgaccaacatggtgaaacttcgtctctactaaaaaatacaaaaaaacgaccaggcgcagtggctcatgcctgtaatcccagcactttgggaggccgaggtgagcggatcacgaggtcaggagatggagaccatcctggctaatatggtgaaacccatctctactaaaaata

SEQ ID NO: 722039 - DNA, 822 bp, Homo sapiens
cgcggtggctcacgcctgtaatcccagctctcagggaggctaagaggcgggaggatagcttgagcccaggagttcgagaacctgcctgggcaatatagcgagaaccccgttctccagaaaaaggaaacacaacacaaaaaaaccaaagggacaacaaaaaaaaaacaaaaaacaaaaaaaaacactgtgtgtgtggggcgcgcgcccgcgcgcccccccgagaagaaaggtttcttagaacccccattggggtgtgtggggcggcgcggggcccccagagatggtgaaagggagaacccggggcgccaacaagcggggttcccaaggggacaactcgggcggccagcagacggaacgggggtgggagagtctccccacccaaattaaaaaaagagcgccggggggggagacaaccaccgggcgcgcgtgtcgcgagaaacaaacctccccaagagagggcgagtctccgagggagcacccatacagcgagggcatacatcacaaaaacgggggcgtcccacaacgacgagcacgtcggatattatcaaaacattaaaccccgcggagcaggggggggggaaccaacagcacaggaaagcgaagacacagaacaaagaaagagagcagacaagtgagacgagacaaacgcacaccgacaaccaccaatcacatgaacagacaaacgaagcaacacaacgtagacaccacaaacgaagaaccgaacaagcccaaacccacaacaagcacaacaaccagagcaactccacaacacagaacgccaaccagcacacacgcacagacacgaccatcaacaacaaccac

SEQ ID NO: 722040 - DNA, 130 bp, Homo sapiens
gaagcccagggccacaggaggcctctgggcgaaggcagaggctaacatgacgcatcggaccgaccttgaccgctgacctgaccatctttgagctgacctgcggcactatcatcactgcttcacctgctcc

SEQ ID NO: 722041 - DNA, 479 bp, Homo sapiens
aagtctaagtgactctaagatctcgatcagtgcattgtgttctacctggactgtgtgggtgacaaagacaaaacttttgaagactatacttcagggatcatttctgcagtaataccatttgaccagcatccattgctgggtatatacccaaaggattataaaatcatgctgctataaagacacatgcacacatatatttatagtggcactattcacaatcgcaaagacttggaaccaacccaagtgtccatcaatgatagactggattaagaaaatgtggcacatatacaccatggaatactatgcagccataaaaaaggatgagttcatgtccttagtagggacacggatgaagctggaaaccatcattctgagacacctatcacaaggacagaaaaccaaacactacgtgttctcactcataggtgggacttgaccaatgagcacacttggacacaatggcacgtggatcgggtacc

SEQ ID NO: 722042 - DNA, 451 bp, Homo sapiens
ctttctacacagtgacattgttctcaagagtaacatgtgagagtgccaggcgaaggattattctttcctcccacagagagccaacaaccgaaagccaacacaaagccctcattctattttactatagtcaactgttgttgttgttgcatataatatttatacaaagaaatgtatgttatatataaaggcagagtctaggcaactttattttgaactgtacatacccatgtgcataccagcacccagacggagcccaaatatatatatatatatttagcacccaagacacctctttcaagccatgtgcccacctcaggaaatcaccatcttgactttgaacaatgtcaatgagccattctgttttcctgttatttatttatttatttatttattcattcattcattcactttgcattctaatttcagccctccttcctccctccgtcgacgc

SEQ ID NO: 722043 - DNA, 492 bp, Homo sapiens
gaaatcttcctgaagacattcctcatttaacagctacttcctgaacaccactgtgcttagaatgttgaattattgaattcttacatatttacttcgatgagcaatatcacaatcatgaaaactgtatcattgcctggggaaatagaatgtgtttgttggaacttaagtggttctcttaaatgtaagaaataatacctttagcatctatacagttgattatgtattttaatgtatgagttatttccaaaagaaggtatcatattaaccatgaataacttttatttttttaaaaaattgaaatatcaaagcatttctttattcatttgatatttggtgcttattttggttcacacacttttctaggggcacaagaaggaaattaatgtcatttaggaaaatgtcactttatttttgtttcatttacctaaattcagacatccaaaaaatatgtaagatatctaaagacaaaatctcacagaagatgtgcaagtc

SEQ ID NO: 722044 - DNA, 600 bp, Homo sapiens
ggcgtgagtcaccgtacctggcccaccccactttgtttgtttttcttgttttaaatggttgtttatttatttatttatttatttttcgagacggagtctcgctgtgttgcccaggctggagtgcaatggtgccatctccgctcactgcaacctccatctctcaggttcaggcgatttcctgcctcagcctcctgagtagctgggcttacaggcacccgccctcacgcccggctaactttgtgttttggtagagatggggtttcgccgtgttggccaggctggtctcaaactcctgacctcaggtgatccacctgccttgtcctctcaaagtgatgggattacaggcataagccaccgcgcccagcctaacctttttttttcatttatatttttcagcacgccacttaaaattttttttaaattctgattaagtatatataacattaaatgtaccatcttaaccatttttcagcacacagttcagtagtgttaaatgcattcatactgttgtgccaacaaacctctgggaccttttcatcttcccaaactgaaactctgtacttatcaaacaaatccccattcccccctgcctgaacccct

SEQ ID NO: 722045 - DNA, 122 bp, Homo sapiens
  misc_feature (3)..(3): n is a, c, g, or t
  misc_feature (61)..(61): n is a, c, g, or t
  misc_feature (81)..(82): n is a, c, g, or t
  misc_feature (93)..(93): n is a, c, g, or t
gcncctcgggctcggctcgggctccgggatgtccgcactgtgcaccctcccggggccccanggccacctgggcctcccccnnccacccaccgncccccccctctcagtcctcaggacctctc

SEQ ID NO: 722046 - DNA, 224 bp, Homo sapiens
ctagggtgcaaccataagctcagtgtagcctcaaactccgtgggcacgatcctcctgcctcagacctaccaagtagttgggactacatggcacacagccatcatgcctgactaataatatttacatatactttttaaagagacagggtttcactatgttgcccaagctggtctcaaactcctggcctcaagtgatccgcctgccttggactcctaaaatgccag

SEQ ID NO: 722047 - DNA, 295 bp, Homo sapiens
tataggaggtgagtggtaatggacttgtctggaattagatgatccagacatttatgatgtgtcacataactattctggattataaattgtacactttacagacacatgattggccaggctgcggtggctcataactgtactcccagcagttcgggaggcagagggaggaggatcactggaggccaggagttcaagactagcctggccaacatagtgagacccggactcaactgaaaaaaaaaaaaggtcggccggcggtggggccaagcactggtattcccagcaactcgaaagc

SEQ ID NO: 722048 - DNA, 593 bp, Homo sapiens
atcgggactgccgctgttatcacttccatgggaacgatggacaggacacacccgtgctgcgtgagctcccagagccggtggtggctacgtttcatccgcatctacccactacagctggaatagcagccatagtgcatgcgcctaggaggtgctagagatgctactgtggcccctgtctacagctactacgcacagaatgaggtggtggccaccgataacctggattaccggcaccacagctacaaggacatgcgccagctcatgaaggtggtgaacgaggagtgccccaacatcacccgcacttacagcctaggcaagagctcacgaggactcaagatctatgccatgaagatctcagacaatcctagggagcatgaactggggaagaccgagtaccgctacaatgctgggatccatggcaacgagatagctagggccgagagctgtagctagctgctcatgcagtacctgtgccgagagtaccgcgatgggaacccacgtgtgcgcagcctggtacgagacaaacgcatccacctagtgccctcactgaaccctgatggatacaacgtggcagcgcaacatggctcagagta

SEQ ID NO: 722049 - DNA, 83 bp, Homo sapiens
gcctgtattgaggctcttatgtgttgtgtctacctacatactcgtttctctttagaacaataaacattgtcaaacgacaaaaa

SEQ ID NO: 722050 - DNA, 266 bp, Homo sapiens
aaaaaaaggtggggggcgggctccgtcccccccagccttttggtgcccttggttaaaaaagccggccaactgggggcctcccggttgcccttccattcccccagaatgacctgatgaggaaattttcaataggatgcaaagatcaatgccaaaattgttatatatgaacatataactggggtcgtcaaaaagcaaattaaaaaaaaattgggcgttagaaggtgtcatttaaaacagccttttaataaagttgtttccaagctgga

SEQ ID NO: 722051 - DNA, 206 bp, Homo sapiens
gcttgttgtgacgctgcacctcgcgttgacctgagcctgcattctgaactgcgatgcgtgacatgtatgagaagatggcagagaagaaccgcaaggatgccgaggaatggttcttcaccaacgacagagacagctgaacctgcgaggtggccaccaagcagctgagctggtgcagagctggcaacgagcggagatctctggagctc

SEQ ID NO: 722052 - DNA, 258 bp, Homo sapiens
ttgtttcatatcttacaatcaggctctgttaaaatatatagaaaggaaccatttctttgaacttcttctagtccttcctagatcttaatcaatatggttagtaaaacaaagggtgtttagatcaattcataaccttcctgaataagtgcattactgaaaagcctgttggccaaagcaaactcacgcaaaacaagcttaaaaaaaaccccaagtttgtttcaatttaaagcattggtagtttttgtaataactacgctt

SEQ ID NO: 722053 - DNA, 763 bp, Homo sapiens
tagagcaaaaacaaacgaaaacatatgctagtacgaggctcggtgtctgtggtgtgcagatggtctcgtgcggttactatagccaagatgcctgaggaaacccagacccaagaacaaccgatggaggaggaggaggtatgagacgtatcgcctaacaggcagaaattgcccagtatgatgtcatatgatacatacaatactttctactcgaacaaagagatctttctgagagagctcatttcaaattcatcagatgcatatggacaacaatccggtatgaaagcttgacagatcccagtaaattatgactctgggaaagagctgcatataaaccttataccgaacaaacaagatcgaactctcactattgtggatactggaatttggaatgaccaatggtctgacttgatcaataaccttgtgtactatacgcacaagtctgggaccaaagcgttcatggaagcttatgcaggctggtgcagatatctctatgatttggacagtacggtgtaggttattataactgcttatatggtatgcttgagaaagtaactgtgatacaccaaacatacacgatgatgagcagtacgcttgaagagatcatcagcaggtggatcatacacagtgaaggacacagacacaggtgacacctaatgaggacgtggaacaacaagtatcctacacttgaaggaagagcaactgagtaatgaaggaccgaataatacgtgaaatgtgagacaaatcacagcaaggaacccaaaac

SEQ ID NO: 722054 - DNA, 269 bp, Homo sapiens
  misc_feature (63)..(63): n is a, c, g, or t
cagggctgattacaggccttgcacagaataattagccaaacaatctcattctttacattattnaaacagtaatagcttgagacaacaatctggtatttctagagaatgtgcaagtcaaattgtaaagacttgttctgaatgtcctcagtttcttcctgtaccacacaatggtgttaattctcgagaactcgtacctaatcaattatggcaaatggatgttactcatgtttctgattttggaaaattaaaatatgtacatgtgactattg

SEQ ID NO: 722055 - DNA, 1233 bp, Homo sapiens
tggggaggaggggagtgtcaggttaaatggtcccagtcctcgggcgctgtccagcgcttgcaaggccccagggccggggtcggctcactctcgggggtggcgggccgtgacccggccttcattcaggggccttctccgggggagggccggtcccggtcggtccttcggggcaccagcttccacggtccagcttccatgttgccccatggtaagagggcccagggggcaacggcccaagagagcgaggctggggcgggccaagcaaacggggcgcccggggcccaaggtgccgggggcccccacaagggtcaagcgtggaaggggtcctcggaagcggccggccagaggcccaaggggtgtaaagagagggcggctggggccccaaacaccaggcaacaggggcgcggccacatgcaggagaaagacacgccataatgcgcgggggattcccgagaacccatgtgatacactctctgtgcatttgagaggggagagatagagccccgagatatagctcacgaaagtgccccgagagagagggccccaaattggtggggggaaacaccccgagtgagagagagagaaagaggggcgtcgatacatgcgagtaggcggcacatataagagcagggaagagggaaaacccccgagggggcgtttccgcgcaaaaaggaaaactcaaaagatcttgcgggaaaccaactgtggggggggggccggcgaagaagaaatgccccccctggaggacagacaaggggaaaacccagcggttgtgcaccgttgggagacgcaacaaaggaggaccccctcgggggggtggcggggcccccacctgtgacatccacgggggaggcgcccgggcataaaaaaagcggcggagcaatagataacggcgagaacctctttcccggggagaaaagtgggagaaaaacacacgtggaggacaaaaagctggataaacgaggggcgccgcccggaaagggaccccacaacacaacaacgatgaagaagagggggccccaacaagcggtggggagctacaacaagaaaaacatcatcccccctgtgggggaacaaagatggtgttggccccccccagaatgggtttgtcacacacacaaagaagtgcgccgtggtggggggaaaacactccgagtggaggattatgaacgacacgcggcaggagggtgcgtccaccaaagcagagaagaaaaacgattgcgtcccccaaat

SEQ ID NO: 722056 - DNA, 420 bp, Homo sapiens
  misc_feature (35)..(35): n is a, c, g, or t
  misc_feature (167)..(167): n is a, c, g, or t
  misc_feature (389)..(389): n is a, c, g, or t
ggcacgaggttgctgattcccttagggagcggcanacgggaagagtggttcttttactgtgcccccgcccccaccctcagcctaggggtatgtttctcccagcctcttgtccaacttcacaccccatttatatgctgttgagaacccagtctccagggagccagagnccccactcccagtctctctcagctaagctctctaagctggcctgggttctgagctacatggaaggcagagttctcaagcccttgttttatagtttcccccgaaaccccttgtaagggtctgagacaatacaaagtcagactcttgagacaagcacatctcagcctgaatctctcaacaacctcatttggcaagcaagaactgactgactgtgctgtgagtcntggagacactccatgcatggccctgctcttt

SEQ ID NO: 722057 - DNA, 847 bp, Homo sapiens
gtgcgaggctgtgtgttgtgcccctccgttgcgcggattcctaccatgcaggggcacacttccccgcgtttgtgagaagaccaggtcttctacaaattatggccccggggcctgtttcaaacgatccaggtacaccgacggtgtgcctcactgtggtgttcgcccgccgccatgacagacctctagcaacgaggtggtcccccaaagccgcggttaacagacaccggggtgtttataccaagccacctctcggattgtcctaaccttgaataaactgcccgaagattagtgcaaccaccaagcgggcccctccgcgtatttgtccaccgggggtgacacctaagatccagtactgtgaccctgttctcgtctatcgaattggtgacgggtacaccccccccaaccgtgagaagaagtatcggtggtgcgagcaaacacgccgagcaagcgtacggatatattttcgcgcgacgccgcaagaaagcagtaattctagatagagacaagtgagtatttctatttctttccggtagggtaacaaaccaaggtacagggctaccacttgtgccatggcttttaaaccccctatagagcagataataataatggacatttgttattctgtggtagccagctgtgcgcgcgacagttacaaaatagcctctcgatggggaacgccctctgttgggaagacgacatccgctcaaccttatagggtaacagggaggggcacgacccaccgtgcccggtgaaaaggacgtggtcgcccccactttcgtgacatgagataccgcctgcgtgccgagaaatcgacgtacaacatgactccccggccaaaacatagaca

SEQ ID NO: 722058 - DNA, 430 bp, Homo sapiens
acacctagttgctagcacactaaggaaagcacttattagcactgaataaagtaaaatggcaagcacttttactaatcgacaaaaacaccttctcatgcattatcagaaagcttttataatacaaggaggcatattgctcagtcagaaggagttctataagacaagcacttactaagttagcgactcacagaacaaccagtataaagatgaattaaagtgcccaaattggagaggcatggcaggtgtacgagaaaggacaagctaaagaaaacatttcctgataataccaacctttcttacatcatctactgcatttgacagaaattacccttttagggtcaaaacccgtgacactttcataccttgtacactgtcgtgtcaatctccacttcgtctatagtacaaatactgtctttgtcctttgatcaca

SEQ ID NO: 722059 - DNA, 127 bp, Homo sapiens
atccatccagcctatccatccatccatccatccatccatccatgcatccatccatccatccatccatgcatccatccatccatccatccatccatccatccatccatccatgcaagaagggaggtcg

SEQ ID NO: 722060 - DNA, 354 bp, Homo sapiens
ccctggaattacaaaagttgtcttttgaatcttttaacagacaaagaagtaaatattgtattgccaacacagtccattgttccaagaacttttgagcttaaaccaggaatggctctgtttttgtgtgctataggccgcatagatttgctgtagggaaatcagacatcttggtttacagacgtggcttccaacatactccctgtgcatatcacctccttggacagggcatacgctctgtatcagaagcatgcatgttatacgttacttcagattccaatgggtggtgaactgaatggcaggatttactactcttgttgctgaagacattatgttaggttgggtttcagtaaccct

SEQ ID NO: 722061 - DNA, 295 bp, Homo sapiens
ggggagggccctttaaaaaatttttttccccaaagggggttggccccccagagggggtccccttcccccccaggggggggccttttttttttggttaatttttggaaaaggcccctggtcccctttgtttggtcccccgcttgggggcccccatatgggaataaggggggccccagggttccccccccgggccccttttttttttccccaaacttccctttttttttccctttttgggtttggttttgttttcccctttttcccccccccccccctttaccccctggttaccgga

SEQ ID NO: 722062 - DNA, 326 bp, Homo sapiens
tgggtcatcatgacccatgcccgcaccatgggggctgcgataccagagactgaacagacaggtcctgcgagcgaggacatggacatagggctatcaacctgttccacggaaagcagacaatttcattagtagatgtctttctgacctcccaacagttctgttcagcctcagacttcgtgagctccacaatgtctccaagggttgagccgtagaaaggggtccaatggcatccagggggtgcaggaagcccgtagtatacctgaaacacctccatctggggcagcaccagctcattcatctttttgtcctgagcccttgcaatgtcg

SEQ ID NO: 722063 - DNA, 189 bp, Homo sapiens
cgctctcaccacccctctggcacagccatgggcacagtcacacactccggtgcagttgggccgtagcggcccagtcacacacctcacaggcgttcatggaagcctcgtgcagtggcactccccgctgcccagtcgaacctgtcctaggcatctgccctatggccttgagcacaccccccctagaccccc

SEQ ID NO: 722064 - DNA, 326 bp, Homo sapiens
acaaagatgctggaaagatcatgtatggacaagcatcatgacccagacaggttagtgaacctagcagttacaaggaggaaaagttaaactaaatagcagaagttacttattctttcaagaggtcagcctggttctgggaacacaacattgtctcgaattctgcttggtcagaagtcgtgatggcattgtgttcagcactgatgactattttcaccatcaagatgggtccaggtatcatgttaatcaactatggtgatgcccataactggaaccagaacagtggtaagttaagggctaagtgtcccaggatagggcggatatattga

SEQ ID NO: 722065 - DNA, 294 bp, Homo sapiens
cgagctcgttacccctaattggttcttcgatgacgtcagcactacgttgccagtccacacatttcccccctttggcagtcagttaagtgccttttcccagtgagtgacttcaaatgtgacttcagtatccctctcaacatttgcctctaacaatcatgtctagcactgtgcctggtacatagtaaacactgaatacatttttatggagtgaataaacttggcacgcaagatggaatctattttcgatctctgccgtatgtcaaagtaaataaccgtcatcgaagaaccaattag

SEQ ID NO: 722066 - DNA, 569 bp, Homo sapiens
  misc_feature (26)..(26): n is a, c, g, or t
ggacttgttcttgctgagcactctgnctgccatgatggctctgggctggtttcacaacgtccggcgtaaagtgttcctagaggcttcagtagcagcattgactgtgttgcgccatgttgggactggacaggtctaagctgttgaggtactctggccaggtcattaaccagtcccttcttcaggaaaagccgaaggatgttgttcatgccattgtgctgggtcttcgctgtggcactgctgtataagctggaggtggaggggcaggactccatgatagtactgatgatacacatcactgcctgaagcctggcatgtttctctgtactctcagccatagccagtgcccgtccaagggctgcttttacttcattcactagggccacctggggcatctgtgccactccctgcagcagccaggcttgcgaggaacaggcgggccaaggcaggggtgtccttgtcttctgcattctgggtatgtgggagcaggtggtccagaacaaaagctatcacactgcagtcctctttgatccagtcagactgcgcacaggtgtatctgtagtttgcatcac

SEQ ID NO: 722067 - DNA, 263 bp, Homo sapiens
aggcgcgaatctgtcattctacacagcagtcccttcccacatgctagtagggaagggaaagcatgatagggaggtccactttgtggagtcaaagcttgatgggaatgttgagcagtcacaacgcttctcagaaaaggcacggcaccccagacatgcagtcccggcgaacaggctggctcagcagatctgcacgatcggatgtctctgagcccttcttcgggaaggaggaccacagtagaagtggggcttggaacccaggccag

SEQ ID NO: 722068 - DNA, 131 bp, Homo sapiens
  misc_feature (31)..(31): n is a, c, g, or t
  misc_feature (64)..(64): n is a, c, g, or t
  misc_feature (70)..(70): n is a, c, g, or t
  misc_feature (101)..(101): n is a, c, g, or t
  misc_feature (108)..(109): n is a, c, g, or t
  misc_feature (119)..(119): n is a, c, g, or t
  misc_feature (122)..(122): n is a, c, g, or t
  misc_feature (130)..(130): n is a, c, g, or t
gtatccttgaccgcacgacaaggagtaatgngcggacctgaacccgcgacgaggggttgggggncaagangcctgggtcggaccttaaggatttgggagtntagaaannaaatgggggnganagagaccna

SEQ ID NO: 722069 - DNA, 454 bp, Homo sapiens
cggatgggtgatgtctgagggcctcacgaaggagtacgaccgctggcgggaggagcacgcaaagcggcgggctgcagtagagggtcccagggacaagaaggaagagtaaggggcctccttcctccccgtgcctgcagctggcttccaccgggcacgtgcctgctgcttccggagagcccggcctctccctccagtacttcggttggtgcccttctgcttcccccattcccttccacagctcatagctcgtcatctcggccctggtccacactctccaagcacatgagaggggaccggatggctacacgtacagaaggcgtgggctgtcatccggctgggccgggccaggccgggcacagccttggcttccacgcctgagcgtggagagcacgagttagtggtagtcgggctggggggggggctgacttcgtgtgggtgggaggggtacggagct

SEQ ID NO: 722070 - DNA, 918 bp, Homo sapiens
cggccacaaaaacagaacacctgggcacgctagcctgtggtcaatttgacataacagtggtctgtacgtctccttaatgaagcaacaatgcaccataaatgtccgggattagttgaaaaacgtcatccccatttagtaaggcagtcacagtgtcaaaaatgaggatgtgtctacctattcttttcaaacattggggtgcagacccagatcctggagggatatcttccgttattagattactgttcatccacttatgctgttttgtggtcaaaagtcttgttcatttagttttgccaacaactgctttgaatacgaaactcgatcttgtcagtcgataataatacaggtatgggtatactccactagtagttgccgtttcttaactataatccaataatggtgaaaatttcgtttccggagaaaggggctgatatgaatgcttcagataattatcaagagagacagcccttatttgcttgctgatcagtggtgaaccaccatgtttagtaaaagcttcttttttcagcaaggtgtggaattatgttacgaagatagatacccacaattcagctgcgagccatggaaagaagaaacatgctaaattagacaccttattctggcactacatgcgacttaaggaagatatggaacccatttctagccagttctgccgcttccttgaattggacacaatgtactttggaagcaccgtttagtgaactatgatcatatttcttgcggacttacccagttgagagaagaaagtttgttaaattggatgggactttttttttttcacgttagaagacatgaagtaattttaaaagatcaacatctatattgtgaaccattcagctgaaaagataaatttgtgttcaatatataggcagtataaaatttgtgtcaaatgtgaaatac

SEQ ID NO: 722071 - DNA, 206 bp, Homo sapiens
tggggtaattagcacttaattttaattaaaatcaacagttcaaaaaaagaatgaccaaaaaagaaaaagaaagagaacaaaaaattaataaaaggaagagggaggaaaaagcagcaagaggcaacgtggtaaaaagaattacttggcaagaagaaaagccaaaagaaaaaatactcaagcagagtggttaaaaaataaaaaaaagg

SEQ ID NO: 722072 - DNA, 1090 bp, Homo sapiens
  misc_feature (326)..(326): n is a, c, g, or t
  misc_feature (1090)..(1090): n is a, c, g, or t
agcgggttcttcttctggcttgccaccatgccttccactgctgaggcatgacccggtagacactatcacgggcgcccagcgattagtccacttgtcctaccggcctctgtatggcgatgctcctgcacaagcgccccgagactgaccgcctgtatgtgttgcgtgcgtctgctgtcatacgaccggattcaatcttatctgataaaactagccattccatagctacattctgtggcacaacgtccgagtgatggacacgcgattagccactttacaaggaagcgaacgcttgagctttcctgccgcaattgtcacacctatgaccnaagttgattgtggcgttctgggtcgcgtgcacaccaggacttcgcggttgagcctgctgcctaggggcactgacgacttggggcctggttctccagtccattgtttgctcggtgcgggttcagtgcgctacgtacccaggttcctgggagcaggggaggatccttccctccatagtcgaccccttgctctgtgccgttgtagcgcggcccgtcttgttactttgcacggctcggggagcgtaggctcgatgggagagatgagtttaccgcacgttgctctgcgggtgcgcgtgccttggtgttcccgtttggattgggcttctccgaatggggcgcggcggattagccggggacccgttttacagctttaacatgttggcattatccttaacgttttccatttacaccttttgggagtgcctagcggagaaggttggattcgtttacacggcctttgctatcgccattttcacgaggggcccgccaataagggggtggggcccttccgtttacaccattctcaggaagaggggcgggtggcgccccctcggtgtcacccccacgggcttttgttaggttgctccgcgccgtaattaaagaggggagcgcggggatgaacacctttgtccagaggaccgttggggggcgcatacaggtcaaatcgcggggccttttaggggttgccccccctttaggtgtgaagaggggttttggttatttcccccgaggccttcacgggggttttccactcatatgtacattgn

SEQ ID NO: 722073 - DNA, 122 bp, Homo sapiens
ggatttcaaggatgcaatgacctatgatcatgccactgaagtccagcctggggtaatacaccttccgggaggtgatgaccaatcctaaagctgtacagtagcagagaggaaggtacctctga

SEQ ID NO: 722074 - DNA, 1205 bp, Homo sapiens
tactaacaacaaaagtttatggggaaagtaaattaaaacaaaacaaacaacaacagtagggccaaggggggcaaaagcaatcctggtgtaggcttaagggcgaaggtttaaagtgggagagatgagaatttaagaaaaagatgagatggcaaggatgtgtaatttggtgtgtaaaatataagattatgagaaaaaattatcaatttgggcgttcaataatcttaaaagaagagatagttttctcaagagcgcgtgtgcaccacacggggagaaaaaagagggcgctcgagtgcactcttatagaggcgccacgcttataacacacaaacaacagaaaacccagcgagggggggcgaaaagtgcacagaacaataaatactccgagatatattctcactatatagaggagagtgggttaacacggaggacacaattatttaaaagacagcaccttgtggagatctttatattacacggggggggggacacgagcaaaagagcgccctattaaaactaacaccacaaaacatgagagagggcaaaaagatgtgtgctacaccaacacacacacgagtgggatatatattataaaaaaccaacaaaaaaaaaaaacaaaaaaaaagagagggggggggccgcgcgccaaaaaaaataaccccccgggggcggtcgcccaaaaaaactttatggcggcgtaccccgcgcgcatatttgcgtgtgcaaaacaaaaggggggggcccccaaaaaaagagagaaaaagccgcaaaaaattaataagcgacacaaaacgccgaggaggcagcaacgagatacaccaaaaaagaggctcgaaacggggagcaaacacagctgggcgctacgcgggggggaaccaagggggagaacacaggagacccccctaaacacaacggagggggggaggacacccacacagtgggggccaacaacacctccccaccacaaagacgaatacttaaacacgccccacacagcagcaacaacataacaaccttgcaacggaggggtacaaagggggggggggacaaccaaagcgcgcagcaaatatcgtgcaccacgcgaacagactagaagagaacgaaaaatgtgggggcacaaaagaggagaagcaacacaataactagacgaagagaaccacacacttcatacacggggagagaacacacagtcagcgctcgcgcggggg

SEQ ID NO: 722075 - DNA, 279 bp, Homo sapiens
  misc_feature (89)..(89): n is a, c, g, or t
gagtacgcagtcgttgtcttggtcacctgcatccatagccatgtgcttgtcctgtgctccacgttcccagggcaggtgggagccacagncaccccactatgccgcaggcgcctacccaccttcaggcagcctatggggcgcagggccccatctgtccctcgggagcaccccacctctgtgtgtgatgtagctttctctccctcagccttaagggtccgatttgccatcgaaaaagacaacctctacttttttcttttgtattttgataaacacttaagc

SEQ ID NO: 722076 - DNA, 151 bp, Homo sapiens
caggtcctggctagctgcattgggaattggacccctgatctcccacgccatgattcctgtggacggagatcggcagtgcctgcagctactacaaccgggagaatggagaatccatgcgagactggatctcggccgaggaaacactcattat

SEQ ID NO: 722077 - DNA, 247 bp, Homo sapiens
agctaaagaatattatagtagtcatgagtgaggttggcttagatgtgttttcaggtgataattaatggttagcatcctaatgtagagttgcctcaggtcttcctgcgatttgttaggggcggcctagagtctcatcaacattgctcaagttgattcaagagaaaggagggtggtagttataagataagtgacagaccaaatattagaatcattttaaccattatttattgctccaaagcctgttagg

SEQ ID NO: 722078 - DNA, 123 bp, Homo sapiens
gttataatacacagcggatggtcggaagcttatgtagtagcccgggtggaggcgtgccagaaggtgcttagcagcatggtccaggcgctccgcaggacataggaacgggcaggtgcgctcttg

SEQ ID NO: 722079 - DNA, 839 bp, Homo sapiens
  misc_feature (839)..(839): n is a, c, g, or t
ctgaggtagaagaatagctggaacccaggaggcagagattgcagtcagccgagattgcaccactgcactccagcctgggagacagagcaagactgactcaaaagaaaaaaaatgacagaagcctgtctcctccgggcagtctgataatcaggcttcccggaggagacaggctccagcagatagatgccagccaggcccagctgccacgatttgtcccaggtgaccaaaggcacgcagctccagcatgaatcgttctaacccaacagtgacaagaactgctgggccttaaccgtcatggaagactggggccgcttccaagtcacagacaggagacggggacaggaaagaactcattccacccaatcggacacctaataattgagtgtctacagcagcaatcaagtgacaagtgaggccctacctgacccagaaggtgcctgccggctaaacatttctgcccccaccagaaactccaggggtccgcccgttatgccgtggccaccacgcccctttggatcaccagcagtcacagacaacaggcaggcgaaaactgaagaccccaaactcagccccagcggacccttccagagcaaaaggaggcccccgggcgagggccacctgtctggcaggcatgtccggaggtcaaacagggcggggcccaccgttcccagctgggccacgacctggcccgtccacagatgggctttgagaatgggttggttcaccgatgggggggtgtgggtttgggccaaatggtcttgggcccgaccctctctgtaagggattttggtttcccttgtggcccctgggctcgtcttaaccctcccaatttctgtcgn

SEQ ID NO: 722080 - DNA, 106 bp, Homo sapiens
ctccatgttgaccaagcctctacaggggcctcccgcgtcccccgggacccccacggcggcggcagaggcaaggatcgggaagcttcgaggccgagtatcgacttgg

SEQ ID NO: 722081 - DNA, 151 bp, Homo sapiens
cctgggttttttgttttttggaggggtgaaccgggggttgtttgcggggaaaaaataaaaaaaagcaggggccgggtttggtttatttttgtatttaccccccttccgcccaggcccccgcccctttggtcaataaacattccgccctcca

SEQ ID NO: 722082 - DNA, 387 bp, Homo sapiens
  misc_feature (219)..(219): n is a, c, g, or t
  misc_feature (223)..(223): n is a, c, g, or t
  misc_feature (240)..(240): n is a, c, g, or t
  misc_feature (270)..(270): n is a, c, g, or t
  misc_feature (273)..(273): n is a, c, g, or t
  misc_feature (279)..(279): n is a, c, g, or t
  misc_feature (311)..(311): n is a, c, g, or t
  misc_feature (318)..(318): n is a, c, g, or t
  misc_feature (328)..(328): n is a, c, g, or t
  misc_feature (345)..(345): n is a, c, g, or t
  misc_feature (373)..(373): n is a, c, g, or t
gcgccccttcgcagccgcattgatccctggagctttgtgtcagctgggccacggctctctcccctgccatcaccacagcctgcaccccgccgagcaccctggaccttgttcccggactcagaccccttctgggactccccacctgccaaccccttccagggggcccccaggactgcagggcacagaccaaagacatgggtgcccaggccccgtgggtgncggnaagcggggccttgagtnggccaggccacttcccccgagttccagctnttnttaggnaggagtcacagcataacactggaacagggagntggggtnagccttttgnagatgccttcagttttncccaggggaccccacccccttttgggtncaagggaacattaa

SEQ ID NO: 722083 - DNA, 487 bp, Homo sapiens
  misc_feature (84)..(84): n is a, c, g, or t
  misc_feature (300)..(300): n is a, c, g, or t
cgcttccccaaagctcagtgtcccatttggagcgctccctaactccatataatgcgcggccccaacacggcaaaaagctcatgnctgtgcgcattgtcaagcatgcctttgagatcaacacctgctcccaggcgaaaaccctttgcaggttttggttaaccccatcatcaacagtggtccccgggaggactccccacccattgggggccccgggatttttaaaaaacaggctgtggatgtgtcccccctgccccgtgtgaaccaggccatttggtttttgggcccaggcgcttttgaggntcccttccggaacattaaaaccctttttgagggcctggcaaatgagctcatcaatgctgccaagggctccccgaactcctttgcccttaaaaaaaagggcgagctggggggggtggccaagtcccccccctttttttcccccctgttgcccaataaacctgtttgccctttggggcggtccccccca

SEQ ID NO: 722084 - DNA, 509 bp, Homo sapiens
agcgagcagccgagctggtggatcgccgagcgcgagtgagggagccggagccgccgccgcgccgcctccgctcccctccgcgaacagtgagcccgggccggggccctggactgccgcccagccgtccctcgggctgtcaggccgcgagggtagcgcgccgcgagcgagcgagggggagggagagcgagcgagcgcctgggatggaggcggctggacctgagctgggcgccgcgctgtgtggcgtgaggggaagcctgcttgaccgaagaaactaacgcaaaccacacagcgagaggcagagagagacacccgaacacgcgagccgggggcacagacccacaacccacgcgaacagaaggaaacaacagaacagcagcccgccacaagcgcagcaacggaccaggaggaagaccggccaacacagccacccgggccaaaggacgagagacgagacgagagaagaacgaacgacagcgggagggcaaacggagcgcagccaccgcaaggag

SEQ ID NO: 722085 - DNA, 179 bp, Homo sapiens
tacagcttccaactgagtgtattttaaagagacagtgaaggtggggcatggtggctcatgcctgtaatcccaagactttgggaggcagaggagggcggatcacctgaggtcaggagttcaagaccagcctgaccaacatggagaaaccccgtctctactaaaaatacaaaaaaattagc

SEQ ID NO: 722086 - DNA, 184 bp, Homo sapiens
  misc_feature (3)..(3): n is a, c, g, or t
gangggcacatccgaccgtgaggagtgcaggcaggaggcagaggcgggtcactagtcaccatcaggacagctcagacagaagagacgtcagccagttagtgcatgctgtggtgagaatgctcggacgttcagtctgcttagtatcatcaacctcgtgaaaattgctattgagtgagaagagacc

SEQ ID NO: 722087 - DNA, 145 bp, Homo sapiens
cgaatgtgctgatgacagactatcttaaaaacacttccccgggtcacagtggtcccttgctgagattaagctcctatgtacacactgcttggtaaccttagcaacttcacggcatatcagcaaggcaatcagatgcatcctctgt

SEQ ID NO: 722088 - DNA, 977 bp, Homo sapiens
gctggggttcgtgcttgtaagggtgaggcgaagctagaggataccggagatgagtcggtgggcatctgagagaagatacagatgaatacgaactacttatattaaaatatatgaccattaggcttactcatgatattgtgtagagttgagatgtcaaatagtaattttaattgtagccttacaggtaatctcccaaccgtgaagaagtcatgagagagatctaggataaagatagagactgtggagatagggatatacatgcataaatggggtgagcaaaggaaatgacggaaggatgtgatcatgaagcttcgtatggtgggagatcataatactgttggtttagacacgaatcacttgctgccagagaaaggacctcccagagtcccccggagattcaaattaggcacttaggaaaggttcatatgctctaaggatttagaacttagttcgggtgaactttgaactagacttcaaaaagattatagttatcacaaatctgcgtcacgcgttgagggtaacccataagtctggaaacggccgcatgcgtatattataccaagaagatttaccctggggacaggatgacttgcttctcgaccgttggaaaatcctgatggacttcaggggagaaatggcgttccttttggcatgcctagtcccatcgcattgtcttacagtgcgaggactagaccatggcatagactgtaatcgggagtgggtggatcgacatcaatctcgcgcaacgatacaaccgtcggacggcggaagctcgcacgatccgaagtatgaggcggcgcaccactatcccagaacaaagccttcgccacacactggccgccggacccaagaaccatcgtccgcggcccacaagaaggtctctcgcctggactgcctgacaacgcagtgacacaagggggcttcactcaaaccggggaccaacgcgcacacacacggcggagcaccggcaaccggcg

SEQ ID NO: 722089 - DNA, 185 bp, Homo sapiens
tattacgagtatctggaggtcagcaggtgctcaaatgtcgacggaacttgtccaggcaggcatgcaccgcacgtggtgaatacacgtcgaccaggctccatctttacgatctttggaggtcagcacggtgctcaagtatcgacggaacttgtacagggaggcatgcaccgcagtggtgaatacac

SEQ ID NO: 722090 - DNA, 208 bp, Homo sapiens
gctttgggacggcggtccacattacagcttcgatgggaagacgtacaccttccgcgtggactgctactatgtctgcaatggtgaccacaacgattcctacgctcctctggcgagcatgcccccttgctccacagactagcagacctgcctgaagacggtggtgctgctggctgacaagaagaagaatgtggtggtcttcaaggtccga

SEQ ID NO: 722091 - DNA, 234 bp, Homo sapiens
ggtcctccacctcagcctcgcaaagtgctgggattacaggcgagacacccatgcccggcctagtgagccagtcttgcctagtgagttagtctcgtggccaagtgaaccaccagatgcttcctcctcagctccatgaaatacttacgggaagtgtacagaccgatgactggaaagaatcatgataaatgaaaggggaaaaattagacagaaatctgagtacagcaggactccagt

SEQ ID NO: 722092 - DNA, 396 bp, Homo sapiens
cgtcgacgagagacagacagaaacagaaagacatatagagaaagacagggacagagagacagagccaaacagagatggagagacagagagagacacagacagagacagacagtgagacataaaaagagatataagaatgagagagaaagagaaagagagaaataatgaaagagaggaagagaaagagagaaagaatatgagaaaacccaactaaaacagcagggttataaagagagtggctaggtagggttgcagaggaggtgagaagagatagtatgcacaacatgtatctatagagagagtgagaaagagggaaagggagagagacagacagacagacagagacagagagagaacatgaacagaaatatggctggaaactaaaacagtcgacgc

SEQ ID NO: 722093 - DNA, 105 bp, Homo sapiens
tgatctttaagccaggtcttttctaaactctgagtgtatgggtagaaaaagaaagaaatatcctcggcttctgcagtgaattgatttttctaatgctcctggaaa

SEQ ID NO: 722094 - DNA, 162 bp, Homo sapiens
cagtcaggctgtattcgtgagatgatgcgcaattggtacctcgattgcgatgatttatttgatgtcttggaagcaggcaaagcgtagctaaattgacagaaaaggaacctgaaatggttccttttttctttcatggttgtggtcggttttgaaatagagctg

SEQ ID NO: 722095 - DNA, 313 bp, Homo sapiens
cggatcacaaggtcaggagatcgagaccagcctgaccaccatgatgaaatcccgtctctattaaaaatacaaaaattagctgggtgtggtggtgtgcacttgtaatcccagctactcaagaggctgaggcaggataatcgcttgaactcgggaggtggagattgcagtgagccgagatcatgccaccaccgcactccagtctgggtgacagagcgagactcagtctcaataaataaataaataaataaattatttggattgattgttctgttattcctcctgtgaaaagatcaggttccgtaagataactaat

SEQ ID NO: 722096 - DNA, 146 bp, Homo sapiens
tgacaggcgttgcgcgcagtggcgggcggtgtcagcccacagccttagactcagccacaactcgttgcgcgcaccgtaaaccctagcgcccgagatgcttgtggtccagcgccctgaattccctcaatctgtcgggctagtcgggg

SEQ ID NO: 722097 - DNA, 200 bp, Homo sapiens
aaacataaccagacaggacagaccccgcctcagggctcaaaacacagctgctgtaccatctcctgtgggaagagggttgccaagggcggaccaattgatgggaacagggtgatgggccaggggagacaccttataccacgaaaaaagccttgtgcctttgtgcgaggctgggaaccttgctctggcctcgccacacactg

SEQ ID NO: 722098 - DNA, 149 bp, Homo sapiens
gagtcggtacctctcataatgtgtgccatatatgggtgtgtgctgtgttttatgttagtctagtgaaagtcatcttgtaagatttttatagtttgcttatccacagtaatataccaagtgcttagagccaaagtttgtgcttttgggga

SEQ ID NO: 722099 - DNA, 1028 bp, Homo sapiens
  misc_feature (679)..(679): n is a, c, g, or t
  misc_feature (1027)..(1027): n is a, c, g, or t
caaagttcttttactggcacagaacattgaaggctaataggacaagtgtttgagtgtcctctctttaatgctaagatgggtcctgtgttgtctacagtgccctccaaccctcagtttttcagttcccactgcctaatgtctgctcaagcatagtataataggaggtggtagcagtagcaatggccttatcagctgttcacttacatgcttttgcccaagtcaccgttgcccatttgtcagaggtgttgccctactcaacctccactgccctagcttttcccacaccccttgaatagataggtatttccaaagctgcttgctcttctagccagttgagctttgatcctctggacttttgactgctcagtgggttttggtcagcaaagcatggtgcctcttccagtgggaccacataacaatgtctgctccaccgtatatgtgtgggagactctggtgctcacggagacaggtggaaaattgcccctggggacaccaggcacagggcggcttgtagaggataggccttgaatgccagcctgcctccacctccacactacttcctcagagggcttcaagccaaaccaatagcctttttgtgtgaaacatctttgaggtgggaaagggaccactggagctttgctagcataactgaactttcagtgttaatgttctggaaagnagcagggactcagcacagaaattcaatttaaaatggagcctgaaaggagtgggcctcctctatgtgtgacagaaaatagtgctaattctttcaatctgacctctagcacggttgaactcagtagtgaatgcgagcatacggggttttcaccaagggaccagggaaacataccctcactgtgaggtggggtgcgccctcccccgatgtgcctgttcttgtgccacgaggcgttgttataacgcacctagagaagcggccgcaatgttgaccaactgctcgcggagggaatatatcatacaaggttcatcagccagatgcctttcttttaatcgtttaaataatgcaccna

SEQ ID NO: 722100 - DNA, 119 bp, Homo sapiens
ttcgaggaagactgccctgttgcttgtcgcaaattgcaggacggcagcagtaggacacacagacaagattgggagattgaaagaactctgtgagcagtatggcatatggctgtttgtgg

SEQ ID NO: 722101 - DNA, 669 bp, Homo sapiens
acagggtgacagatcttttaaagggtgctaaagatagtgttgtccttgtcttggcccctcccattcacagaggctcaagagctgtttagggcagcgcataggagcctagcggtagctgtcacggttgagaagagaagcaggttttgtacactgggatggagtgtgcgtgacataaaacacctcaactggaagaggctgccgacgcaggccaggtgtaaaattccacacaatgctcacaaccattaaggaaccctcatctatatacatataaaactgagaaagaaataacgcgtaaggcaatgtatggcgtgtatttcagcttgagtccaaagaaataatattctatgagggcttaagctggtttggctaatttaaactttttgaaaagtccactgcatttaaaaaataatgaatttgcttccgttaaagctagattcgcgtaacaatcaggcagctgctgagggtcagtttccctttctgggggtctcagaaaatggacagttttctcgtacggcattttgagataaaaaattgcgtaacaggtaaggatttgctgggtgatagcattccttctgtgaggtcaggaaggaggaggaggaagaagtcagaaatgcattatttatgctagaatcttcatcgtaacatctgatggtactgatccaaggagcg

SEQ ID NO: 722102 - DNA, 360 bp, Homo sapiens
  misc_feature (97)..(97): n is a, c, g, or t
  misc_feature (274)..(274): n is a, c, g, or t
  misc_feature (294)..(294): n is a, c, g, or t
gggggtgaggtaaaatggctgagtggtttgtagagaatagtcaacggtcggcgaacatcagtgggggtgaggtacaatggctgagtgaaatggattntggcgtaggtttggtctagggtgtagcctgagaataggggaaatcagtgaatgaagcctcctatgatggcaaatacagctcctatatgattggacatagctggaagtgagctacaacgtagtacgtgtcgtgtagtacgaggtctagatgatgagttttttatatacatatgccagntacaggccaccctacggtgnaaaagaaaagatagaatccctaagggctccagagcactgcagcagatcatttcataattgcttccg

SEQ ID NO: 722103 - DNA, 952 bp, Homo sapiens
gctccaaacccgcacgcagttgtgctagactgtccttaaatgctactgaggtgggtgtcacctacaagttgtgtattaattaaatatctagctagagatcgtgcttggctgagtatatacagcacacacatcacgatgtatacagtacacatatatgcatcgatcacatataatgtgtagcatacaaacacacgatgtgtgatgtacgatagtaatacgacagtgtagtatactatatcactgtagtgtatatatgtcatatgatacagcatggtgttgtggtaatatagtatagtatagtatgatataatataaggattctacacacctgatagtgtagtggagcaggacatagagagacttctatcacgtgttaacgcccattaatgggttccttgatataaacaattctctacaaggaggatctagtgatcccaacgaggagtgccctacatagatatctcatgaactactcccaataagtcgtgaagacgcagtcagggacctcctcactacagtagtgacacacgactacatattttgcacatcacataaaacgaaagacgagtcctatacatacaggttggtggaagagtccttcgataggtactaaagaacaatgagtccctaggtggagaggtaacggacaaggatagtggcggccggtagcttaaattgacacaaaactcaccctgagtttgtttggagacaaaccgccaagtagacaggcctgactatataaagaaacgaaagataaatttatgtcaaaacacaggaaacgttagggaaatagtaaataccccaccccacttagtatagcaaccccttctatatgaatactaaatcataataaattaagaaaactttagagcacaaggacaaagtaagtaagtggccgaaaactgggaggcagtactatacaaacataggtgcggacatcagagccaactag

SEQ ID NO: 722104 - DNA, 1114 bp, Homo sapiens
agtgagggcctggtggataaacgctgtggcgtggcgctggtggcgcagcgtgcagggcctggagcggaagtgtggaatggtgactgcagagctgccatctgtccctgctgctgcaacttcgagggctgcaccgggagaggcggcatgcagactatggacaagcatgaacctgctggagagcacgctgcggagcccggtccttcttaggatctctgtggaagagtgaagctagcctggatccctcctgtggacctgcccgcggttgagctggctgtccagagcaaccattattgccatgcccagaaggatactggaagtcaccctgaccccgagaagcagagggcccgatcgcaaactctatgtggcctctgccatctgcctggttgttcatgatttggcgaaatcattggtgggtacctggcacagagcctggccatcatgaaccgacgcatgcgcacctgctcacggatatggccagcatgctcatgagcctcttcgccctctgggtgtcttcccgaccagccaccaagacatgaacttcggctggcatcgagccgagatccttggagccttgttgtccgtgctctccatctgggtggtgactggggtgctcatgtacctagccgtgcagcggttgattctggagattatgagatcaaaggggacaccatggtggatcacttcgggcttgcgcttgtgggtgtgaaccttcataatggggtaggcccaccataagtctggactgggcaccagcatggggacacgcgtgaaggaagcagccagagaaaccacagggaccagactgcctcagatccagtagaaatgggggccctttttgaaaacatgttgcaggacaagggcgcagcaaaataatatatatagtacaggccgggaagtaaaagatgttaggaccccccattgtgaagactaactaatagtcaaccggggttgtgcgcaaacttgtacaactatagaaaagttaactggagcccagatggaggccacaagagggggttcaagcagggaaaaatagctccgggagtaaggagcctgcatcgagatattggccacgcgacacggtgtaaaacacacaaggaccaataatgagaacgat

SEQ ID NO: 722105 - DNA, 236 bp, Homo sapiens
ccttcggggggtttttcggttccccaagcaaaagccaattttttccagggggggggaccttgggtcccctttgatattctggggccttggtttttatttttccctttactcatgggggttgggcccccttgggttctttgttgttcccccagaagccggaaaaatttctttccctgggagggggggtttgttccttttttccgggagggtttttgaaactttccccctcaacccta

SEQ ID NO: 722106 - DNA, 155 bp, Homo sapiens
ctgtcacacaacatctggttaaagaactcgaatggaagccaagctgcatgagcaagtggagaagaaaagaaaacatagtccaaacagatcacacaagggaacccaggacaaatgctgactttggcattatctaggtaacccctatatttagtcat

SEQ ID NO: 722107 - DNA, 111 bp, Homo sapiens
ctatctacagcaaggtatttatattactgaacaattgcctgccttatggattcttctctgatctattagggcttcttcatcttcttcctctacatcaaagtcttcaaggtc

SEQ ID NO: 722108 - DNA, 635 bp, Homo sapiens
  misc_feature (588)..(588): n is a, c, g, or t
  misc_feature (609)..(609): n is a, c, g, or t
tcccccgtctcaacatagctaagcctatggcacatacggtataaaagataatcacccaccatagtataccaaactcctcttatcaactgcacactaagtgatatcaatacaactgtgtccgtataaaaatactggaaacaattgatgaatgacaggttagagaaagatatctcgagctcgttactaggatcatgtgcatagagtgagcctgtggatatttaaaatatcacagtaacaagatcatgcttgttcctacagtattgcgggccagacacttaagtgaaagcagaagtgtttgggtgactttcctacttaaaattttggtcatatcatttcaaaacatttgcatctcggctggctgcatatgctttcctattgatcccaaaccaaatcttagaatcacttcatttaaaatactgagcggtattgaatacttcgaagcagaacaggcaatgtgcagccctcatttatgagaaaaccctcaggaaactcccagagcgatgcttggagaagctgtgagttgagctgaagctggagaacttcctccagagcaaagtgcttaagaaagaaagaagaactctaagctgngtctgctaacatcacttcagnttagatcgatcttggcagagagacat

SEQ ID NO: 722109 - DNA, 253 bp, Homo sapiens
ccagagctgtcctcaaagcatccagtgaaccctggaaaaggcttttaaaagggaaaaaattgtccctctgaggcccccgtgggtgacctccaaaaacttcctgcctggaactcatttgtgaactgggacaaaaacaaaggaggctgcctgttgtgatacccccttccctcccccagggcctttttcaaaaaatttgccctgttttttgatcctgttagtccctgtggttcctcaaataaaactgtttgtgcca

SEQ ID NO: 722110 - DNA, 265 bp, Homo sapiens
gagcgtagagatcctaacagctacttaatgatgttaaaaataatcggtacatggacgggcacagtggttcacacctgtaatcccagcactttgggaggccgaggcgggcggatcactggaggtcaggagttcgagaccatcctggccaacatggtgaaacaccatctctactaaaagtacaaaaattagctgggcgtggtggcaggcgcctgtaatcccagctgctcgggaaattgaggcaggagaatcgcttgaacccaggagg

SEQ ID NO: 722111 - DNA, 110 bp, Homo sapiens
ccaagaccgtaagcgccagcgcgaggcgaccttgcaagcatcatatctgggatattcgatcgttgctgaatagctttgcctcagcatattcagggccgctagctactcta

SEQ ID NO: 722112 - DNA, 116 bp, Homo sapiens
ttgtctcttacggcattccattatgtttcattgcacatgtgtcattcatagtgctgccctactgtgctcgtgattgtgtccacatctccaccagcccagcccaccaatcagggcat

SEQ ID NO: 722113 - DNA, 355 bp, Homo sapiens
gttcttctggttctgctcgtgcacatactcaaaatgcctgtcatctccagtggcctatgctttccattgcgacctgtcatcctgaaagaatggcttcacatttgaagagtgagaatgccaccgggcctgtctggaagaccagatctggcctgctatctctgggttgcttcgctttgaccgttaagtgtctccggaatgtataccgtttactaggcttcctctcaaaggtgctggttcttggtaccctgaagccatgtgtagcttgatattctgtccgccctctatctctaacgcgagagcacagcctgataaagtcgtatctagtggatgcgctgtctcctggcgtccacagtcg

SEQ ID NO: 722114 - DNA, 116 bp, Homo sapiens
caagactcgaaggacagaaggtttttgactctctaagtttcggaggtgtgagacaaagggggcagggaagactaaattaaacgtgattcagtaaacgtgaccaacctctggctcac

SEQ ID NO: 722115 - DNA, 121 bp, Homo sapiens
tggcacatgtgctggctctttttatgtgggtttactcaaggctggaggctaatggctgatgccccagtctgacaatcatctaatggaataaacattaacgaagaccctgtaaaaaaaaaaa

SEQ ID NO: 722116 - DNA, 101 bp, Homo sapiens
ctggcacgtttatagggttgtacggtagaaccgctattattcatcatgtgggtaattgaggagtatgctagattttgcgtagctgggtttggtttaatcca

SEQ ID NO: 722117 - DNA, 788 bp, Homo sapiens
tggggaaggatctgcaggcgagattacgatggctgatggctctgctgctgccctgccccctgccttgtgcccccagatgcccaccctggtctggccctgtgtacatgccatgatcaaggctgatccgtaatcttcaacaaccactgggaagcctggtgtctccaagttctaccagccctacagtgaagatacacaacagcaaatcatcagggagactttccattcggtatctaagagacgatgaaaactgctgtaactctccctacacagcgaggactcactcacatcgcgaggactctgaccacacacaactgacttcactagcaccattacttgcaacggttactacttcctcgtctctctgctgctgcgactttcattacagaagacggcgtgagacgttgggcgagtagttgcaggactactaaatttcaacgctacttaagctgcgagacaccagttaagtaacaagatgctattgtgacagacactggtgctgggttgaggcttgggcactttcatgaactgttagtcgcagctgataagaagcaaaggggtatacagcaagtagtatcttttgacaagtaaacactgagtagaatagaggggtgggaaagttggataatttggcgagcaaccaaagattagttgaacacgttgcagccaaatatggttctcacgatcagcagacatttggccgtgccccatcatcgacaactacacgccgttgggcaaacacagcgcttcgtggcaaggcgctgtggggcccatctatgacccagtaggac

SEQ ID NO: 722118 - DNA, 837 bp, Homo sapiens
  misc_feature (3)..(3): n is a, c, g, or t
  misc_feature (87)..(87): n is a, c, g, or t
  misc_feature (97)..(97): n is a, c, g, or t
  misc_feature (210)..(210): n is a, c, g, or t
  misc_feature (237)..(237): n is a, c, g, or t
  misc_feature (239)..(239): n is a, c, g, or t
  misc_feature (253)..(254): n is a, c, g, or t
  misc_feature (262)..(263): n is a, c, g, or t
  misc_feature (265)..(265): n is a, c, g, or t
  misc_feature (275)..(275): n is a, c, g, or t
  misc_feature (287)..(287): n is a, c, g, or t
  misc_feature (294)..(294): n is a, c, g, or t
  misc_feature (303)..(303): n is a, c, g, or t
  misc_feature (307)..(307): n is a, c, g, or t
  misc_feature (312)..(312): n is a, c, g, or t
  misc_feature (316)..(317): n is a, c, g, or t
  misc_feature (324)..(324): n is a, c, g, or t
  misc_feature (336)..(336): n is a, c, g, or t
  misc_feature (339)..(339): n is a, c, g, or t
  misc_feature (394)..(394): n is a, c, g, or t
  misc_feature (417)..(417): n is a, c, g, or t
  misc_feature (433)..(433): n is a, c, g, or t
  misc_feature (437)..(437): n is a, c, g, or t
  misc_feature (439)..(439): n is a, c, g, or t
  misc_feature (458)..(458): n is a, c, g, or t
  misc_feature (465)..(465): n is a, c, g, or t
  misc_feature (480)..(480): n is a, c, g, or t
  misc_feature (485)..(485): n is a, c, g, or t
  misc_feature (490)..(490): n is a, c, g, or t
  misc_feature (492)..(492): n is a, c, g, or t
  misc_feature (497)..(497): n is a, c, g, or t
  misc_feature (536)..(536): n is a, c, g, or t
  misc_feature (554)..(554): n is a, c, g, or t
  misc_feature (585)..(585): n is a, c, g, or t
  misc_feature (597)..(597): n is a, c, g, or t
  misc_feature (645)..(645): n is a, c, g, or t
  misc_feature (810)..(810): n is a, c, g, or t
tgngctttgatgagcttccctgaatgagccaccagtgacaacatcatttctcttgaaaaatgcattgtgaattctatgcaacagtcntaacatggcntattagaaccttacccattaccagtggcaccttcccatgtttccaaagttatttatttctagtagcaatctgcatttcaataagacctaaataaccccaaactctcctatggnatcttttactaatatgaagcataattnanttaacttgaaaagnntaggtaanncntgtcgacaanactttcctaggnatttctntcccacggntcantatantccnntcccagnggcgcaagactntcntcttcactttctgctttgaggaatatcctcttggtcttgtcatataaagcatggntgtacagaatcatcttcagctcntgtgtggcatagcgcngggngnctctatcaaactgccgggngcgagtncatcccagcggggcnaaggnacgangntcgtnggggcacagaactaaatccgcacgggtgggcttccaggnctttccttcctgccagcngggctggtcactgtccactctttgaggaggnggtttgggaatnagagagcacttttgagaatgatccatagcttcaaccttcctgctaggnaacctgagcttttcaaatgttgactccacaaggtcataatataaaagtaatcccttcttttcccataagttcatcactttctgtaaaagttgctcttcatcctctgttgatcctgggctggtaattaaaaaatctacatcatgccccatcttcttaccctccggnaccctcctgtcatggtgacgaaagcat

SEQ ID NO: 722119 - DNA, 767 bp, Homo sapiens
  misc_feature (34)..(34): n is a, c, g, or t
  misc_feature (36)..(36): n is a, c, g, or t
  misc_feature (154)..(154): n is a, c, g, or t
  misc_feature (162)..(162): n is a, c, g, or t
  misc_feature (634)..(634): n is a, c, g, or t
  misc_feature (638)..(638): n is a, c, g, or t
  misc_feature (640)..(640): n is a, c, g, or t
  misc_feature (644)..(644): n is a, c, g, or t
  misc_feature (646)..(647): n is a, c, g, or t
  misc_feature (761)..(761): n is a, c, g, or t
gagatggagtctctctctgttgcccaggttggangncagtgacatggtcccgggtcactgcaacctccacctcctgggttcaagtgattcccttgcctcagcctcctgagtagctgggactacaggtgcatgccaccacgcctggctaattttngtattttnagtacagacggggttttaccatgttggccaggatggtctcgacctcccgaccccgtgatccacccaccttagcctcccaaagtgttgggattgcaggcatgagccaccatgcctggcccatttaacttctatattattttcctgttggtggatttaccagtgcaaactgagcagcttaaaacaccatccagttattatctgtttccatgagccaaggctctgggcagggtttaactgggtcttctattccgggtcacaatactgcaaccagagtgtcagctggggtctcatcagatgctcagtgtcctcttccaagcttattcagtttgtggactgaattcaatttcttgcaattgtagaacgaaggccctcagctcctagagctgccacctccaaagacagttcacagcatggccatttttgtctccttggaggctaagggttgaatctctgaaacttcacctttaaaagnctcncntgantnngtctggcacacctaagatcatcctgctttggatgaactcaaagtcagctgagccaatgtgcttaacaagcaagtgtgaccataatcacatttgcaaattccttccccttggccntatcac

SEQ ID NO: 722120 - DNA, 332 bp, Homo sapiens
  misc_feature (8)..(8): n is a, c, g, or t
agaccatnctgaccaatatggtgaaactccatctctactagaaatacaattagctgggtatggtggtgcacgcctgtagtctcagctacttgggaggctgagaaacaagaaatcgcttgggcccgggaggcggaggtggcagtgagccaagatcaggccactgcactctagcctgggcgacagagcgagactttgtctcaataaataaataaattcttgtaaatattcgatatgcacatatatattttgtttttactttattattattcatagttaatttgtctctgtgcatttgtccccatccttttgtgtgtgtttttgtttctgatcgc

SEQ ID NO: 722121 - DNA, 250 bp, Homo sapiens
  misc_feature (107)..(107): n is a, c, g, or t
  misc_feature (109)..(109): n is a, c, g, or t
  misc_feature (115)..(115): n is a, c, g, or t
  misc_feature (122)..(122): n is a, c, g, or t
  misc_feature (131)..(131): n is a, c, g, or t
  misc_feature (136)..(136): n is a, c, g, or t
  misc_feature (214)..(214): n is a, c, g, or t
tgaaatactatttaaagcctcctcatcccgtgttctccttttcctctctcccggagttggggtgggccggcttcatgccagctacttcctcctccccacttgtccgntnggacgnacctctngaggcgtcnagctncttcccatcgctgtcacaggcggttatgaaattcaccccctttcctggacactcagacctgaattctttttcatctgngaagtaaacagatgggcactttgaaggggcctcacc

SEQ ID NO: 722122 - DNA, 118 bp, Homo sapiens
tcccaacaaatgatggagagattcagaaccaagatggccctgacttaatccttgtttttaaagaaaggatatgtgcgcgaggatgtgtgcgcaggaagtgtgcgcgaggatgtgtgcg

SEQ ID NO: 722123 - DNA, 283 bp, Homo sapiens
  misc_feature (30)..(30): n is a, c, g, or t
tgggttaccacgtttatcgacagaggaagngcccctctagggcgatatggaaagcaaagttttaaaattttctctcctctgcaagaaaatatatttcagaaaatctctatctcaaaaatgaagcaattaagaactgtctggctgtgaggatctggcctcaacttgacttaaagcaacaacttcagttacatatcaagatgtgcgtgagaatgaacctgctctgctcagccaacgtgctgagtgacttgatgtttgtaataaataaataaataaacgggggggg

SEQ ID NO: 722124 - DNA, 104 bp, Homo sapiens
ttatctgaccatcaccaagacgctacttcccgcacttcgacctgagccacggctctgcccagagttaagggccactggctaagaatggtggccgactgcgcttg

SEQ ID NO: 722125 - DNA, 4185 bp, Homo sapiens
acactccctggggcaggcgctcacgcacgctacaaacacacactcctctttcctccctcgcgcgccctctctcatccttcttcacgaagcgctcactcgcaccctttctctctctctctctctctctctaacacgcacgcacactcccagttgttcacactcgggtcctctccagcccgacgttctcctggcacccacctgctccgcggcgccctgcgcgcccccctcggtcgcgccccttgcgctctcggcccagaccgtcgcagctacagggggcctcgagccccggggtgagcgtccccgtcccgctcctgctccttcccatagggacgcgcctgatgcctgggaccggccgctgagcccaaggggaccgaggaggccatggtaggagcgctcgcctgctgcggtgcccgctgaggccatgccggggccccggcgccccgctggctcccgcctgcgcctgctcctgctcctgctgctgccgccgctgctgctgctgctccggggcagccacgcgggcaacctgacggtagccgtggtactgccgctggccaatacctcgtacccctggtcgtgggcgcgcgtgggacccgccgtggagctggccctggcccaggtgaaggcgcgccccgacttgctgccgggctggacggtccgcacggtgctgggcagcagcgaaaacgcgctgggcgtctgctccgacaccgcagcgcccctggccgcggtggacctcaagtgggagcacaaccccgctgtgttcctgggccccggctgcgtgtacgccgccgccccagtggggcgcttcaccgcgcactggcgggtcccgctgctgaccgccggcgccccggcgctgggcttcggtgtcaaggacgagtatgcgctgaccacccgcgcggggcccagctacgccaagctgggggacttcgtggcggcgctgcaccgacggctgggctgggagcgccaagcgctcatgctctacgcctaccggccgggtgacgaagagcactgcttcttcctcgtggaggggctgttcatgcgggtccgcgaccgcctcaatattacggtggaccacctggagttcgccgaggacgacctcagccactacaccaggctgctgcggaccatgccgcgcaaaggccgagttatctacatctgcagctcccctgatgccttcagaaccctcatgctcctggccctggaagctggcttgtgtggggaggactacgttttcttccacctggatatctttgggcaaagcctgcaaggtggacagggccctgctccccgcaggccctgggagagaggggatgggcaggatgtcagtgcccgccaggcctttcaggctgccaaaatcattacatataaagacccagataatcccgagtacttggaattcctgaagcagttaaaacacctggcctatgagcagttcaacttcaccatggaggatggcctggtgaacaccatcccagcatccttccacgacgggctcctgctctatatccaggcagtgacggagactctggcacatgggggaactgttactgatggggagaacatcactcagcggatgtggaaccgaagctttcaaggtgtgacaggatacctgaaaattgatagcagtggcgatcgggaaacagacttctccctctgggatatggatcccgagaatggtgccttcagggttgtactgaactacaatgggacttcccaagagctggtggctgtgtcggggcgcaaactgaactggcccctggggtaccctcctcctgacatccccaaatgtggctttgacaacgaagacccagcatgcaaccaagatcacctttccaccctggaggtgctggctttggtgggcagcctctccttgctcggcattctgattgtctccttcttcatatacaggaagatgcagctggagaaggaactggcctcggagctgtggcgggtgcgctgggaggacgttgagcccagtagccttgagaggcacctgcggagtgcaggcagccggctgaccctgagcgggagaggctccaattacggctccctgctaaccacagagggccagttccaagtctttgccaagacagcatattataagggcaacctcgtggctgtgaaacgtgtgaaccgtaaacgcattgagctgacacgaaaagtcctgtttgaactgaagcatatgcgggatgtgcagaatgaacacctgaccaggtttgtgggagcctgcaccgacccccccaatatctgcatcctcacagagtactgtccccgtgggagcctgcaggacattctggagaatgagagcatcaccctggactggatgttccggtactcactcaccaatgacatcgtcaagggcatgctgtttctacacaatggggctatctgttcccatgggaacctcaagtcatccaactgcgtggtagatgggcgctttgtgctcaagatcaccgactatgggctggagagcttcagggacctggacccagagcaaggacacaccgtttatgccaaaaagctgtggacggcccctgagctcctgcgaatggcttcaccccctgtgcggggctcccaggctggtgacgtatacagctttgggatcatccttcaggagattgccctgaggagtggggtcttccacgtggaaggtttggacctgagccccaaagagatcatcgagcgggtgactcggggtgagcagccccccttccggccctccctggccctgcagagtcacctggaggagttggggctgctcatgcagcggtgctgggctgaggacccacaggagaggccaccattccagcagatccgcctgacgttgcgcaaatttaacagggagaacagcagcaacatcctggacaacctgctgtcccgcatggagcagtacgcgaacaatctggaggaactggtggaggagcggacccaggcatacctggaggagaagcgcaaggctgaggccctgctctaccagatcctgcctcactcagtggctgagcagctgaagcgtggggagacggtgcaggccgaagcctttgacagtgttaccatctacttcagtgacattgtgggtttcacagcgctgtcggcggagagcacacccatgcaggtggtgaccctgctcaatgacctgtacacttgctttgatgctgtcatagacaactttgatgtgtacaaggtggagacaattggcgatgcctacatggtggtgtcagggctccctgtgcggaacgggcggctacacgcctgcgaggtagcccgcatggccctggcactgctggatgctgtgcgctccttccgaatccgccaccggccccaggagcagctgcgcttgcgcattggcatccacacaggacctgtgtgtgctggagtggtgggactgaagatgccccgttactgtctctttggggatacagtcaacacagcctcaagaatggagtctaatggggaagccctgaagatccacttgtcttctgagaccaaggctgtcctggaggagtttggtggtttcgagctggagcttcgaggggatgtagaaatgaagggcaaaggcaaggttcggacctactggctccttggggagagggggagtagcacccgaggctgacctgcctcctctcctatccctccacacctccctaccctgtgccagaagcaacagaggtgccaggcctcagcctcacccacagcagccccatcgccaaaggatggaagtaatttgaatagctcaggtgtgctgaccccagtgaagacaccagataggacctctgagaggggactggcatggggggatctcagagcttacaggctgagccaagcccacggccatgcacagggacactcacacaggcacacgcacctgctctccacctggactcaggccgggctgggctgtggattcctgatcccctcccctccccatgctctcctccctcagccttgctaccctgtgacttactgggaggagaaagagtcacctgaaggggaacatgaaaagagactaggtgaagagagggcaggggagcccacatctggggctggcccacaatacctgctcccccgaccccctccacccagcagtagacacagtgcacaggggagaagaggggtggcgcagaagggttgggggcctgtatgccttgcttctaccatgagcagagacaattaaaatctttattccagtga

SEQ ID NO: 722126 - DNA, 418 bp, Homo sapiens
  misc_feature (35)..(35): n is a, c, g, or t
  misc_feature (53)..(53): n is a, c, g, or t
  misc_feature (85)..(85): n is a, c, g, or t
  misc_feature (94)..(94): n is a, c, g, or t
  misc_feature (106)..(106): n is a, c, g, or t
  misc_feature (128)..(128): n is a, c, g, or t
  misc_feature (132)..(132): n is a, c, g, or t
  misc_feature (145)..(145): n is a, c, g, or t
  misc_feature (154)..(154): n is a, c, g, or t
  misc_feature (222)..(222): n is a, c, g, or t
  misc_feature (411)..(411): n is a, c, g, or t
ccaagttccctcccctcggggtttgccccttgaanaccgtggttgccgttttntggggcccccgtggccctcctcccctgttaanggcctccanagggccctgccntccgggaagggtgaaccagccncccnggctgctgccganagggttccncgttggggtccccaaagtgtgcccggctgctatgaaaaacgttgggaatcttggtttcagttttttantctatgctaggttgtacagacttatttatatcatcgttttgagggactaatggaggcttattgtaacatataatattagtgaaaccatggaattatatgaaaatgatacatgagaaataaggaaactattttgctgattgtaaatttttgtgggaaattttgtgataacttgagaattatacttgtttnaatcaaa

SEQ ID NO: 722127 - DNA, 342 bp, Homo sapiens
agtgatgctgcaggctacctagagtatcccaatcgccacgacaaggagcaactgcgcttgcgcattggcatccacacaggacctgtgtgtgctggagtggtgggactgaagatgccccgttactgtctctttggggatacagtcaacacagcctcaagaatggagtctaatggggaagccctgaagatccacttgtcttctgagaccaaggctgtcctggaggagtttggtggtttcgagctggagcttcgaggggatgtagaaatgaagggcaaaggcaaggttcggacctactgctccttgtcgtgcgattgggatactctaggtcacctcagcatcacc

SEQ ID NO: 722128 - DNA, 4216 bp, Homo sapiens
acactccctggggcaggcgctcacgcacgctacaaacacacactcctctttcctccctcgcgcgccctctctcatccttcttcacgaagcgctcactcgcaccctttctctctctctctctctctctctaacacgcacgcacactcccagttgttcacactcgggtcctctccagcccgacgttctcctggcacccacctgctccgcggcgccctgcgcgcccccctcggtcgcgccccttgcgctctcggcccagaccgtcgcagctacagggggcctcgagccccggggtgagcgtccccgtcccgctcctgctccttcccatagggacgcgcctgatgcctgggaccggccgctgagcccaaggggaccgaggaggccatggtaggagcgctcgcctgctgcggtgcccgctgaggccatgccggggccccggcgccccgctggctcccgcctgcgcctgctcctgctcctgctgctgccgccgctgctgctgctgctccggggcagccacgcgggcaacctgacggtagccgtggtactgccgctggccaatacctcgtacccctggtcgtgggcgcgcgtgggacccgccgtggagctggccctggcccaggtgaaggcgcgccccgacttgctgccgggctggacggtccgcacggtgctgggcagcagcgaaaacgcgctgggcgtctgctccgacaccgcagcgcccctggccgcggtggacctcaagtgggagcacaaccccgctgtgttcctgggccccggctgcgtgtacgccgccgccccagtggggcgcttcaccgcgcactggcgggtcccgctgctgaccgccggcgccccggcgctgggcttcggtgtcaaggacgagtatgcgctgaccacccgcgcggggcccagctacgccaagctgggggacttcgtggcggcgctgcaccgacggctgggctgggagcgccaagcgctcatgctctacgcctaccggccgggtgacgaagagcactgcttcttcctcgtggaggggctgttcatgcgggtccgcgaccgcctcaatattacggtggaccacctggagttcgccgaggacgacctcagccactacaccaggctgctgcggaccatgccgcgcaaaggccgagttatctacatctgcagctcccctgatgccttcagaaccctcatgctcctggccctggaagctggcttgtgtggggaggactacgttttcttccacctggatatctttgggcaaagcctgcaaggtggacagggccctgctccccgcaggccctgggagagaggggatgggcaggatgtcagtgcccgccaggcctttcaggctgccaaaatcattacatataaagacccagataatcccgagtacttggaattcctgaagcagttaaaacacctggcctatgagcagttcaacttcaccatggaggatggcctggtgaacaccatcccagcatccttccacgacgggctcctgctctatatccaggcagtgacggagactctggcacatgggggaactgttactgatggggagaacatcactcagcggatgtggaaccgaagctttcaaggtgtgacaggatacctgaaaattgatagcagtggcgatcgggaaacagacttctccctctgggatatggatcccgagaatggtgccttcagggttgtactgaactacaatgggacttcccaagagctggtggctgtgtcggggcgcaaactgaactggcccctggggtaccctcctcctgacatccccaaatgtggctttgacaacgaagacccagcatgcaaccaagatcacctttccaccctggaggtgctggctttggtgggcagcctctccttgctcggcattctgattgtctccttcttcatatacaggaagatgcagctggagaaggaactggcctcggagctgtggcgggtgcgctgggaggacgttgagcccagtagccttgagaggcacctgcggagtgcaggcagccggctgaccctgagcgggagaggctccaattacggctccctgctaaccacagagggccagttccaagtctttgccaagacagcatattataagggcaacctcgtggctgtgaaacgtgtgaaccgtaaacgcattgagctgacacgaaaagtcctgtttgaactgaagcatatgcgggatgtgcagaatgaacacctgaccaggtttgtgggagcctgcaccgacccccccaatatctgcatcctcacagagtactgtccccgtgggagcctgcaggacattctggagaatgagagcatcaccctggactggatgttccggtactcactcaccaatgacatcgtcaagggcatgctgtttctacacaatggggctatctgttcccatgggaacctcaagtcatccaactgcgtggtagatgggcgctttgtgctcaagatcaccgactatgggctggagagcttcagggacctggacccagagcaaggacacaccgtttatgccaaaaagctgtggacggcccctgagctcctgcgaatggcttcaccccctgtgcggggctcccaggctggtgacgtatacagctttgggatcatccttcaggagattgccctgaggagtggggtcttccacgtggaaggtttggacctgagccccaaagagatcatcgagcgggtgactcggggtgagcagccccccttccggccctccctggccctgcagagtcacctggaggagttggggctgctcatgcagcggtgctgggctgaggacccacaggagaggccaccattccagcagatccgcctgacgttgcgcaaatttaacagggagaacagcagcaacatcctggacaacctgctgtcccgcatggagcagtacgcgaacaatctggaggaactggtggaggagcggacccaggcatacctggaggagaagcgcaaggctgaggccctgctctaccagatcctgcctcactcagtggctgagcagctgaagcgtggggagacggtgcaggccgaagcctttgacagtgttaccatctacttcagtgacattgtgggtttcacagcgctgtcggcggagagcacacccatgcaggtggtgaccctgctcaatgacctgtacacttgctttgatgctgtcatagacaactttgatgtgtacaaggtggagacaattggcgatgcctacatggtggtgtcagggctccctgtgcggaacgggcggctacacgcctgcgaggtagcccgcatggccctggcactgctggatgctgtgcgctccttccgaatccgccaccggccccaggagcagctgcgcttgcgcattggcatccacacaggacctgtgtgtgctggagtggtgggactgaagatgccccgttactgtctctttggggatacagtcaacacagcctcaagaatggagtctaatggggaagccctgaagatccacttgtcttctgagaccaaggctgtcctggaggagtttggtggtttcgagctggagcttcgaggggatgtagaaatgaagggcaaaggcaaggttcggacctactggctccttggggagagggggagtagcacccgaggctgacctgcctcctctcctatccctccacacctccctaccctgtgccagaagcaacagaggtgccaggcctcagcctcacccacagcagccccatcgccaaaggatggaagtaatttgaatagctcaggtgtgctgaccccagtgaagacaccagataggacctctgagaggggactggcatggggggatctcagagcttacaggctgagccaagcccacggccatgcacagggacactcacacaggcacacgcacctgctctccacctggactcaggccgggctgggctgtggattcctgatcccctcccctccccatgctctcctccctcagccttgctaccctgtgacttactgggaggagaaagagtcacctgaaggggaacatgaaaagagactaggtgaagagagggcaggggagcccacatctggggctggcccacaatacctgctcccccgaccccctccacccagcagtagacacagtgcacaggggagaagaggggtggcgcagaagggttgggggcctgtatgccttgcttctaccatgagcagagacaattaaaatctttattccagtgaaaaaaaaggaaacaagaaagaaacaaaaggg

SEQ ID NO: 722129 - DNA, 529 bp, Homo sapiens
aattataaaatcaatattcttaaattatatgggcataaatctacttagaaacccagatacctatttcttatggctcagaaagtacaagaaagggtgccaaataaagaaactaaaataagaatccattcatatattaactaagcatataaatcctaggaaatctgtgacaccctgaaatgtgccagtgtacggggcgcagagacaagatagaatcatagtccataatctaaagggagctatatgcggtatggacatccaaacatatagtagagatttatttttacctttcccttcctatcacataaaatgcttctagaattaaaggcgtgtaagagatcccagggttccctaaggaaaaactatgtccccgggaggacattctgtaaagacatgtgaatggttcaatactcagactttcaattaactgtatccaggatcccatacacaagggatgctggcatggacgacacactacggaaagagctttaagtataacagagtgacatttagtgctgatcacactcatcag

SEQ ID NO: 722130 - DNA, 781 bp, Homo sapiens
agtctcctttacattgacaggtcctggagggtagtggtgttgaatttaattagtgcaagctacgttaatttgacaagaatccagatcaaactgctatataaacagggaattgcttgcaggaacttcttagtgattaggctggagaagtcgaagagctgaactaaaagatatgctgcagatagtactttttctatttgccccccttataatttgaatggcccagatgaaagagcctgtttttctttaagcaatagtatccttgtggaaagtccttgaaagaacatgttctacgacactgaaacagtctaattagagcatgaatataacaatgatgtcaagatgctgctagattgcaaagaaggcagtttccatttcatggtgaaatatggcaggtaattgttttcgtggcagtgtagcatgagtcccagtttgggaactctgtgtccattacacgtttccttgcagagaaatatcattaatgtgtgatacttactagaatagtgtatcatttgctcaacagaggtagtcatttgaaatgcatattatcaagggcagtggcccattaagtttttacaaaaggattaaggggttatatgagtacccaaaggtgaacagtaagataaaaccaaaggttcccaaatcttatgcctattagtatatgggaatgaaatgatacattcttaatcatgcgagtaggatattcatatttaaaaagaaattcagttagaataaaagtcatcatcaaatgcaagatggggaacaaatgaagagatgtggaaaa

SEQ ID NO: 722131 - DNA, 3616 bp, Homo sapiens
acactccctggggcaggcgctcacgcacgctacaaacacacactcctctttcctccctcgcgcgccctctctcatccttcttcacgaagcgctcactcgcaccctttctctctctctctctctctctctaacacgcacgcacactcccagttgttcacactcgggtcctctccagcccgacgttctcctggcacccacctgctccgcggcgccctgcgcgcccccctcggtcgcgccccttgcgctctcggcccagaccgtcgcagctacagggggcctcgagccccggggtgagcgtccccgtcccgctcctgctccttcccatagggacgcgcctgatgcctgggaccggccgctgagcccaaggggaccgaggaggccatggtaggagcgctcgcctgctgcggtgcccgctgaggccatgccggggccccggcgccccgctggctcccgcctgcgcctgctcctgctcctgctgctgccgccgctgctgctgctgctccggggcagccacgcgggcaacctgacggtagccgtggtactgccgctggccaatacctcgtacccctggtcgtgggcgcgcgtgggacccgccgtggagctggccctggcccaggtgaaggcgcgccccgacttgctgccgggctggacggtccgcacggtgctgggcagcagcgaaaacgcgctgggcgtctgctccgacaccgcagcgcccctggccgcggtggacctcaagtgggagcacaaccccgctgtgttcctgggccccggctgcgtgtacgccgccgccccagtggggcgcttcaccgcgcactggcgggtcccgctgctgaccgccggcgccccggcgctgggcttcggtgtcaaggacgagtatgcgctgaccacccgcgcggggcccagctacgccaagctgggggacttcgtggcggcgctgcaccgacggctgggctgggagcgccaagcgctcatgctctacgcctaccggccgggtgacgaagagcactgcttcttcctcgtggaggggctgttcatgcgggtccgcgaccgcctcaatattacggtggaccacctggagttcgccgaggacgacctcagccactacaccaggctgctgcggaccatgccgcgcaaaggccgagttatctacatctgcagctcccctgatgccttcagaaccctcatgctcctggccctggaagctggcttgtgtggggaggactacgttttcttccacctggatatctttgggcaaagcctgcaaggtggacagggccctgctccccgcaggccctgggagagaggggatgggcaggatgtcagtgcccgccaggcctttcaggctgccaaaatcattacatataaagacccagataatcccgagtacttggaattcctgaagcagttaaaacacctggcctatgagcagttcaacttcaccatggaggatggcctggtgaacaccatcccagcatccttccacgacgggctcctgctctatatccaggcagtgacggagactctggcacatgggggaactgttactgatggggagaacatcactcagcggatgtggaaccgaagctttcaaggtgtgacaggatacctgaaaattgatagcagtggcgatcgggaaacagacttctccctctgggatatggatcccgagaatggtgccttcagggttgtactgaactacaatgggacttcccaagagctggtggctgtgtcggggcgcaaactgaactggcccctggggtaccctcctcctgacatccccaaatgtggctttgacaacgaagacccagcatgcaaccaagatcacctttccaccctggaggtgctggctttggtgggcagcctctccttgctcggcattctgattgtctccttcttcatatacaggaagatgcagctggagaaggaactggcctcggagctgtggcgggtgcgctgggaggacgttgagcccagtagccttgagaggcacctgcggagtgcaggcagccggctgaccctgagcgggagaggctccaattacggctccctgctaaccacagagggccagttccaagtctttgccaagacagcatattataagggcaacctcgtggctgtgaaacgtgtgaaccgtaaacgcattgagctgacacgaaaagtcctgtttgaactgaagcatatgcgggatgtgcagaatgaacacctgaccaggtttgtgggagcctgcaccgacccccccaatatctgcatcctcacagagtactgtccccgtgggagcctgcaggacattctggagaatgagagcatcaccctggactggatgttccggtactcactcaccaatgacatcgtcaagggcatgctgtttctacacaatggggctatctgttcccatgggaacctcaagtcatccaactgcgtggtagatgggcgctttgtgctcaagatcaccgactatgggctggagagcttcagggacctggacccagagcaaggacacaccgtttatgccaaaaagctgtggacggcccctgagctcctgcgaatggcttcaccccctgtgcggggctcccaggctggtgacgtatacagctttgggatcatccttcaggagattgccctgaggagtggggtcttccacgtggaaggtttggacctgagccccaaagagatcatcgagcgggtgactcggggtgagcagccccccttccggccctccctggccctgcagagtcacctggaggagttggggctgctcatgcagcggtgctgggctgaggacccacaggagaggccaccattccagcagatccgcctgacgttgcgcaaatttaacagggagaacagcagcaacatcctggacaacctgctgtcccgcatggagcagtacgcgaacaatctggaggaactggtggaggagcggacccaggcatacctggaggagaagcgcaaggctgaggccctgctctaccagatcctgcctcactcagtggctgagcagctgaagcgtggggagacggtgcaggccgaagcctttgacagtgttaccatctacttcagtgacattgtgggtttcacagcgctgtcggcggagagcacacccatgcaggtggtgaccctgctcaatgacctgtacacttgctttgatgctgtcatagacaactttgatgtgtacaaggtggagacaattggcgatgcctacatggtggtgtcagggctccctgtgcggaacgggcggctacacgcctgcgaggtagcccgcatggccctggcactgctggatgctgtgcgctccttccgaatccgccaccggccccaggagcagctgcgcttgcgcattggcatccacacaggacctgtgtgtgctggagtggtgggactgaagatgccccgttactgtctctttggggatacagtcaacacagcctcaagaatggagtctaatggggaagccctgaagatccacttgtcttctgagaccaaggctgtcctggaggagtttggtggtttcgagctggagcttcgaggggatgtagaaatgaagggcaaaggcaaggttcggacctactgctccttgtcgtgcgattgggatactctaggtcacctcagcatcacc

SEQ ID NO: 722132 - DNA, 424 bp, Homo sapiens
cagctgttgagataaaaaaattcgttgtcatttattcccaaggacagctgtttgtcatttgcattgaaaaagtctccattcaaactgctgtcacatataaaatctatttatataagtctgtatttttctgttgtcttggcctttgtgggcagtagtgtgttttaaccaagcaaactgtccttccaaataatgaagccgaagtcagcctgcctgcttgccatttttcttccccttccatttttctaacctcaggatagttgtaagaatgaattaagatttgtgtttaaggccgggcacagtgtctcaggcctgtaatcccagcactttgggaggcggagacggatgtatcacttgagctcaggagtccaagaccagcctgggcaacatactgagactccgtcttgtataattaaattaaaattta

SEQ ID NO: 722133 - DNA, 911 bp, Homo sapiens
agtgatgctgcaggctacctagagtatcccaatcgccacgacaaggagcaactgcgcttgcgcattggcatccacacaggacctgtgtgtgctggagtggtgggactgaagatgccccgttactgtctctttggggatacagtcaacacagcctcaagaatggagtctaatggggaagccctgaagatccacttgtcttctgagaccaaggctgtcctggaggagtttggtggtttcgagctggagcttcgaggggatgtagaaatgaagggcaaaggcaaggttcggacctactggctccttggggagagggggagtagcacccgaggctgacctgcctcctctcctatccctccacacctccctaccctgtgccagaagcaacagaggtgccaggcctcagcctcacccacagcagccccatcgccaaaggatggaagtaatttgaatagctcaggtgtgctgaccccagtgaagacaccagataggacctctgagaggggactggcatggggggatctcagagcttacaggctgagccaagcccacggccatgcacagggacactcacacaggcacacgcacctgctctccacctggactcaggccgggctgggctgtggattcctgatcccctcccctccccatgctctcctccctcagccttgctaccctgtgacttactgggaggagaaagagtcacctgaaggggaacatgaaaagagactaggtgaagagagggcaggggagcccacatctggggctggcccacaatacctgctcccccgaccccctccacccagcagtagacacagtgcacaggggagaagaggggtggcgcagaagggttgggggcctgtatgccttgcttctaccatgagcagagacaattaaaatctttattccagtga

SEQ ID NO: 722134 - DNA, 3599 bp, Homo sapiens
  misc_feature (3575)..(3575): n is a, c, g, or t
acactccctggggcaggcgctcacgcacgctacaaacacacactcctctttcctccctcgcgcgccctctctcatccttcttcacgaagcgctcactcgcaccctttctctctctctctctctctctctaacacgcacgcacactcccagttgttcacactcgggtcctctccagcccgacgttctcctggcacccacctgctccgcggcgccctgcgcgcccccctcggtcgcgccccttgcgctctcggcccagaccgtcgcagctacagggggcctcgagccccggggtgagcgtccccgtcccgctcctgctccttcccatagggacgcgcctgatgcctgggaccggccgctgagcccaaggggaccgaggaggccatggtaggagcgctcgcctgctgcggtgcccgctgaggccatgccggggccccggcgccccgctggctcccgcctgcgcctgctcctgctcctgctgctgccgccgctgctgctgctgctccggggcagccacgcgggcaacctgacggtagccgtggtactgccgctggccaatacctcgtacccctggtcgtgggcgcgcgtgggacccgccgtggagctggccctggcccaggtgaaggcgcgccccgacttgctgccgggctggacggtccgcacggtgctgggcagcagcgaaaacgcgctgggcgtctgctccgacaccgcagcgcccctggccgcggtggacctcaagtgggagcacaaccccgctgtgttcctgggccccggctgcgtgtacgccgccgccccagtggggcgcttcaccgcgcactggcgggtcccgctgctgaccgccggcgccccggcgctgggcttcggtgtcaaggacgagtatgcgctgaccacccgcgcggggcccagctacgccaagctgggggacttcgtggcggcgctgcaccgacggctgggctgggagcgccaagcgctcatgctctacgcctaccggccgggtgacgaagagcactgcttcttcctcgtggaggggctgttcatgcgggtccgcgaccgcctcaatattacggtggaccacctggagttcgccgaggacgacctcagccactacaccaggctgctgcggaccatgccgcgcaaaggccgagttatctacatctgcagctcccctgatgccttcagaaccctcatgctcctggccctggaagctggcttgtgtggggaggactacgttttcttccacctggatatctttgggcaaagcctgcaaggtggacagggccctgctccccgcaggccctgggagagaggggatgggcaggatgtcagtgcccgccaggcctttcaggctgccaaaatcattacatataaagacccagataatcccgagtacttggaattcctgaagcagttaaaacacctggcctatgagcagttcaacttcaccatggaggatggcctggtgaacaccatcccagcatccttccacgacgggctcctgctctatatccaggcagtgacggagactctggcacatgggggaactgttactgatggggagaacatcactcagcggatgtggaaccgaagctttcaaggtgtgacaggatacctgaaaattgatagcagtggcgatcgggaaacagacttctccctctgggatatggatcccgagaatggtgccttcagggttgtactgaactacaatgggacttcccaagagctggtggctgtgtcggggcgcaaactgaactggcccctggggtaccctcctcctgacatccccaaatgtggctttgacaacgaagacccagcatgcaaccaagatcacctttccaccctggaggtgctggctttggtgggcagcctctccttgctcggcattctgattgtctccttcttcatatacaggaagatgcagctggagaaggaactggcctcggagctgtggcgggtgcgctgggaggacgttgagcccagtagccttgagaggcacctgcggagtgcaggcagccggctgaccctgagcgggagaggctccaattacggctccctgctaaccacagagggccagttccaagtctttgccaagacagcatattataagggcaacctcgtggctgtgaaacgtgtgaaccgtaaacgcattgagctgacacgaaaagtcctgtttgaactgaagcatatgcgggatgtgcagaatgaacacctgaccaggtttgtgggagcctgcaccgacccccccaatatctgcatcctcacagagtactgtccccgtgggagcctgcaggacattctggagaatgagagcatcaccctggactggatgttccggtactcactcaccaatgacatcgtcaagggcatgctgtttctacacaatggggctatctgttcccatgggaacctcaagtcatccaactgcgtggtagatgggcgctttgtgctcaagatcaccgactatgggctggagagcttcagggacctggacccagagcaaggacacaccgtttatgccaaaaagctgtggacggcccctgagctcctgcgaatggcttcaccccctgtgcggggctcccaggctggtgacgtatacagctttgggatcatccttcaggagattgccctgaggagtggggtcttccacgtggaaggtttggacctgagccccaaagagatcatcgagcgggtgactcggggtgagcagccccccttccggccctccctggccctgcagagtcacctggaggagttggggctgctcatgcagcggtgctgggctgaggacccacaggagaggccaccattccagcagatccgcctgacgttgcgcaaatttaacagggagaacagcagcaacatcctggacaacctgctgtcccgcatggagcagtacgcgaacaatctggaggaactggtggaggagcggacccaggcatacctggaggagaagcgcaaggctgaggccctgctctaccagatcctgcctcactcagtggctgagcagctgaagcgtggggagacggtgcaggccgaagcctttgacagtgttaccatctacttcagtgacattgtgggtttcacagcgctgtcggcggagagcacacccatgcaggtggtgaccctgctcaatgacctgtacacttgctttgatgctgtcatagacaactttgatgtgtacaaggtggagacaattggcgatgcctacatggtggtgtcagggctccctgtgcggaacgggcggctacacgcctgcgaggtagcccgcatggccctggcactgctggatgctgtgcgctccttccgaatccgccaccggccccaggagcagctgcgcttgcgcattggcatccacacaggacctgtgtgtgctggagtggtgggactgaagatgccccgttactgtctctttggggatacagtcaacacagcctcaagaatggagtctaatggggaagccctgaagatccacttgtcttctgagaccaaggctgtcctggaggagtttggtggtttcgagctggagcttcgaggggatgtagaaatgaagggcaaaggcaaggttcggacctactgctgcntgtctgcgattggtaatccagggt

SEQ ID NO: 722135 - DNA, 887 bp, Homo sapiens
ctgaggttcccgccacgacaagagcagctgcgcttgcgcattggcatccacacaggacctgtgtgtgctggagtggtgggactgaagatgccccgttactgtctctttggggatacagtcaacacagcctcaagaatggagtctaatggggaagccctgaagatccacttgtcttctgagaccaaggctgtcctggaggagtttggtggtttcgagctggagcttcgaggggatgtagaaatgaagggcaaaggcaaggttcggacctactggctccttggggagagggggagtagcacccgaggctgacctgcctcctctcctatccctccacacctccctaccctgtgccagaagcaacagaggtgccaggcctcagcctcacccacagcagccccatcgccaaaggatggaagtaatttgaatagctcaggtgtgctgaccccagtgaagacaccagataggacctctgagaggggactggcatggggggatctcagagcttacaggctgagccaagcccacggccatgcacagggacactcacacaggcacacgcacctgctctccacctggactcaggccgggctgggctgtggattcctgatcccctcccctccccatgctctcctccctcagccttgctaccctgtgacttactgggaggagaaagagtcacctgaaggggaacatgaaaagagactaggtgaagagagggcaggggagcccacatctggggctggcccacaatacctgctcccccgaccccctccacccagcagtagacacagtgcacaggggagaagaggggtggcgcagaagggttgggggcctgtatgccttgcttctaccatgagcagagacaattaaaatctttattccagtga

SEQ ID NO: 722136 - DNA, 235 bp, Homo sapiens
tgttttaaccccctgggtcaccagaactacaagcgcacaccataacattccatccatctccggataactaacaaacacagaatctccccaagcaagtttcaaactcctattcctgatgatctggttgcatccgccttaacccatcatgtagacccaaccgtaagcagttcgtgcccgccaaccctgccctccccgggactcgatgagaatacagggtctttcccacacattcggg

SEQ ID NO: 722137 - DNA, 4333 bp, Homo sapiens
  misc_feature (3569)..(3569): n is a, c, g, or t
  misc_feature (3597)..(3597): n is a, c, g, or t
  misc_feature (3649)..(3650): n is a, c, g, or t
  misc_feature (3655)..(3655): n is a, c, g, or t
  misc_feature (3658)..(3658): n is a, c, g, or t
acactccctggggcaggcgctcacgcacgctacaaacacacactcctctttcctccctcgcgcgccctctctcatccttcttcacgaagcgctcactcgcaccctttctctctctctctctctctctctaacacgcacgcacactcccagttgttcacactcgggtcctctccagcccgacgttctcctggcacccacctgctccgcggcgccctgcgcgcccccctcggtcgcgccccttgcgctctcggcccagaccgtcgcagctacagggggcctcgagccccggggtgagcgtccccgtcccgctcctgctccttcccatagggacgcgcctgatgcctgggaccggccgctgagcccaaggggaccgaggaggccatggtaggagcgctcgcctgctgcggtgcccgctgaggccatgccggggccccggcgccccgctggctcccgcctgcgcctgctcctgctcctgctgctgccgccgctgctgctgctgctccggggcagccacgcgggcaacctgacggtagccgtggtactgccgctggccaatacctcgtacccctggtcgtgggcgcgcgtgggacccgccgtggagctggccctggcccaggtgaaggcgcgccccgacttgctgccgggctggacggtccgcacggtgctgggcagcagcgaaaacgcgctgggcgtctgctccgacaccgcagcgcccctggccgcggtggacctcaagtgggagcacaaccccgctgtgttcctgggccccggctgcgtgtacgccgccgccccagtggggcgcttcaccgcgcactggcgggtcccgctgctgaccgccggcgccccggcgctgggcttcggtgtcaaggacgagtatgcgctgaccacccgcgcggggcccagctacgccaagctgggggacttcgtggcggcgctgcaccgacggctgggctgggagcgccaagcgctcatgctctacgcctaccggccgggtgacgaagagcactgcttcttcctcgtggaggggctgttcatgcgggtccgcgaccgcctcaatattacggtggaccacctggagttcgccgaggacgacctcagccactacaccaggctgctgcggaccatgccgcgcaaaggccgagttatctacatctgcagctcccctgatgccttcagaaccctcatgctcctggccctggaagctggcttgtgtggggaggactacgttttcttccacctggatatctttgggcaaagcctgcaaggtggacagggccctgctccccgcaggccctgggagagaggggatgggcaggatgtcagtgcccgccaggcctttcaggctgccaaaatcattacatataaagacccagataatcccgagtacttggaattcctgaagcagttaaaacacctggcctatgagcagttcaacttcaccatggaggatggcctggtgaacaccatcccagcatccttccacgacgggctcctgctctatatccaggcagtgacggagactctggcacatgggggaactgttactgatggggagaacatcactcagcggatgtggaaccgaagctttcaaggtgtgacaggatacctgaaaattgatagcagtggcgatcgggaaacagacttctccctctgggatatggatcccgagaatggtgccttcagggttgtactgaactacaatgggacttcccaagagctggtggctgtgtcggggcgcaaactgaactggcccctggggtaccctcctcctgacatccccaaatgtggctttgacaacgaagacccagcatgcaaccaagatcacctttccaccctggaggtgctggctttggtgggcagcctctccttgctcggcattctgattgtctccttcttcatatacaggaagatgcagctggagaaggaactggcctcggagctgtggcgggtgcgctgggaggacgttgagcccagtagccttgagaggcacctgcggagtgcaggcagccggctgaccctgagcgggagaggctccaattacggctccctgctaaccacagagggccagttccaagtctttgccaagacagcatattataagggcaacctcgtggctgtgaaacgtgtgaaccgtaaacgcattgagctgacacgaaaagtcctgtttgaactgaagcatatgcgggatgtgcagaatgaacacctgaccaggtttgtgggagcctgcaccgacccccccaatatctgcatcctcacagagtactgtccccgtgggagcctgcaggacattctggagaatgagagcatcaccctggactggatgttccggtactcactcaccaatgacatcgtcaagggcatgctgtttctacacaatggggctatctgttcccatgggaacctcaagtcatccaactgcgtggtagatgggcgctttgtgctcaagatcaccgactatgggctggagagcttcagggacctggacccagagcaaggacacaccgtttatgccaaaaagctgtggacggcccctgagctcctgcgaatggcttcaccccctgtgcggggctcccaggctggtgacgtatacagctttgggatcatccttcaggagattgccctgaggagtggggtcttccacgtggaaggtttggacctgagccccaaagagatcatcgagcgggtgactcggggtgagcagccccccttccggccctccctggccctgcagagtcacctggaggagttggggctgctcatgcagcggtgctgggctgaggacccacaggagaggccaccattccagcagatccgcctgacgttgcgcaaatttaacagggagaacagcagcaacatcctggacaacctgctgtcccgcatggagcagtacgcgaacaatctggaggaactggtggaggagcggacccaggcatacctggaggagaagcgcaaggctgaggccctgctctaccagatcctgcctcactcagtggctgagcagctgaagcgtggggagacggtgcaggccgaagcctttgacagtgttaccatctacttcagtgacattgtgggtttcacagcgctgtcggcggagagcacacccatgcaggtggtgaccctgctcaatgacctgtacacttgctttgatgctgtcatagacaactttgatgtgtacaaggtggagacaattggcgatgcctacatggtggtgtcagggctccctgtgcggaacgggcggctacacgcctgcgaggtagcccgcatggccctggcactgctggatgctgtgcgctccttccgaatccgccaccggccccaggagcagctgcgcttgcgcattggcatccacacaggacctgtgtgtgctggagtggtgggactgaagatgccccgttactgtctctttggggatacagtcaacacagcctcaagaatggagtctaatggggaagccctgaagatccacttgtcttctgagaccaaggctgtcctggaggagtttggtggtttcgagctggagcttcgaggggatgtagaaatgaaggtagagggagaacctctgccctccncaccttttggtcctagagggagtacccntctcaagcagccaatccactcccatccctaaggctctcatctgactgggaannggcangtnccactccccagcccatcctcttttttccctccagggcaaaggcaaggttcggacctactggctccttggggagagggggagtagcacccgaggctgacctgcctcctctcctatccctccacacctccctaccctgtgccagaagcaacagaggtgccaggcctcagcctcacccacagcagccccatcgccaaaggatggaagtaatttgaatagctcaggtgtgctgaccccagtgaagacaccagataggacctctgagaggggactggcatggggggatctcagagcttacaggctgagccaagcccacggccatgcacagggacactcacacaggcacacgcacctgctctccacctggactcaggccgggctgggctgtggattcctgatcccctcccctccccatgctctcctccctcagccttgctaccctgtgacttactgggaggagaaagagtcacctgaaggggaacatgaaaagagactaggtgaagagagggcaggggagcccacatctggggctggcccacaatacctgctcccccgaccccctccacccagcagtagacacagtgcacaggggagaagaggggtggcgcagaagggttgggggcctgtatgccttgcttctaccatgagcagagacaattaaaatctttattccagtga

SEQ ID NO: 722138 - DNA, 170 bp, Homo sapiens
taacggtcaagttcagagtttatcgtagaccacagtttaggccggtagacccttaggggtgactggtctttgatatggtggtaaggtgtcaggccgtttaggattcttgaccggtaccaacggtatgcggttaacccagttcaaaagggaacccaaaggcctggattatg

SEQ ID NO: 722139 - DNA, 178 bp, Homo sapiens
tactactgctgcaacaagaccctctggcttcactcttcgaacgtgtactcattcctggcttcccagacggtactttctcttgcctctatcattgcccctcctcaggctccctccctaactattctgtccacacttttccgagttcctctgtgctctaatccttaaccccctttcaaga

SEQ ID NO: 722140 - DNA, 361 bp, Homo sapiens
  misc_feature (2)..(2): n is a, c, g, or t
  misc_feature (23)..(23): n is a, c, g, or t
  misc_feature (75)..(75): n is a, c, g, or t
  misc_feature (80)..(80): n is a, c, g, or t
  misc_feature (88)..(89): n is a, c, g, or t
  misc_feature (142)..(142): n is a, c, g, or t
  misc_feature (145)..(145): n is a, c, g, or t
  misc_feature (153)..(153): n is a, c, g, or t
  misc_feature (243)..(243): n is a, c, g, or t
  misc_feature (272)..(272): n is a, c, g, or t
  misc_feature (274)..(274): n is a, c, g, or t
gntaaaagtaaatggaaaacacnccctacacactagaccccgaacactgggaaacagtactgcatagcaaacccntgggnagaaaacnnaaatgttattgcacatgtaaaatatgaaaacttaactctgctgtgtgttaggnaancctgtaancttttttgacccttaaaagaaattcatttctgaaattcttggttggaagactgtgacaatagcccatgaaattgagtgttatttttcctncttttttaaaaaaatatgtaaagtgcagncntctgtattcctgcatattgtatatacctgtatatgttttcctgagcagttaaataacaataaatatgacgttaatggtgactgtggt

SEQ ID NO: 722141 - DNA, 100 bp, Homo sapiens
gttacttaaagcaagtcatttaccaaatggaaaaggggaggtatttaaggcaattggtaagtggaggtagtcaggagtctctgtgggtctccaatgattt

SEQ ID NO: 722142 - DNA, 206 bp, Homo sapiens
acagctggaggctctggtaatggtggaaataggcaaggatgggatcctccccatgtgaggcttttgaggggacatatcccctgtgtgaatttgtttctccgaaatctggccaaaagtgaaataatacatttctattcttttaagccaccaagtttgtgggcatttgttacagcagccacaggaaaataacattggcccttatcgag

SEQ ID NO: 722143 - DNA, 1492 bp, Homo sapiens
tggttacatgctaaagaaaaatcgccgttaaagcagttttcttatttcactgtacttatttcttttcgctggtggaacccagcatgttcctgcgatggtgccacctcctcagtgaagacccctgcagctctccctgctgtgctgcttctgcagtgatgtgcatgctgacagtttctgagaaccctgtggccttcccctcccatgtgcctcctggggtgttcctggctgtttcagtgctgctgctgtttatcctgtggaatgtgtgcatgtgcgctgcttagtgtgccctatgggtgatgcttgctgctctgtgctgtggctgtgactgcagtgtggtgaatccattgtgaatgcttgactacaatggatagaacacaacaaacaaacattactttaatgtgatgcacttatagccgagaatgaattatattcaagacatgaatgacacaaaagataaatgtggacttaatattgattgaaaatttaaccacaaagaaacaacatatttcatgctcaaaatgcacagtgatgattccaagaaagctttgaaacacgtgggatgttcagccacatggacagtgctatacccaaaaaggcaaaattatacccccactggcaacttttttacaaacaactggaactggcggacatataattattccacctttggcaaactcagcagaagaacggaacttggaccaaatctacctgtaattacaaggttttggaagaacgtgcccgtatggaggaaatttggaccaagagccaatggtttggtccaaagaataaaatccttcccattggattcaggtgtaccaaaaggttgacagcctccggacagcatggtttccctattatttgcacgaaattacgaacaagacttgtgtacaaaaatgccagctctaattcaacccctttttggaaaacagagagaaccggaacaggtatggccttcaaccaaacattggttggggtaaaccggccgatttgaaggtaaagaaccattccataggatacccaggaacttcaactaatcgaattggttaaagtcccttgggaagatggtaacacccgtgcaccaaatggtccatggatgcccccaatttaaacatataccacgggacgctacaagcaattaccagaggggcacaactgtttcagaaaggattactcatcaaggagtgggaagcacaatcacatggttaccgtggacaaacttccctggacaccacattgacgtgtgaaacgaactcccaatgtcagacggacccaacgataaacagcacgacagcctatcacaagagtcccccaaaagagcgaaggcccgaacaaagcttgaccgcctgagtggaaccacatgaacgacacaaacccggaacactggagcaccacaccagcttggggcgcaactgtaagccgctgcgcaccaacaattggacgaacacacagatacgcccgtagaataatcaaaccgccacacagacacggcgac

SEQ ID NO: 722144 - DNA, 303 bp, Homo sapiens
tagtctagaggatccgggggagagggggtctttcttaggtgccaggtgggtcttaaactctggggctcaagcgctcttctggcctcagcctcctaaagtgatgggattaagggtgagggccaccataccgggccttggatatttttagatctacaatttatcaccttttttttttttttttaaaagacagggttgggctcggtggccaagtctagagtggaggcgggggatcatagtccacggcaacctggaactcgggggctcaagcagtcctcccacatcagcctcccaggtagttgagac

SEQ ID NO: 722145 - DNA, 1154 bp, Homo sapiens
atctcaacactgcactccagcctgggcaacagcgtgagactccacctcaagaaaaaaaaacaaaagattctgactaattattcccatggtggaaaagccaccacttcgtgccactttaaattaaccattcagggatctcagagattcttccaaggaggacaatctctgcattcaaggttctttacaccaagggtggtttttaaaggcgaaattattgaaattagggaggcagaaattattgccttgttggccccattagaaacgcgaggctcatattccttgtgttcccatcacataagggccatttttattctcttatcattagtttacacccagaaccttaaggttaaacagtgtggttttttctgtgttctctttatcatactttcttccccatgtgaaaatgggggcatttttcatctcttacaacagctttcaacctccaagttcgaccagggggcaaacctttatttgacccttaggttcctatcaaccccttatgtgttattcattcattgtgccacccatttttgaacgggcacacctaattggtcctaaagctttattccttcataaaactcttttctcagtgtttaagcaagagcttcaattaaacttccggtgcctgggaaacatgtgctatatgatacctctcattaacatttaccttcagccaaagattcccaatttttacctttttggaacccgtggattgccatcgggccaccaaagtttcgtgtccccaattggaaagccccaatgtatttcaccatattaccggtttatggtcacaattaactgtttttaacccagaaaaaactttcttttaatcaaacgcttactctccagggtgtataaacatttgagagtcccgtagcgctgattctaatttctccaaaattttctcgtaaaatttccaagatgttttaaagcggtggacagataacacatgtgggccccagatacccaatttcgcgggtttccctttcactgtattaacgccaacatttgtgggacaacatttagagttttgcccctattcccgggaacgagattaagggccctttagcacatttcaccggccttcatgggaaataaaaaggaagacagtttaaacaactccggaccagtttttacgtgatggggcccttatg

SEQ ID NO: 722146 - DNA, 574 bp, Homo sapiens
cacttcttttctgggccagggtagaggttatgaatttataaatttttctttaagaactagcttcgggtttcattacttttctgttttatgtcatatagttttcacttggatctttaaggtcttttttatatttatttggtgttaaattggctattctttttttagttttaagggggaagctgaagtcacagattggagatctttcttatttttggtttggtaaaataggcatttagtgctatacatttcctcccaagtaccgctttagcataatcccgcaaattctagtacagggggttttcattttcattcagttcaaaatacttggtacattctcttagggaagtgtgtcacggactttacaaatatgtggggattttccaggagtctttctgtgatatcaaatttaattgcattacagtcagaaaacatactttgtatgacttgaatcatttggattttattgagctttcttttatggcccagaatatggactgtctacctatctacattgtcttatatgaatttagccactgcagcttttttttccttttccttagagaaatcttatctg

SEQ ID NO: 722147 - DNA, 332 bp, Homo sapiens
  misc_feature (35)..(35): n is a, c, g, or t
  misc_feature (37)..(37): n is a, c, g, or t
ggatggaggacagcagctacacggatgacactcangnatggaggacagcatctacacggatgacactcagggatggaggacagcatctacacggatgacactcagggatggaggacagcatctacacggatgacactcagggatggaggacagcatctacacggatgacactcagggatggaggacagcatctacacggatgacactcagggatggaggacagcatctacacggatgacactcagggatggaggacagcatctacacggatgacactcagggatggaggacagcatctacacggatgacactcagggatggaggacagcatc

SEQ ID NO: 722148 - DNA, 112 bp, Homo sapiens
gcccaagtgcgcgcgtgcaaatacccctggacgggggagagacgacccgccttgtcggctatgatctctttcactgggcctgcctcaatgaacgtgctgcccagctaccccg

SEQ ID NO: 722149 - DNA, 300 bp, Homo sapiens
aaaaaaggattttaggtttttttggtgaaacaaaagcagatttaaaaagttccaaaaattttaaattttcattcacaaaaaaagtctttcacattttccactttccacgttatgatttaaatacaggaaagttttttgtgctttgttaagagaacggaaaattagaacccttctatatcaacacagtgttgttctgtgctttaaaatccctaaagggggattccttttaatgcaacacccaggggaacctgtttaaacattctgtgtttttttgtagctagagcaattccttttaagcca

SEQ ID NO: 722150 - DNA, 516 bp, Homo sapiens
  misc_feature (482)..(482): n is a, c, g, or t
ccggcccagtgtgacttccaaaaagagactatggtagaatcaagtttctaattctgaattattttgagtgttttgaacttaatttttaataacatgcatgtgctcctccagcagtagaaaggaaaatgaggactgtgtgtacacttgttccatgtgaaagtgcaggggaacagctcatctccagtgggtatggacccactcttaacccacccagtctccaaactgggataatagtcaggaatgacatgttcaaaattactaatgtatgctttagaaaacatttttagaagacttacgcttaacaataaaacccaagcaaatggtgtaatttgattttcttaaaaagtctacatttcacatattaataaagcaatcccaacaaaacagtcttgcatctccagaaagaaggaatgaatattgatgacatcttaattttattcagtcccattacttcttaaaatttgattggaaaaattaagtcnatgtaaccccatgctggttttagggatatggaac

SEQ ID NO: 722151 - DNA, 630 bp, Homo sapiens
  misc_feature (85)..(87): n is a, c, g, or t
  misc_feature (91)..(91): n is a, c, g, or t
  misc_feature (94)..(95): n is a, c, g, or t
  misc_feature (97)..(97): n is a, c, g, or t
ctcagattgccgttagtatgctcctcgactcttgaggataaccattcgatgtgccgctccggcagaaactggccttccatctctnnnagcnccnngntaagggtacacgcttttctgggaaagtgaggccaccatggctctggagaagtctcttgtccggctccttctgcttgtcctgatactgctggtgctgggctgggtccagccttccctgggcaaggaatcccgggccaagaaattccagcggcagcatatggactcagacagttcccccagcagcagctccacctactgtaaccaaatgatgaggcgccggaatatgacacaggggcggtgcaaaccagtgaccacctttgtgcacaagccctgggaaaatgtccaaatggtctgtttccagaaaagggtaaccggaagaaccggccagggcactgtgttcagaacgacttcaggatgtgcatatcaaaatgtgccctgagaaaacggttccaggtccccaaccgtgtgcatacggcaccagcccaaaggaaacacctttatgtgggccgtgaaaggaaccggcactcgctttggggacccagcgctaaatctcgaaatcgtgcgcatagcgtgttccgtggggaaatgtgattc

SEQ ID NO: 722152 - DNA, 419 bp, Homo sapiens
  misc_feature (35)..(35): n is a, c, g, or t
  misc_feature (163)..(163): n is a, c, g, or t
  misc_feature (372)..(372): n is a, c, g, or t
  misc_feature (409)..(409): n is a, c, g, or t
caaaccttagcctcctgtaaatgaattaaagccgnggccccatttttaatgttcctcctcccccctgaatttaccttacctgccttcctcttttgcccctttgaagtacatttataatatttggcctatagacttcaaaaatttttccttggctgggccgcgngttgtcacgccctgtaatccccagcactttgggaggcccgagacgggaggataatgagatcaggagatcgagaccgtccctggccaacatggtgaaaccctgtctctactaaaaatgcaaacaattagccgggcgtgttggcgggtgcctgtagtcccagctactcagaaggctgaggcaagagaatggcatgaacacgggaggcgganttcgcgccactgcactccagcctaggcgacagcgaanttccatctca

SEQ ID NO: 722153 - DNA, 203 bp, Homo sapiens
tgaccaaagggaggaaaaaaaggggggctcaggctgcgggccccagtccagcagggccaaaagcactcatttttgacccccaggctatgaggttcctgctgggcattacaaaaagcttttaactgtgatcaggcagtttgctcaaaaacattgaggggcgatttttagttttgttttgaaaaaataaaccgattaccctgcca

SEQ ID NO: 722154 - DNA, 413 bp, Homo sapiens
  misc_feature (85)..(87): n is a, c, g, or t
  misc_feature (91)..(91): n is a, c, g, or t
  misc_feature (94)..(95): n is a, c, g, or t
  misc_feature (97)..(97): n is a, c, g, or t
ctcagattgccgttagtatgctcctcgactcttgaggataaccattcgatgtgccgctccggcagaaactggccttccatctctnnnagcnccnngntaagggtacacgcttttctgggaaagtgaggccaccatggctctggagaagtctcttgtccggctccttctgcttgtcctgatactgctggtgctgggctgggtccagccttccctgggcaaggaatcccgggccaagaaattccagcggcagcatatggactcagacagttcccccagcagcagctccacctactgtaaccaaatgatgaggcgccggaatatgacacaggggcggtgcaaaagcagtggacaccactccgtgcacgagcgcgtgagtagaggtccagagggggaactgtaagagacgtcatcac

SEQ ID NO: 722155 - DNA, 639 bp, Homo sapiens
  misc_feature (551)..(551): n is a, c, g, or t
  misc_feature (565)..(565): n is a, c, g, or t
cacacaagtaatttagttctattttaaagtcacagtgtgcatgtatatgtctgtatttttgcatgtgtgtaaaaaatacagacatatacatgcacacaagtaatttagttctattttaaagtcacagtgggaattccttagtgaggagggataaaaagttcctgaataagacactgagaacatctagatttattattcaggaattccttagtgaggagggataaaaagttcctgaataagacactgagaacatctagatttattattttctctattttacttcccaacttacagaataaactgtaaattaaagaataactccataggaaataaaagaggtcttacaaacttagtttacaaattccagctacagtagttggagttttacttgatctatgtatttctatgtaccctgtaactaagcttctagccatcttaagtgtaaaccacagatcatttactaaagaacatgattctcaacagttctaggaacagttataaatggtctaaaggtgttctacattttgaggccccaggatatccttttattntatatatctgcaangtagcaaaggatagctatacaccttgacacggcagagatccagtgtaaaaaggtgcttcactagtttgtttgtc

SEQ ID NO: 722156 - DNA, 441 bp, Homo sapiens
aactcaggggcgagctgcagatccaggtcaccacctagaggggaggaacccctcgctttggagagtgggaataaaacgctcgtggaaaagggtacacgcttttctgggaaagtgaggccaccatggctctggagaagtctcttgtccggctccttctgcttgtcctgatactgctggtgctgggctgggtccagccttccctgggcaaggaatcccgggccaagaaattccagcggcagcatatggactcagacagttcccccagcagcagctccacctactgtaaccaaatgatgaggcgccggaatatgacacaggggcggtgcaaccagtgaacaccttgtgcacgagccctggtagatgtcagatgtctgttcaggaaagtcactgcaagacggcaggcactctacaagagactcagcatgaatcacagaatgcctg

SEQ ID NO: 722157 - DNA, 424 bp, Homo sapiens
aactcaggggcgagctgcagatccaggtcaccacctagaggggaggaacccctcgctttggagagtgggaataaaacgctcgtggaaaagggtacacgcttttctgggaaagtgaggccaccatggctctggagaagtctcttgtccggctccttctgcttgtcctgatactgctggtgctgggctgggtccagccttccctgggcaaggaatcccgggccaagaaattccagcggcagcatatggactcagacagttcccccagcagcagctccacctactgtaaccaaatgatgaggcgccggaatatgacacaggggcggtgcaagacactgaactcctttgtgcacgagaccctggtagatgtcccgaatgtctgtttccagggaaaggtcttcggcaagatcgggcagggccaccgcct

SEQ ID NO: 722158 - DNA, 519 bp, Homo sapiens
ttcgacggtgtctgggatacatgtgcagaatgtgcaggttggttacataggtatactcatactgaatgggcaaaaactggaagcattccctttgaaaaccggcacaagacaaggatgccttctctcaccactcctatacaacatagtattggaagctctggccagggcaatcaggcaagagaaaaaaataaagggtatttgaataggaaaagatgaagtcaaactgtctctgtctgcagatgacatgactgtatatttagaaaaccctatcgtctcagcccaaaatctcctttagctgagaagcaacttcagcaaagtttcaggatacaaaatcaaggtgcaaaaatcacaagcattcctatacaccaataacagacaaacagccaaatcatgagtgaattcccattcacaatggctacaaagagaataaaatacttaggaatacaccttacaagggatatggagatgaagaaaacataacccttcttcaaggagcccaacctaccaaggtagacagac

SEQ ID NO: 722159 - DNA, 349 bp, Homo sapiens
  misc_feature (82)..(82): n is a, c, g, or t
caggatttgttagtctgatttactgacatgtcaagctttcacagttttccaacccataggaatttttgtacataccactcanaattctgaaaataacaactatttaccacaagtaatggggggaaaagccacacatactattttcatacttttttggagctaccagagggttcaattactttgagggggattacatcctaaagagcaaaaaccaattccaaggacagtaggaaagggaaagcggcagggctgtctcttcaaagagggccaatattcagatcttgttcttcatcccctgctggaagaacgaattcctcctggtcttaccgatgaccaagtcggccactgc

SEQ ID NO: 722160 - DNA, 518 bp, Homo sapiens
gggagggcggcgatcctagaggtatcccggcaaatcgtgaacctgttctaaagatgggtgataggggaggtccatgtgaaggaatgtatttgaacgcccatcaatgctagagattagggttggtctccaaggtcttagctatgtgaagtaatgccgcaataaacatacgtgtgtatgtgtctttatagcagcatgatttatagtcatttgggtatatacccagtaatgggatggctgggtcaaatggtatttctagttctagatccctgaggaatcgccagactgacttccacaatggttgaactagtttacagtcccaccaacagtgtaaaagtgttcctatttctccacattctctccagcacctgtggtttcctgactttttaatgattgccattctaactggtgtgagatgatatctcacagtggttttgatttgcgtttctctgatgggcagtgatgatgagcattttttcatgtgtttcaagggtgcataaatgtcttcttttcagaagtgt

SEQ ID NO: 722161 - DNA, 306 bp, Homo sapiens
gagttgggaccgtcacacatatcgatgatcaggagttaacaacgtgggtatgcgaccggccgcgcgaatgccgaagctgacccgtcgcagccgagtcttgatcggcgtcgcgcttgcggtagtggtgttgttgctggttgggggacggctggtcgatgcatacgtcgactggctctggttcggcgagttgggctaccgctcggtgttcaccaccgtcctggtcacccgcctggtggtgttcctgatcgccggcgcgctcatcggggccatcgtgttcgccgggatggcgctggcctacagcacatg

SEQ ID NO: 722162 - DNA, 453 bp, Homo sapiens
gatcagcatcgagaggaggctgagcacatgatcgtcggtaccccactcgatctcaggccacttgctgcccttctcgtccaaacgccggaccaatggcaaagactcactaccatgagggacatctgcagatgatttgctttggcctcctgggcttcacctgtgccataccagtgaagacaggctgattctggggatgttcgtcgaggaaaatgcgagttttgactactatacagtacccagatgctgtgcgccagcttgtggctaatactcgctgatccctatctgcgaatcagcaaggaaatctcctatggccccaacatgaatgcttgtgttctctgttagaataccaatgatcgtttagtacagcgtagagcccttccgtggtgcgtccaagtgaatggccatgaccataatggtatgactattggattgaggaaacgattgatcactgac

SEQ ID NO: 722163 - DNA, 359 bp, Homo sapiens
gtgatacaggcacactgactgatcgagtgctcatcatattctagggttgaatctgccgtgttgctagtgcaggacagccctttgctatgcctgaataattaccatcttgtacagtgatccggttaagaacgatctatgactcaggagactggattacgtctatactgctagactgccttagtgttcgtaggagggctgatgcgaatgtgacgtgtcacaccactcgggtgcgattacactatgaatcgctcaccaagagtctgggctttcgacggtatattaataacaggcctcggacctgatcagagcagtggctatcccaacatgagacttatatcttgtaacactgcgttgttgtg

SEQ ID NO: 722164 - DNA, 357 bp, Homo sapiens
ggactgtgtacaggctgtaacacagagcccatataactatgtcctctgaggttccattggaatgtaagtgtactgtgcatgatgcattaccgtacaaggattacattggctacaagatccataagtactattatggcctggcgctagaactaagctgacttgacagactcatttttgtgccaaactattcatacatgctgcttattccctagatattacttgtgaattagctaatgtaacatatgtacttgcataaggagttagactgtcatgaaatctattgacatttactgcggtgctttatgaacatgtatgcgcatcattctatggctagtgtacacccctgatacggcactt

SEQ ID NO: 722165 - DNA, 315 bp, Homo sapiens
aggtgactggcccactgtggcctactaatacttctctcagctcggtacatttccgcggtcgcgacgtacgcttattgatggcgccagctgcatgctggacgccatatgcctcctatcgcctataaatattccggagtatacgtagccggctaacgttaacaaccggtacctctagaactatagctagcatgtgcaaattgaaagcgctagatatcgcatcgcgcgcatgatcgtgtcatgcatgatcattgcaactctggcatccatactataggtgcccgggcttataattactctcagagtcgacagtcccat

SEQ ID NO: 722166 - DNA, 235 bp, Homo sapiens
acaacaccctcgaccgcaccctctacggcggccgcatgcccgcacattccgccacccgacaacacggtgtgatgatcggatttgccttgggccgcaacgcaatcgccgcatacctgcatcaaaaacagcagcagcgtaaaaccgcctgaacaccccacaggggatagatctacccgcaggccagtcacatacaactcacccctcacaccgaccacgccagcatcacaatcaccgc

SEQ ID NO: 722167 - DNA, 275 bp, Homo sapiens
cacgaggcgcctccggcgaggagaaaatccgcgagctggcgcagagtctgcggcaagggggcgtgagccttgcattcagcagcctcaagaagcaggtgcgcgaggtgttcgaggccggcggtctgattgccttgctgggcaaggaaaacatattcggctcatttgaaaatcgagtgggtaatggagttcccgaagctgcgggtcaagggcgggcgcagcccggcggagcgcacccttgacgcgcaggatcgggagatacgctggcccatggctgg

SEQ ID NO: 722168 - DNA, 287 bp, Homo sapiens
  misc_feature (121)..(121): n is a, c, g, or t
  misc_feature (123)..(123): n is a, c, g, or t
  misc_feature (125)..(125): n is a, c, g, or t
  misc_feature (128)..(130): n is a, c, g, or t
  misc_feature (156)..(156): n is a, c, g, or t
  misc_feature (183)..(183): n is a, c, g, or t
  misc_feature (200)..(200): n is a, c, g, or t
  misc_feature (204)..(204): n is a, c, g, or t
  misc_feature (206)..(209): n is a, c, g, or t
  misc_feature (211)..(215): n is a, c, g, or t
  misc_feature (217)..(217): n is a, c, g, or t
acctttctagtccacggcatttgaagagagcgaggagaaccattctgggaactctaggctatgaatgtttaaagatctggtcccctttatgagaatgcaagccgatccacatcctgacttngngntcnnnttctgacgaactgcctggaggagggnaatatataaaaataaaattggtgtcanttcttttctgctatccnccangnnnngnnnnnantaaatcctcatgtttctgcttcatattttgaaaaataacaattaaaacagacagctgtactgaaaaaaaa

SEQ ID NO: 722169 - DNA, 107 bp, Homo sapiens
agtgaatcttagagtatcccggcgaagcactacaaaggtcatagtgtgcttctggcaataatgcagtacttgtctggttggtcagtcattgttggaagatagctaat

SEQ ID NO: 722170 - DNA, 330 bp, Homo sapiens
tgcactgaccaactggcaagtgccttcactgacattttcaacctctccatgtctgagtctgtaatatcaacatgtttcaagcagaccaccatagtccctgtgcccaagatcacgatggtaacctgcataaatgactaccgacccatagcactcacttctgtggtcatgaaatgctttgaaaggctggtcatggctcacaaacaccattatcccagaaaccctagactagaggttggccgattaatcgaggttgactagaggttgaccgattaatcggaatggccaattttggtcgacgcggccgcgaatttagtagtagtaggcggccgc

SEQ ID NO: 722171 - DNA, 528 bp, Homo sapiens
  misc_feature (243)..(243): n is a, c, g, or t
  misc_feature (370)..(371): n is a, c, g, or t
aggttgaactttacctttattctgcttcctatacgtttttcaggctgcatttcctatatttttaaaccaatgtgttttaatcagtatattcagcaagttagcattaaattcaatattctaattattgtcatgttctaagattgagcatttcttctttttattaaatgttgaaatatacaagtcattatgttgtacattggtaactaaaaatattgctgaaagtgtaaaggagaaaaattctantttttatatctggcatagaaaagaaagctctaactttgttttcgttgctctttttattatagagaacacgctggttccgcagcgctagaagccattccgagtgtgtttctttataaagacagtagtnnatattctttattcttcgaaggcatgtgtgagaaattgaaagggcaaaacttatattgtctttgtttataaagaaatctgtcttagctccacccactagaagaaaaatactccaagaaattattttctcatttttacgtaatagggcttttttcttca

SEQ ID NO: 722172 - DNA, 314 bp, Homo sapiens
tcatatcggacttttaatcgttgaacaaaccaacctttaatagcggctgcatcttcgggatttcctgttccaacatcgatgtcgtaaaccctattgttgatatggactctagaatatgattgcgctgttatccctacggtaacttgttccgttggtccagtatagcataattgaatatagtatttcgctttgactggtgaactcttagcatgtactgctcgtaggttgggttctgatcctaggtcgtcccgagcgaaatttcttatgcatgttcgttactttagcacctgtgtgattgtttatcctaaagttca

SEQ ID NO: 722173 - DNA, 680 bp, Homo sapiens
  misc_feature (26)..(26): n is a, c, g, or t
  misc_feature (43)..(43): n is a, c, g, or t
  misc_feature (53)..(53): n is a, c, g, or t
  misc_feature (60)..(60): n is a, c, g, or t
  misc_feature (83)..(83): n is a, c, g, or t
  misc_feature (111)..(111): n is a, c, g, or t
gaatttaggttaagagggaggtattnaaaaatgggggtttccnttggggaccnaccttgncatgggggacttcaccctgatancagattccctggggtcccaccccagacntgaatcagaatatcaagaagtgagaccctggaacctacattttaataactattaccctaggtgagtttgatgcacattgaagtctaagaaccaatggctcctaggtaagagtaagggtttttgccacagtcaaactgagtttgaatcctggctctcctatttactagctgtgtgacctcaggcaagttacttaaccactttgagcctggtttcatctgtgaaatcaaagtagtaacacctgtctcataggatagtgttgaggttacaaaggtaatgcatgacaattcacaattgcaaaaatatggaaccagcctaaatgtctatcaaccaatgaatggataaagaaaatgtggtataaatacaccatggaatactactcagccataaaaaggaacaaaataatggcattcacagcaatctggatggagttggagaccattattctaagtgaagtaactcaggaatggaaaaccaagtatggcatattctcacttttaagtgggagctaaccaaacaccacctgttccccaaaactatttaaatgaataaatcaatcattgtacccaaca

SEQ ID NO: 722174 - DNA, 847 bp, Homo sapiens
accacaaacaaaaaccaaacaaaggctagaagccgggttaatcggagaggctggcggcttggtgccagccccctctgcccagcagctgttcctccctatgggatgtatcacccccaggaggaaagccagcctccaggatgcctcatatcgccatacccagggccccggtgccgggccagccatgcacacccccggacagtgagcccccgagggcctaccctggtgcagcaccagtgacctaccctgtgtcagctccagtgccaactccctggatcgagcaggcagccagtgccgatgctacgccaggtatacccggggtctgggactgtcaccccgctgtgaccctcaatccagtttggaagccgaggcaccatcactgatgctcccggctttgaccccctgtgagaatagcgaggtcctgcggaaggcatgaaaggcttcgggacggatgagcaggccatcattgactgctggggagtggctccagccaatgcagcggcagcagatcctactttcccgttcaagacggcttacggcaaggatttgagtcacaaggatctgaaagtctgaacgtgtcagtgaaactttgagaagacaagtcgttggctctgatgaagaccccagtcatcttctgacattatgtgatgatacatcggcacgccgtacaacggggtcggccacttgagtgacggcctggccgtgattgagatcctcgcgttcccgacagacaactgagcacattccgagaattaaacagagcctacaaagccagaattcaaaacgaccctggaagagggccttcgaagcgaaactcagggcattccagcggtcctatgtctcctctagc

SEQ ID NO: 722175 - DNA, 129 bp, Homo sapiens
ccctgcgttatgactctagagtatccccagctcgcttattctcccagcacaaagggcatcaaaagactgttgtgaggggaacgcaaggcgaggggtcattgggatttaccatggtattagaggctgccc

SEQ ID NO: 722176 - DNA, 898 bp, Homo sapiens
  misc_feature (404)..(404): n is a, c, g, or t
  misc_feature (440)..(440): n is a, c, g, or t
agggaaggagctgacaggaaggcgctgtgcagagcctcctccaacctgcgccccatccccaccaggttactgactcaggagtcatttacaaaagggcgtagttctctgtcggagatggagaggcaggaacgctgcgtcatatgaagacatggcccatttgcagagcacatcggcgaggcgagctgtggaactgtccagcggccgtccccattccctggtccgaaagtgatcctacgtctcatccgcatgtatcatggccgagctgccctggcagaagttgccctgtgatccagtcacattcgaatgttcgggggagcctctggcttggcactagtcgctagtccgttgtcacggtctgggtgcatagggagcggggactcagagggcgcagatacggagccaanagctcaggtgcaacagattaccttgtgacacctggncgcgtttcgctccgaccccccaaggacttcggctactctccccatagtaatccccatcacactggtgttgcccagctccccggagtcggagctcaaacgagggggcctggaactatagcctgagagcgctcggggggcttaggcacgaacccagttggcgccatgtagcgaggggcgtatcctttatggcaagtgccgggggtcctcccccgggtgggcaacgcgacccgttattgtggggggacgttggtggtcctgattcgctcattgtacgtgtggggtgccacttgaggggtctttgtgcattggacgcccttgtggcccgtatgggtttgccactttcggagcctcggggccaccccgtattacgaaagttcgcgggcggtttcatggggtggatggcgcctccgccgcgtgctgggtttccggacattcccacctttgctatcggtccctcg

SEQ ID NO: 722177 - DNA, 151 bp, Homo sapiens
tggtcctccagagggagactttcttcctcaggtggggggagaagaaagtgctttattgtctttcccacatatttggagggatgtcatcttcctaatatgaagtttatttggaggcacacagtcatcctcctatggtggaatctaatcccgg

SEQ ID NO: 722178 - DNA, 1075 bp, Homo sapiens
gatgatacagttgcggatgtgtatctgggatatggtgacattaaacagacatagaatgaatgtagctgctcatatctaacactgtgtccattgtctagggctcaaatgcccccgttacccctgtatcgtatgtagggacacttctgatgtgactatcactggtctgtgtgagttctggggaccgtataaagatgtgtctcgtctcactcatactaggcattgtgagtggggttccatgctataccctggggaagtatgagcgttgccaatcgtggtacggtatgttcctgctcgaccgttgacctatccgttgaagggggtactaagcgatctgatcctaggctgattgtatattagcactagacgaaagcttgcatctaaaagaactatcattcaccttggaccacgatggagcgtgtctgtgagaacctggtgtttccctggtccgagttactcgttctctgatggcacggcgctgctttcaaaaaagagttgcatcatcggccactagagaaatcgttgtgagaagatctatattggatggggccatggtgtaaccttatcccatgtgatggggccaggtgattcaagaagccctaagtgaccttcgactgagatcactgatcaaatctagacaggaaggcagtcaagcctctgtgtggttattgtccactagtgttgaagttgactcgctggcggagtcagtgctgaaaggctgcgtgggggtgagaccaggagagcgaggagtttcaggcctccccaagtccttgctggttgcacggaagggcgggccctgggagaaggttgagcttagttcaagattagcacctgcaagtgggcagggcgcttccagacctggggcgaccatgctgctggacctggagaagaccgatgtaggaaaagatcaaggcgcacattggcatggggggtcctaaagttttctggaaaacaaaccaccgggtctgtggggcaaagacaagcctgatcccgatctattgaaagtacaggccatataatataaataaaccattaatgcttcgatgatacaaaatcggatatccttaataactagtcg

SEQ ID NO: 722179 - DNA, 232 bp, Homo sapiens
agcccctagggtttagccttttttcaccggggccctaagaaagatgaagccctggtttttattttaaggccatgaagggtttttttaggtttttcggctttgccaatggggttggggaatttgaaaacctgccgggcttggttggggataattttaggggggggcccgggggataattcccccgggggattttttaaacggggggcccccttttaaaaggatggggcttcca

SEQ ID NO: 722180 - DNA, 1680 bp, Homo sapiens
atcttctctgtcaggacgacgcaggcggggcgccggcggcggcaggaggaatacaggagcgacgacctgattcgttctgttatctagtgttatagtctgctgtgtcgttgtgttggtgcagttcccctgtcctgctttgggagttgctactgtgcccgcacgtacgtgtgtgtgcaccttcgtgtccaccctcgttggtgtcttcgtttgagtgagtagtgatggggctcgctctcttgtttgccacgctgtgagtctgcccacagtggtgatgatttttccccgcggcctccaagaagatgtttgttctgttggtggatgaaccctcctcggcttgggtagaagtatgggtggttgttcctccccaccgggaggtttgctcctgtgtatagttgagcgggatggtgtccacaccgttcgtgtttgtgtgtctccctccccggccttccttcatgtgggaacatcttcttggggacaacggggtgttttccacgagagaacagtcgtgttgtgggggcgtcctattctccctcgctgtgtgtttgtccgctccctcttcgggcgtgttgtgtgcggccctccctcgtggggggtctccaccatgtagggctcttttctttcttacccgccctggggtgttgtcctcaggcgcccggccattggttcgtgagggtcagccgcgtggttcgttaacttgttgtgtttattgggaggtaggcgggttctttctctcccagagcagtgtgggtggttgatttgttgtgggcgcggcacccacgccccgactgtgcccaaccggagttagacaaaactcatggtgggtggtccccccgcacataatggtgggtgttgatcttagtatcatcaaagggctgtatcattgggtggtataacacagtcattgtctagttgtattgtgtagtctgtttatttacatagtgagtggaattaagagtttttttatagaagaaattttttgcgccccacgagaaagggcgggtatttataggagtcatataaggtgtgttatataaaaagttgttagatagattggtagtacatgatataagcgggagtgagaaaagtagagagggagagagattttaagttgagagaagaagtgcctctaaatagttaacgccccccgcggtgtggtgtctccccccctctcctcgtttgttgtagaattttctccccggctcccctggggcccacagtccccgacggctgttttttgttttgtttgttttttttttccctctttgtgcctccagtctgccccggttctttgaggtcttctttttcttcttacctcccatggttcctcccatttatttggggggaaatacccttgacgccacgaataccatgggaaaagagtctcttaccccctttctgcttcgaagttccatttttatccccttccctgtcttggacccaaaacctgtatggaatccacccccccgagctctgttgggaaaaaaggaaaacctgcgtcccttccgctctgctggaaactggagggtgctaggcccctgtgtagtagtgccatagaattttagccttttttcccccccttctctgtatattgggctccgagagtaccctgtgtctctaagtgaatatggcacccttagcctttaccccccaagtatctgtctacctttctccttggtttta

SEQ ID NO: 722181 - DNA, 1012 bp, Homo sapiens
  misc_feature (737)..(737): n is a, c, g, or t
gagcaataagacgaactcgtgctatctgtctcattagcgtctcagaatgttaggagacggtcttgagatactgggtgactcgtcttcaatcttaacctggctcgatccgtccgcctcatctctcacggcattgcgtttcatactgggagcagtatgcttgagggagtttcttcctgtttgctgtggacatgaacagggccagctcattgtggttgagtggagactctgttcatgggccacacgcaatgcagtgcaggctctcacatgcatttcctgtcctccatattattaccgcaacccgaaagattgagacgttagacagccaagtgcaggacctgtaaattttgttaccgtgcgagggaacttcgcatataagtcataacctcgtcttgtggggcctcctagattcgcgattacggagtttgattttcggcgatcaggtaaggtgcgtgtacgcctgaatttcgtccgcgagttgggcgtaagcgaaaccaaggcagtggcagagtgtcccatggaacgttcttacacatgcaaaaatcacttatttcaccggcgttagcgacggaccggggtgctatatctacgggacatactggctacttgacaatctggtggaatggcaataggcgagtaagaattcattggaccacagtccgttcgctaagaattgtccattgcgcccttaggaagatctttgcatgtacgggggccgtatttgagcctctatagtcgcncctgcttcttacctgcccctcctagagacctaacaatactcctgtgaccttcctgggagaactcaactttccttttgatgcagggagtgtgaccgctttaataagaaagatagagtgcgcatcttgagcagaccgccaccaggatgggtgacccgattggtttagctgtgtcgagtaatacttccggaaaggcaagcgtcggggcgactacaagactaagaacccggagcagagggccagaagcagaggtttcggagaacgcctaacaagggctt

SEQ ID NO: 722182 - DNA, 385 bp, Homo sapiens
  misc_feature (130)..(130): n is a, c, g, or t
  misc_feature (274)..(274): n is a, c, g, or t
  misc_feature (278)..(278): n is a, c, g, or t
ccactttcaccagcagggaaaccgaagcctagccaggcttccggtccgtgcttccacctctctgccggttagaagacacctgtgcccagcatcatcagctggttcgttcggtccttcaagtacgtgtatnggccttcgctttgaggtcagcggacagaagaaactggaggtggatggtccctgtgtcatcatctctaatcaccagagcatcctggacatgatgggtctcatggaaatactccctaagcgctgtgtgcagatcgccaagcgtgantaantgttcacagggcctgtgggctccatcatgtaccttgggggtgtctacttcatcaaccgccagcaagccagaactgccatgtctgtgatggccgacctgggcgacctc

SEQ ID NO: 722183 - DNA, 294 bp, Homo sapiens
cggtgccagggaggccgttgtcagacatgccagtgaagagaaatattctgcagcctgtgccgccctatcctgactatagacttctatgtaacaaactgaaaaactgccttccagacagcaagaaaccctcacctaatagcaggagcccgctggcagtgaggctaggaaccagaaaccagaagtcttgcctcccagctcttgtctggaagatagaaacctcagagtgcaaaatctggcgaggggtttcaggagagacgggaggccgggtggcactgaggacaagaaatccccagg

SEQ ID NO: 722184 - DNA, 235 bp, Homo sapiens
atctagaaactcacacattagtcccggctcgactagaaataagcacgttatctggcagtaacacaaagacgcaggactcagtgagagatctagcaccttctacagcaggcccagatcaacaaccacaacactctcacctgccagcttgacaagccataggagtaggtgaaagaatccaccagctcccggagacaagcatgtgttctactcactcaaacagtgtcaccttgggcaa

SEQ ID NO: 722185 - DNA, 142 bp, Homo sapiens
taggcaaatctctcactactcccaggataacggtcttaccttacaggactacagtgagaaacaaaagccatgacaacaagcaaatgtacctctgcaaaacctataaagcactactacaaataccaagcttacaatgcataga

SEQ ID NO: 722186 - DNA, 355 bp, Homo sapiens
gtcctcagccatcgcttggttaatctgtccctgtgcagctgttctgagttgggggagatggattgattggctgctgaggactcctctaatgctctttaccattagcacagcagagctttgcatctgttggcatcagcaggactctctgcttaacggccagattaatagaatgaggaagccgaggaaggtttaaatccctggtgtcagcttcccggctcggcaggctgcccctggggaggcaccaaggaagccctgacttgcagtgatgaatgctcctctggtctccagatggtgactgccagcgaatcaggtgacctagaaatgaaaaaaaaataaaaaaggagttcagtgagtg

SEQ ID NO: 722187 - DNA, 191 bp, Homo sapiens
atgaaccgtgcgactggtcgagttgacccacattcgcccgagcctgggcgagatctaccgagaggcggcccagtcatgacgaacacatcatcggcctggcgtctcgtcgcttcccgcgaggtcgacgtcaagctgcgcgacaaaggattcattatctcgatgatcatcacggtgcttctcatcgtggctat

SEQ ID NO: 722188 - DNA, 1026 bp, Homo sapiens
  misc_feature (60)..(60): n is a, c, g, or t
  misc_feature (333)..(333): n is a, c, g, or t
  misc_feature (688)..(688): n is a, c, g, or t
  misc_feature (920)..(920): n is a, c, g, or t
  misc_feature (933)..(933): n is a, c, g, or t
  misc_feature (937)..(937): n is a, c, g, or t
  misc_feature (943)..(943): n is a, c, g, or t
  misc_feature (954)..(954): n is a, c, g, or t
  misc_feature (958)..(958): n is a, c, g, or t
catccaaccaggcagtccgcctgcacagcgctgtccctgctcatcgggctggaggacagnagacagaaccctaaaaccacaggttgctgaaaagccaggagtcaaaatgactgagcgctttgactgccaccattgcaacgaatctctctttggcaagaagtacatcctgcgggaggagagcccctactgcgtggtgtgctttgagaccctgttcgccaacacctgcgaggagtgtgggaagcccatcggctgtgactgcaaggacttgtcttacaaggaccggcactggcatgaagcctgtttccactgctcgcagatgcagagaaactcacntggtggacaagccctttgctgccaagggaggaccagctgcatctgtacagaacatgctattccaacagagtactcatccaagtgccaggaatgcaagaagaccatcatgccaggtacccgcaagatggagtacaagggcagcagctggcatgagacctgcgttcatctgccaccgctgccagcagccaaattggaacctaagagtttcatccccaaagacgaatcagaatttctgtgtgccctgctatgagaaacaacatgccatgcagtgcgttcagtgcaaaaagcccatcaccacgggaggggtcacttaccgggagcaggcctggcacaaggagtgcttcgtgtgcaccgnctgcaggaagcagctgtctgggcagcgcttcacagctcgcgatgactttgcctactgcctgaactgcttctgtgacttgtatgccaagaagtgtgctgggtgcaccaaccccatcagcggacttggtggcgcaagaatacatctcctttggagggacggcagtggcataacgactgctttaactgtaagaagtgctccctctcactggtggggcgtggttcctcacgagagngacgactcctggncccnatgtgngaagcctctgnttcnccgagaagttgtgttgtgtctcccccagtttttgtttctttcccccggacttgcttctgttcttcagc

SEQ ID NO: 722189 - DNA, 1471 bp, Homo sapiens
  misc_feature (587)..(587): n is a, c, g, or t
  misc_feature (1436)..(1436): n is a, c, g, or t
ggcccctttcacttgtgtccatagcccgactgaccgctctgtccgatcgcatcattctaatgcactacgacgacctgttcttcgtcatcgtccgatccctctgcgaaggccatgggctataaggtaggagagagtcctctgtggccagtggactcaggtgtcagagtaagaacatgcccggcgatgtcgaccgatagtcacaggcacccagcgaatgcacttggtctatttacacacgtcctgcctcgctaccaatttgccgccctgcttagctcgtcacagtggtgaatgaccataccgtcatctgtgtaacaagagccctaggtactagtgcgcagctcctgtcacatcttgtaaccgcttattcatcgaacgctccagattgaaatgttgctgagattcgagtagatacctttctcgccgttgctcagtcggtcgatgctagccgacgatagattttgctcgatggaatcgtttaataaccacgaaatcttgcgccttccccccataactccggcgagcgtagattctggttgtcttcctgacagatgcagcgcctacagatgcatgcgtcctttaattctggnagtttgtggcgcctttgtatatggtacacgaaagactcttaagacccttcgtagtgtgcctccatatcccccattggcgcccgaccactgttaggtagatccgaaatatacatagtcccaaagaagcacatacccagacctaagacccacagaccccggctaattacggttgtgtcagcaccaccgggttgcctttttagaaggaaaatttcccccaacgtttgcattgccactggcggggcaccacacccaattttttgccgatttgccttcccacagtaggagagcagagaaccaaactaccggagaggacctcctcccgcacaggggaggactccctatagtagtggcgggggggcgtggaccgagagaggaaaaacaagagagggttctcaaactcgcactcttgtggtgcacccccgctggggtccccacaaactaaggtgtgtgggtggggccccagtgatacccccccaggagcgtataactccggggcgtctacgacacaggccgtgggcctaaggagaattattggcccgtcggccgtttacccgcgtatatagtgtgagaagactcgcgaacatcccaatttccccgaagagaaaagccccgaaggagagaaaaaaacccgcggcggtcccacgaagaccgggggcagcaaacacaccgtggggggggaaaaccgttggtggcaagagaatatatagcgtggatccccccacaaaacaaaacccaacagggcgagggtgtcccgtcgagccccgccacttctgtggagacacacgcgctatccacacaggggtggtgtattgtggaacgaaggaagaattccaccccacagcagcgacngctctgatgaacgaagcagcgaacacaaagatgcc

SEQ ID NO: 722190 - DNA, 1346 bp, Homo sapiens
  misc_feature (653)..(653): n is a, c, g, or t
  misc_feature (1008)..(1008): n is a, c, g, or t
  misc_feature (1240)..(1240): n is a, c, g, or t
  misc_feature (1253)..(1253): n is a, c, g, or t
  misc_feature (1257)..(1257): n is a, c, g, or t
  misc_feature (1263)..(1263): n is a, c, g, or t
  misc_feature (1274)..(1274): n is a, c, g, or t
  misc_feature (1278)..(1278): n is a, c, g, or t
gagtcttctggccccgagagggagaggtggggataggaccttcctttagtcccctccgtagtggaacgaaggattctttatggtcatctgtggtgttcatttcgtaaagaagcatctgcagggtaagaaggaaaaacgtccaccttgcaaatatatcccaggcacatgcctcctgagaagtgaccccctcctccctccgcctcccccggcacgtcctggggcttctccagtctcccgctcctgggaccaggcagagatcccggcgtgggcagacccctgccaccgcgcccaggcctcgtccgaaactcgcgcccgagagcccacgccggaggcgacgctcccgataactactgtgctcccaagacccggagggcacgaagaaaggagccctggcaaacacaggttgctgaaaagccaggagtcaaaatgactgagcgctttgactgccaccattgcaacgaatctctctttggcaagaagtacatcctgcgggaggagagcccctactgcgtggtgtgctttgagaccctgttcgccaacacctgcgaggagtgtgggaagcccatcggctgtgactgcaaggacttgtcttacaaggaccggcactggcatgaagcctgtttccactgctcgcagatgcagagaaactcacntggtggacaagccctttgctgccaagggaggaccagctgcatctgtacagaacatgctattccaacagagtactcatccaagtgccaggaatgcaagaagaccatcatgccaggtacccgcaagatggagtacaagggcagcagctggcatgagacctgcgttcatctgccaccgctgccagcagccaaattggaacctaagagtttcatccccaaagacgaatcagaatttctgtgtgccctgctatgagaaacaacatgccatgcagtgcgttcagtgcaaaaagcccatcaccacgggaggggtcacttaccgggagcaggcctggcacaaggagtgcttcgtgtgcaccgnctgcaggaagcagctgtctgggcagcgcttcacagctcgcgatgactttgcctactgcctgaactgcttctgtgacttgtatgccaagaagtgtgctgggtgcaccaaccccatcagcggacttggtggcgcaagaatacatctcctttggagggacggcagtggcataacgactgctttaactgtaagaagtgctccctctcactggtggggcgtggttcctcacgagagngacgactcctggncccnatgtgngaagcctctgnttcnccgagaagttgtgttgtgtctcccccagtttttgtttctttcccccggacttgcttctgttcttcagc

SEQ ID NO: 722191 - DNA, 234 bp, Homo sapiens
aaaaaaaaaaaaaacgctcccactacataaaagctaggaccaagggcctcacggctaaattttaacaaacatttaaagaggcattaataccaatcttactcaaactattctgaaaaatagagaaggagtgaatatttggaaatgcattccatgaggccagtattactgataccaaaaccaaagacacattaaaaaaaacaaaactacagaaaagtatccctgaagatggctagg

SEQ ID NO: 722192 - DNA, 1486 bp, Homo sapiens
  misc_feature (192)..(192): n is a, c, g, or t
  misc_feature (793)..(793): n is a, c, g, or t
  misc_feature (1148)..(1148): n is a, c, g, or t
  misc_feature (1380)..(1380): n is a, c, g, or t
  misc_feature (1393)..(1393): n is a, c, g, or t
  misc_feature (1397)..(1397): n is a, c, g, or t
  misc_feature (1403)..(1403): n is a, c, g, or t
  misc_feature (1414)..(1414): n is a, c, g, or t
  misc_feature (1418)..(1418): n is a, c, g, or t
gagaaggaggagaagtacagctaggagcaggctggagtaaactcggccgaggagggtacgggccgtgaccgccagcccggggcgggggcacggcaaccgcgaggcctgggggcgcccgcccccctgtcgcctcccacagtccgcgtgattgcccagacctgagacctgatgtgctgtgccaatcatccatantatactgtgtcgaacactagcacatctgtgcgaggagtttactccgacgtggtcgggcacgtctgtcgcagcgctccactcggccggcagcggagccgcagccaccagccgcccgcgccctccagccccgtccgggagtccccggcccgctgcggtgccgtgagtacctcctaacccacctgctgccccgcgagggaggccgaggggcttagccaccagggctcggaagtgggggccgaatccggtgcgagacccaaggagaggggagcagagccggagttggggagactgtggctgaaaactgtgtcttcctggagactaggctggcattttgactttggtggttcgctgaaacagccaaggagatcagagatatgactgagcgctttgactgccaccattgcaacgaatctctctttggcaagaagtacatcctgcgggaggagagcccctactgcgtggtgtgctttgagaccctgttcgccaacacctgcgaggagtgtgggaagcccatcggctgtgactgcaaggacttgtcttacaaggaccggcactggcatgaagcctgtttccactgctcgcagatgcagagaaactcacntggtggacaagccctttgctgccaagggaggaccagctgcatctgtacagaacatgctattccaacagagtactcatccaagtgccaggaatgcaagaagaccatcatgccaggtacccgcaagatggagtacaagggcagcagctggcatgagacctgcgttcatctgccaccgctgccagcagccaaattggaacctaagagtttcatccccaaagacgaatcagaatttctgtgtgccctgctatgagaaacaacatgccatgcagtgcgttcagtgcaaaaagcccatcaccacgggaggggtcacttaccgggagcaggcctggcacaaggagtgcttcgtgtgcaccgnctgcaggaagcagctgtctgggcagcgcttcacagctcgcgatgactttgcctactgcctgaactgcttctgtgacttgtatgccaagaagtgtgctgggtgcaccaaccccatcagcggacttggtggcgcaagaatacatctcctttggagggacggcagtggcataacgactgctttaactgtaagaagtgctccctctcactggtggggcgtggttcctcacgagagngacgactcctggncccnatgtgngaagcctctgnttcnccgagaagttgtgttgtgtctcccccagtttttgtttctttcccccggacttgcttctgttcttcagc

SEQ ID NO: 722193 - DNA, 201 bp, Homo sapiens
aaaagctctcgaagcttgaagagacgtgacctcggatattccgtatagctctacctcgcacttttgtacgtatatactcacgaggaaatctaccttgtagtgctgatttactcatacgtacgctagtgtatctgcatctgcaggatgacgacttcgtttgactttgttatcacctgctaacgcacattactctatagccac

SEQ ID NO: 722194 - DNA, 1300 bp, Homo sapiens
  misc_feature (192)..(192): n is a, c, g, or t
  misc_feature (607)..(607): n is a, c, g, or t
  misc_feature (962)..(962): n is a, c, g, or t
  misc_feature (1194)..(1194): n is a, c, g, or t
  misc_feature (1207)..(1207): n is a, c, g, or t
  misc_feature (1211)..(1211): n is a, c, g, or t
  misc_feature (1217)..(1217): n is a, c, g, or t
  misc_feature (1228)..(1228): n is a, c, g, or t
  misc_feature (1232)..(1232): n is a, c, g, or t
gagaaggaggagaagtacagctaggagcaggctggagtaaactcggccgaggagggtacgggccgtgaccgccagcccggggcgggggcacggcaaccgcgaggcctgggggcgcccgcccccctgtcgcctcccacagtccgcgtgattgcccagacctgagacctgatgtgctgtgccaatcatccatantatactgtgtcgaacactagcacatctgtgcgaggagtttactccgacgtggtcgggcacgtctgtcgcagcgctccactcggccggcagcggagccgcagccaccagccgcccgcgccctccagccccgtccgggagtccccggcccgctgcggtgccgacaggttgctgaaaagccaggagtcaaaatgactgagcgctttgactgccaccattgcaacgaatctctctttggcaagaagtacatcctgcgggaggagagcccctactgcgtggtgtgctttgagaccctgttcgccaacacctgcgaggagtgtgggaagcccatcggctgtgactgcaaggacttgtcttacaaggaccggcactggcatgaagcctgtttccactgctcgcagatgcagagaaactcacntggtggacaagccctttgctgccaagggaggaccagctgcatctgtacagaacatgctattccaacagagtactcatccaagtgccaggaatgcaagaagaccatcatgccaggtacccgcaagatggagtacaagggcagcagctggcatgagacctgcgttcatctgccaccgctgccagcagccaaattggaacctaagagtttcatccccaaagacgaatcagaatttctgtgtgccctgctatgagaaacaacatgccatgcagtgcgttcagtgcaaaaagcccatcaccacgggaggggtcacttaccgggagcaggcctggcacaaggagtgcttcgtgtgcaccgnctgcaggaagcagctgtctgggcagcgcttcacagctcgcgatgactttgcctactgcctgaactgcttctgtgacttgtatgccaagaagtgtgctgggtgcaccaaccccatcagcggacttggtggcgcaagaatacatctcctttggagggacggcagtggcataacgactgctttaactgtaagaagtgctccctctcactggtggggcgtggttcctcacgagagngacgactcctggncccnatgtgngaagcctctgnttcnccgagaagttgtgttgtgtctcccccagtttttgtttctttcccccggacttgcttctgttcttcagc

SEQ ID NO: 722195 - DNA, 1601 bp, Homo sapiens
  misc_feature (192)..(192): n is a, c, g, or t
  misc_feature (534)..(534): n is a, c, g, or t
  misc_feature (557)..(558): n is a, c, g, or t
  misc_feature (577)..(577): n is a, c, g, or t
  misc_feature (587)..(587): n is a, c, g, or t
  misc_feature (908)..(908): n is a, c, g, or t
  misc_feature (1263)..(1263): n is a, c, g, or t
  misc_feature (1495)..(1495): n is a, c, g, or t
  misc_feature (1508)..(1508): n is a, c, g, or t
  misc_feature (1512)..(1512): n is a, c, g, or t
  misc_feature (1518)..(1518): n is a, c, g, or t
  misc_feature (1529)..(1529): n is a, c, g, or t
  misc_feature (1533)..(1533): n is a, c, g, or t
gagaaggaggagaagtacagctaggagcaggctggagtaaactcggccgaggagggtacgggccgtgaccgccagcccggggcgggggcacggcaaccgcgaggcctgggggcgcccgcccccctgtcgcctcccacagtccgcgtgattgcccagacctgagacctgatgtgctgtgccaatcatccatantatactgtgtcgaacactagcacatctgtgcgaggagtttactccgacgtggtcgggcacgtctgtcgcagcgctccactcggccggcagcggagccgcagccaccagccgcccgcgccctccagccccgtccgggagtccccggcccgctgcggtgccgtgagtacctcctaacccacctgctgccccgcgagggaggccgaggggcttagccaccagggctcggaagtgggggccgaatccggtgcgagacccaaggagaggggagcagagccggagttggggagactgtggctgaaaactgtgtcttcctggagactaggctggcattttgactttggnacggagtctcgctttgtcgcccnnggctggagtgcagtggcancgatctcagntcactgcaagctctacctcttggttcacgccattctcctgccccagcctcccaagtagctgggactacaggttgctgaaaagccaggagtcaaaatgactgagcgctttgactgccaccattgcaacgaatctctctttggcaagaagtacatcctgcgggaggagagcccctactgcgtggtgtgctttgagaccctgttcgccaacacctgcgaggagtgtgggaagcccatcggctgtgactgcaaggacttgtcttacaaggaccggcactggcatgaagcctgtttccactgctcgcagatgcagagaaactcacntggtggacaagccctttgctgccaagggaggaccagctgcatctgtacagaacatgctattccaacagagtactcatccaagtgccaggaatgcaagaagaccatcatgccaggtacccgcaagatggagtacaagggcagcagctggcatgagacctgcgttcatctgccaccgctgccagcagccaaattggaacctaagagtttcatccccaaagacgaatcagaatttctgtgtgccctgctatgagaaacaacatgccatgcagtgcgttcagtgcaaaaagcccatcaccacgggaggggtcacttaccgggagcaggcctggcacaaggagtgcttcgtgtgcaccgnctgcaggaagcagctgtctgggcagcgcttcacagctcgcgatgactttgcctactgcctgaactgcttctgtgacttgtatgccaagaagtgtgctgggtgcaccaaccccatcagcggacttggtggcgcaagaatacatctcctttggagggacggcagtggcataacgactgctttaactgtaagaagtgctccctctcactggtggggcgtggttcctcacgagagngacgactcctggncccnatgtgngaagcctctgnttcnccgagaagttgtgttgtgtctcccccagtttttgtttctttcccccggacttgcttctgttcttcagc

SEQ ID NO: 722196 - DNA, 1555 bp, Homo sapiens
  misc_feature (488)..(488): n is a, c, g, or t
  misc_feature (511)..(512): n is a, c, g, or t
  misc_feature (531)..(531): n is a, c, g, or t
  misc_feature (541)..(541): n is a, c, g, or t
  misc_feature (862)..(862): n is a, c, g, or t
  misc_feature (1217)..(1217): n is a, c, g, or t
  misc_feature (1449)..(1449): n is a, c, g, or t
  misc_feature (1462)..(1462): n is a, c, g, or t
  misc_feature (1466)..(1466): n is a, c, g, or t
  misc_feature (1472)..(1472): n is a, c, g, or t
  misc_feature (1483)..(1483): n is a, c, g, or t
  misc_feature (1487)..(1487): n is a, c, g, or t
gagaaggaggagaagtacagctaggagcaggctggagtaaactcggccgaggagggtacgggccgtgaccgccagcccggggcgggggcacggcaaccgcgaggcctgggggcgcccgccccccgcgccccacgcccggtgccagcgagccgaggcgtgcatctccttatatggtcaaatgacacggcggggtttctcgagggcgggagctgcgcagcgctccactcggccggcagcggagccgcagccaccagccgcccgcgccctccagccccgtccgggagtccccggcccgctgcggtgccgtgagtacctcctaacccacctgctgccccgcgagggaggccgaggggcttagccaccagggctcggaagtgggggccgaatccggtgcgagacccaaggagaggggagcagagccggagttggggagactgtggctgaaaactgtgtcttcctggagactaggctggcattttgactttggnacggagtctcgctttgtcgcccnnggctggagtgcagtggcancgatctcagntcactgcaagctctacctcttggttcacgccattctcctgccccagcctcccaagtagctgggactacaggttgctgaaaagccaggagtcaaaatgactgagcgctttgactgccaccattgcaacgaatctctctttggcaagaagtacatcctgcgggaggagagcccctactgcgtggtgtgctttgagaccctgttcgccaacacctgcgaggagtgtgggaagcccatcggctgtgactgcaaggacttgtcttacaaggaccggcactggcatgaagcctgtttccactgctcgcagatgcagagaaactcacntggtggacaagccctttgctgccaagggaggaccagctgcatctgtacagaacatgctattccaacagagtactcatccaagtgccaggaatgcaagaagaccatcatgccaggtacccgcaagatggagtacaagggcagcagctggcatgagacctgcgttcatctgccaccgctgccagcagccaaattggaacctaagagtttcatccccaaagacgaatcagaatttctgtgtgccctgctatgagaaacaacatgccatgcagtgcgttcagtgcaaaaagcccatcaccacgggaggggtcacttaccgggagcaggcctggcacaaggagtgcttcgtgtgcaccgnctgcaggaagcagctgtctgggcagcgcttcacagctcgcgatgactttgcctactgcctgaactgcttctgtgacttgtatgccaagaagtgtgctgggtgcaccaaccccatcagcggacttggtggcgcaagaatacatctcctttggagggacggcagtggcataacgactgctttaactgtaagaagtgctccctctcactggtggggcgtggttcctcacgagagngacgactcctggncccnatgtgngaagcctctgnttcnccgagaagttgtgttgtgtctcccccagtttttgtttctttcccccggacttgcttctgttcttcagc

SEQ ID NO: 722197 - DNA, 664 bp, Homo sapiens
agcggagcgaggcctcacacccggcgctccaagttaggggctggaggcgtcccggcttcctccctcccggaggcgggaccggccccgccccggccgcgggtcgctccggaggcccctcaccagcgtcgcatagatcctggcctccaccgaggcgcagcgcactcttcagccggccggcaggacatgacacagcacagagcggacaccgcgcagatactcccgcaggactgctacccaccacaaggccatggcgaccagggcgctcagacatccacatatgggccagaagcaacgggcaacaggcgagcggcgtcgagatatacatgacatcgagaccgccaaaagctgagtgggatgacgaccaatccatagaacaggccgtacgcaagtaccaattataaacacaaggacgcagcgggaactggccgcgacgctcgagattgccactaacactgagtacaagggacctcattggggagtgattgtagagaaaccacatagcaagagagagagacaaagaagaacgagacagacagtgtgtgagactactattatgcaagaaaattgtaagccgcagatgcgactttgggtgtgtgcgtggcagacctttcagaagggtgtgatgaatggatgaatgacgccaagggacaaaaggaagggagat

SEQ ID NO: 722198 - DNA, 1300 bp, Homo sapiens
  misc_feature (192)..(192): n is a, c, g, or t
  misc_feature (534)..(534): n is a, c, g, or t
  misc_feature (557)..(558): n is a, c, g, or t
  misc_feature (577)..(577): n is a, c, g, or t
  misc_feature (587)..(587): n is a, c, g, or t
gagaaggaggagaagtacagctaggagcaggctggagtaaactcggccgaggagggtacgggccgtgaccgccagcccggggcgggggcacggcaaccgcgaggcctgggggcgcccgcccccctgtcgcctcccacagtccgcgtgattgcccagacctgagacctgatgtgctgtgccaatcatccatantatactgtgtcgaacactagcacatctgtgcgaggagtttactccgacgtggtcgggcacgtctgtcgcagcgctccactcggccggcagcggagccgcagccaccagccgcccgcgccctccagccccgtccgggagtccccggcccgctgcggtgccgtgagtacctcctaacccacctgctgccccgcgagggaggccgaggggcttagccaccagggctcggaagtgggggccgaatccggtgcgagacccaaggagaggggagcagagccggagttggggagactgtggctgaaaactgtgtcttcctggagactaggctggcattttgactttggnacggagtctcgctttgtcgcccnnggctggagtgcagtggcancgatctcagntcactgcaagctctacctcttggttcacgccattctcctgccccagcctcccaagtagctgggactacaggttgctgaaaagccaggagtcaaaatgactgagcgctttgactgccaccattgcaacgaatctctctttggcaagaagtacatcctgcgggaggagagcccctactgcgtggtgtgctttgagaccctgttcgccaacacctgcgaggagtgtgggaagcccatcggctgtgactgcaaggtacctgctgcgggcctctgcgggtccccggcgctcccctaggaaacacgggtttctctgtggtttgtgctgaagccctgatccaccactgaagtctgtctcttgagccccctctgaggggcgtggaccctgcgtgtagcctttcggaagcttcttccctctagcgaatgtgatctctgcccacaagcactgggtgagggccttgccaggacttttgtgcttagtatctctaagtacattttctgtattctagcaattagtgcccttatctaactacccagctgcctaccaatactggaactttcttaagggtggtgctctcttcctcttgtctgtttgccccgtggtgagtaacgtggagcaggtgctgtgctcagtcaatatttgatgaatgaatgtgtacatgagagaaccagagttggttcctggataaatgggcacataaaagcacaaagtccttgga

SEQ ID NO: 722199 - DNA, 132 bp, Homo sapiens
cgctcacagtgctggtggttgagttgtgcctccgctgcactctggcccaggtatgtcaggatgccagatgctttctcttgcctctctttctcctgtcgcttttcttcctcgtactctttattgcctcaacca

SEQ ID NO: 722200 - DNA, 163 bp, Homo sapiens
  misc_feature (94)..(94): n is a, c, g, or t
gcctcttcctgagcgatacgcgcagtcactcgtcgttgtagccagtggtgagcaccaccggcagccagggatacagggcctcgattgcgtccanaactccaggccgctcatgccgggcatggagatgtcggagaacaccacctgaaagctttccgggttgggg

SEQ ID NO: 722201 - DNA, 193 bp, Homo sapiens
caggacttaagactggtcatcatccacaaatataaaaaaattagccaggttgtggtggcgacatgacccgtattcccagtctacctggccacgcttgagtcagagagcatcgattggtggcccaggaggttcgacattattatattgacgctgtagattgccccatcatgtcactcctacgtcgctgtcttga

SEQ ID NO: 722202 - DNA, 1430 bp, Homo sapiens
  misc_feature (192)..(192): n is a, c, g, or t
  misc_feature (737)..(737): n is a, c, g, or t
  misc_feature (1092)..(1092): n is a, c, g, or t
  misc_feature (1324)..(1324): n is a, c, g, or t
  misc_feature (1337)..(1337): n is a, c, g, or t
  misc_feature (1341)..(1341): n is a, c, g, or t
  misc_feature (1347)..(1347): n is a, c, g, or t
  misc_feature (1358)..(1358): n is a, c, g, or t
  misc_feature (1362)..(1362): n is a, c, g, or t
gagaaggaggagaagtacagctaggagcaggctggagtaaactcggccgaggagggtacgggccgtgaccgccagcccggggcgggggcacggcaaccgcgaggcctgggggcgcccgcccccctgtcgcctcccacagtccgcgtgattgcccagacctgagacctgatgtgctgtgccaatcatccatantatactgtgtcgaacactagcacatctgtgcgaggagtttactccgacgtggtcgggcacgtctgtcgcagcgctccactcggccggcagcggagccgcagccaccagccgcccgcgccctccagccccgtccgggagtccccggcccgctgcggtgccgtgagtacctcctaacccacctgctgccccgcgagggaggccgaggggcttagccaccagggctcggaagtgggggccgaatccggtgcgagacccaaggagaggggagcagagccggagttggggagactacaggttgctgaaaagccaggagtcaaaatgactgagcgctttgactgccaccattgcaacgaatctctctttggcaagaagtacatcctgcgggaggagagcccctactgcgtggtgtgctttgagaccctgttcgccaacacctgcgaggagtgtgggaagcccatcggctgtgactgcaaggacttgtcttacaaggaccggcactggcatgaagcctgtttccactgctcgcagatgcagagaaactcacntggtggacaagccctttgctgccaagggaggaccagctgcatctgtacagaacatgctattccaacagagtactcatccaagtgccaggaatgcaagaagaccatcatgccaggtacccgcaagatggagtacaagggcagcagctggcatgagacctgcgttcatctgccaccgctgccagcagccaaattggaacctaagagtttcatccccaaagacgaatcagaatttctgtgtgccctgctatgagaaacaacatgccatgcagtgcgttcagtgcaaaaagcccatcaccacgggaggggtcacttaccgggagcaggcctggcacaaggagtgcttcgtgtgcaccgnctgcaggaagcagctgtctgggcagcgcttcacagctcgcgatgactttgcctactgcctgaactgcttctgtgacttgtatgccaagaagtgtgctgggtgcaccaaccccatcagcggacttggtggcgcaagaatacatctcctttggagggacggcagtggcataacgactgctttaactgtaagaagtgctccctctcactggtggggcgtggttcctcacgagagngacgactcctggncccnatgtgngaagcctctgnttcnccgagaagttgtgttgtgtctcccccagtttttgtttctttcccccggacttgcttctgttcttcagc

SEQ ID NO: 722203 - DNA, 104 bp, Homo sapiens
tcctacctcagcatagctgggacaacagggctcatgccactgcacctagctggcatagaaattttttttttttggagcacactgtctcatcctgtggctcaggt

SEQ ID NO: 722204 - DNA, 1565 bp, Homo sapiens
  misc_feature (192)..(192): n is a, c, g, or t
  misc_feature (735)..(735): n is a, c, g, or t
  misc_feature (755)..(755): n is a, c, g, or t
  misc_feature (757)..(757): n is a, c, g, or t
  misc_feature (800)..(800): n is a, c, g, or t
  misc_feature (872)..(872): n is a, c, g, or t
  misc_feature (1227)..(1227): n is a, c, g, or t
  misc_feature (1459)..(1459): n is a, c, g, or t
  misc_feature (1472)..(1472): n is a, c, g, or t
  misc_feature (1476)..(1476): n is a, c, g, or t
  misc_feature (1482)..(1482): n is a, c, g, or t
  misc_feature (1493)..(1493): n is a, c, g, or t
  misc_feature (1497)..(1497): n is a, c, g, or t
gagaaggaggagaagtacagctaggagcaggctggagtaaactcggccgaggagggtacgggccgtgaccgccagcccggggcgggggcacggcaaccgcgaggcctgggggcgcccgcccccctgtcgcctcccacagtccgcgtgattgcccagacctgagacctgatgtgctgtgccaatcatccatantatactgtgtcgaacactagcacatctgtgcgaggagtttactccgacgtggtcgggcacgtctgtcgcagcgctccactcggccggcagcggagccgcagccaccagccgcccgcgccctccagccccgtccgggagtccccggcccgctgcggtgccgtgagtacctcctaacccacctgctgccccgcgagggaggccgaggggcttagccaccagggctcggaagtgggggccgaatccggtgcgagacccaaggagaggggagcagagccggagttggggagactgtggctgaaaactgtgtcttcctggagactaggctggcattttgactttggacaggttgctgaaaagccaggagtcaaaatgactgagcgctttgactgccaccattgcaacgaatctctctttggcaagaagtacatcctgcgggaggagagcccctactgcgtggtgtgctttgagaccctgttcgccaacacctgcgaggagtgtgggaagcccatcggctgtgactgcaaggacaagcattgagagccnagccaccagacttgcccagntncagcccaggcctttttttttactttcctgtttgcccttggacnttacttgtcttacaaggaccggcactggcatgaagcctgtttccactgctcgcagatgcagagaaactcacntggtggacaagccctttgctgccaagggaggaccagctgcatctgtacagaacatgctattccaacagagtactcatccaagtgccaggaatgcaagaagaccatcatgccaggtacccgcaagatggagtacaagggcagcagctggcatgagacctgcgttcatctgccaccgctgccagcagccaaattggaacctaagagtttcatccccaaagacgaatcagaatttctgtgtgccctgctatgagaaacaacatgccatgcagtgcgttcagtgcaaaaagcccatcaccacgggaggggtcacttaccgggagcaggcctggcacaaggagtgcttcgtgtgcaccgnctgcaggaagcagctgtctgggcagcgcttcacagctcgcgatgactttgcctactgcctgaactgcttctgtgacttgtatgccaagaagtgtgctgggtgcaccaaccccatcagcggacttggtggcgcaagaatacatctcctttggagggacggcagtggcataacgactgctttaactgtaagaagtgctccctctcactggtggggcgtggttcctcacgagagngacgactcctggncccnatgtgngaagcctctgnttcnccgagaagttgtgttgtgtctcccccagtttttgtttctttcccccggacttgcttctgttcttcagc

SEQ ID NO: 722205 - DNA, 147 bp, Homo sapiens
atacagccggccctctcttactccagattcatttgcgactggatcctcgtcaaagcagacacagtgacattccataagtgtgtatgccagtgaatatttgaagtacctttgtctagtgttcgccagtatctacatgttaggtttagc

SEQ ID NO: 722206 - DNA, 152 bp, Homo sapiens
actgttgcagacatgctacaagatgttcaaaaagaatggatgcgactctgtacaagtgtcaaagaaagtgaggttgcacgagccagaaatcttctgaaaacaaaaatgttgttgcagcttgatggattcaactccaatttgtgaagatattg

SEQ ID NO: 722207 - DNA, 302 bp, Homo sapiens
ctgagggccccatcccagaccttaattccaggatgacatttctagacacaccctgggccaaaagggaatccactgccttgaaggggagaacccagtcctggcaggattcatcatctgctgacaaaagagcccttggcctttgaactttcagcagtggtagctgggcagtactcgctgtgggccttgggtgagactcaaagacatgctggcttcaggtgagacccagtacattcccaggcttttatggctatagggggagacctccgtcttcttaaaaaagggggggaagaataaaggagctt

SEQ ID NO: 722208 - DNA, 763 bp, Homo sapiens
  misc_feature (212)..(212): n is a, c, g, or t
  misc_feature (214)..(214): n is a, c, g, or t
  misc_feature (220)..(220): n is a, c, g, or t
  misc_feature (598)..(598): n is a, c, g, or t
  misc_feature (629)..(629): n is a, c, g, or t
ggggtgattggtgtttcctcttagaaaagcgcgggaacaatgattgctttccagcgcgtttccgtcacgcttgcagcctctgtcccttctttccccaagttctcttgcccgtccttgctgttctagaagcctctccccttctgctatcctgccgcggccggcgctgcctgctgttctctgatccccagttcattgttggggtgggggtgctngncttacncgcgcgcgcctcctcgggaacactctccccccccatcctcctgttcctccttttcccccccttttttccccctttttgtcctcctcctttttttccttggtccgcttccctcctgcctgtgttccccggccgcctctctcttcttcggtcgtcccccgtcttctcctttttttttgcttccccgacccctcctcccccttcccccgctcccgcggggggggcgcctcgcccgcctctcctcggtcgccccctttctccccgccgcttcccgcctcctccgctttcgggccgccgccggcgcgctcttttctctgtcttcctgcttccctccgtcgcgcctctccttttgcttttgtggtgtacagttgcttcccttcncttctccccccgggttctttgtcctctgtgncttctcctctcctctcccctcccccgcccgctctccttcttttcccctcttcttcctcctctttccttctcttcccccgctctgctcgccgcttcgcctccttcccttcttcccgcgtcctttatatagtaaaa

SEQ ID NO: 722209 - DNA, 231 bp, Homo sapiens
tacagtaagctctacaaacctagcatataaaaaacaaaaaaaaaaacagggaataccagatctttggcaaattaacaaccacaacaaaagggcataaagggaacagagaattgtctaccgggctcagataggacctctatcccaggcaccataataaggaggcgtgcagcgacagagaaacaccccactcttcagagtggtaaggggtataggcccattaggggtatacac

SEQ ID NO: 722210 - DNA, 410 bp, Homo sapiens
  misc_feature (353)..(353): n is a, c, g, or t
tgcgcggtgacgagcggatcatgccgtgcgccgtgctggcccctctgccgtcgatccggacgccgcgtatctcctcctggccctggccatgacccgtgctgctccggctcgtgctagacgtcaacgcgcccccagacaacgctgagaccatgctgctcgagcggctgccgcgattcgtctcggatgcggatgcggatgcggcggcgttcgatgcgtgatggaacgtcgggctcatgggccgctcgcgtagctgcctttccgggtcggggatcccagcaagatgcgagggtatccaaatctgaatggttactttctccggggccagcggggactgtctcaaaaagacggcgcgngcgtgagatctagccctttgccaccatcagtggtggcatcgataaacaccgggtacc

SEQ ID NO: 722211 - DNA, 169 bp, Homo sapiens
ccaatgtaatgggtccatttaaaaaattttattttttaaaagccctttttgcctgttgtaatgggccgggcccctttcccttcatgggaaaaacaggtagtttccttaatataggtttaaaaggttatgttaaaaaaaattataataaaagggaaactttgcttttcca

SEQ ID NO: 722212 - DNA, 864 bp, Homo sapiens
tctcccctgttcctcattatatcattggtattgggcgccggtgtgtcttcatcggacgaggcgaagatcatattgtagggtgtccctgacactcacctccgttgccttgatagacgacctttttcttacggggggtgtccccttctgtttgggtcttgccgccacccgaagttgttttttttttttccaacgagatatttttcttggcgccccattgtgtccccactcaccctctactcgtgtgggatccgcccttctcccccccccctttggtgtgggtgccttcggcgccccccttcccggttgttcgtcactccccccctgctcatttttccactgtagttgtgcgtcccctccttcttggtacacaccatccacgcctgtgtttattcgtccctctcaccgggcagtgtgtactacatacactcaccccggtgggccctcaccctctcttgttgtttatatataggagtcccacccactcctgctccccttcccactctatttattggacccacgtccgcgtggtataccatcattttttttggtggtgttgtgttttttgtacactccctcactacgtacctcagcgatgtttcttggtgtgtcctcctctctcccctcttcttgtggggtatttttccggcgtccaactctttttgtgtggacccaccggctgtctcgccgtgtttgatcgctcccttttgtgggtcccatttttctctcctttgttgtcgttactcccgccccctgtttttttcctcttaccccccaaacaccttggtttaaccccccccccttttgccctttttttaaagggtttttttttttttttttttcccctttttttggggggggtttata

SEQ ID NO: 722213 - DNA, 797 bp, Homo sapiens
  misc_feature (547)..(547): n is a, c, g, or t
  misc_feature (651)..(651): n is a, c, g, or t
ctttcccggtagaatgggcgcccaaatcccatttccaaagcgagatgctccagcactcatacagtctccttcaggcatttctcccgagatccccattcttgatagaagcctgctgtctaaaaaaagagaccctcacagaacacacttgctgcgagatcacaaattttatcacgtgtggggtggacaaaagaaaacgtccaattttaagaagcgcaatttagatcgattacagactgaacatagaaaaataataagacaacttatccttagtggtttgagcacttcctgcctaaatctgagccaggaaaattcacatctctaatgcgttgagagaatgacacatcttgaaaaccttggctctaaatatggtagcttttcaacctattgctctatctatattaaataccataacttcaacttaccttggtttatggttcttttgagacaaaattgaaacctgacgtggttcaggcttggatctgactagcaaggctaagcctttttgggaaagacaatactacattattttttgtgaccatgcaaaatnaaacttataaatatcatgactgcccctgtgattacaaccacattaaaatatctgttacccgacatgtcactatcgggtcaacgtcctttacttttaaagtgccncggcctaatgggtttaatcccttaaaattctaataaactttaataaagaatactttaactagacatgatttggtttaaaatgaaaagaacccaaattggccttttgtgcccaacaaagtttaatttgctatctcaaaattgacctt

SEQ ID NO: 722214 - DNA, 213 bp, Homo sapiens
ggggggtttaaaaaaggggcccccctaatccccctccccaccagaaataggggggggggtttggggtccttaagcgggtttttcacccctgggattacctagggatttttgcctggggtaaaaaggggcccagggaaaaacccggcccccttctttttaggcggggggccaaccgggtaaaaaaaggggggccgggggttggttttttggcca

SEQ ID NO: 722215 - DNA, 229 bp, Homo sapiens
agctttagaggccacaaactccagcaacactttatgtaacgtctattatctgtttcagaagctttttattccttttagacggcatctcggtcgatcacctagcctggagtgcagagaaggcatccctctccaacaacacatacatcacaactacattaggccaggcctgggggtgtgagcctgtaagtccccagactcactctgacaggctccaggcggcaggatcgct

SEQ ID NO: 722216 - DNA, 662 bp, Homo sapiens
  misc_feature (49)..(49): n is a, c, g, or t
  misc_feature (61)..(61): n is a, c, g, or t
  misc_feature (125)..(125): n is a, c, g, or t
  misc_feature (151)..(151): n is a, c, g, or t
  misc_feature (165)..(165): n is a, c, g, or t
  misc_feature (168)..(168): n is a, c, g, or t
  misc_feature (170)..(170): n is a, c, g, or t
  misc_feature (177)..(177): n is a, c, g, or t
  misc_feature (276)..(276): n is a, c, g, or t
  misc_feature (286)..(286): n is a, c, g, or t
  misc_feature (297)..(297): n is a, c, g, or t
  misc_feature (300)..(300): n is a, c, g, or t
  misc_feature (332)..(332): n is a, c, g, or t
  misc_feature (483)..(483): n is a, c, g, or t
  misc_feature (492)..(492): n is a, c, g, or t
  misc_feature (544)..(544): n is a, c, g, or t
  misc_feature (554)..(555): n is a, c, g, or t
  misc_feature (568)..(568): n is a, c, g, or t
  misc_feature (623)..(623): n is a, c, g, or t
gggcgtgaggcacaaggacagtagggtgtgccctggtgggggccgcctnatgatcccctangaggcccttcaggctggtggagactgaagtgtaagggttagggaggggaggggcgagagccttntagcgctgctctcctagctgcatcanagctccctctagtngtncngaagatngatgacgcctccggctggggagggaggggctggcgcctctgatagagcacatttattatcagggtcacggccaagaccgtgggcttggtttctaggtangtggactttnagggtgcaaanacnacccacttttcctgccccctacccccggctcncagagaccatttaaatccatatccaaagtatatccagagccacctgggaccatcaggcctctggctagtctttctgggccaaacctgtcctcctaccctgaggaccctcagggaaccaggaagtgtgtaggggctggctccgccccacctntagcacaanatctggcccaggaggaggctgaagaaagagtttcaagatcctgcatgctgcnatagatgagnnacctcggacaagncacctccagccttcttcacccacctcaccatatcaacaagggctagatattgccngaagtgggtgggctggggggctctgatgccaaaatgcag

SEQ ID NO: 722217 - DNA, 420 bp, Homo sapiens
ttaaatttgaggccaaaattttaagtctttatttattggaaaacagtttgtaaaatgtaaacctttgggcctctatattaaaatttttagaccagccatcaattttaattatctggaaattatgtacttaatgaactatataaattagtagtgaataagattatacctaattagagtaatcagatgaaagtagaacagttaaaacaataagaatgtagatttaggttacaggtttgttacagatggtctgagaaccaagagaaattagaagttattcatttgtctgaaaccaaagagaagcagaagaccatgggaacagtcaatttattttaactttaactggattatctgctctgtttagtcctaaatcattgggcatttttgaaggtcgacgcggccgcgaatttagtagtagtaggc

SEQ ID NO: 722218 - DNA, 375 bp, Homo sapiens
gtctgttcctcttggtgcgccgtgccagagccgtcgcgtgcgtggtactctgcacgagtgagcccgtggtcgttgtgtgcgtgtgctccgcctcaaactggggagctccgcagtgtggcgactcactagcgtttcttctgtagattttcttcaaacttgctcagtttggcctgtaactccagaaaggtccaggtttatgaagtctcatgacttaagaagaccctgtgaagagacagttttgttattaggaaggctaactttagtggctagaaacgagcagcccaatcaaattttgagagagccgccagttatactctgtaccatttccctgctacctgcttcctgcttctgcctgcgcatgctcttgttgaggga

SEQ ID NO: 722219 - DNA, 508 bp, Homo sapiens
ggatcctctacgacggtgtactgcataaagtatctttgttgtgttagtttatttgaacaaaaaacaaatttatggtagagacaggatctcaccatgtggcccaggctggctcttgaactacctaagaactcaagtgatccatccgcctgataatcccaaagtgtaggatagtgagccctgggcccagcaagcaaaaactatctatgttggcatgagcagtatgaggaccaatagttagggaatgatagggaaccatctcaaaatccaagttctcaactgtcagccatggcctgatctaacaatttcctaaggctacaggctctaaggagtctcaggcctagctagtgtataacttatttctgcacagcactcaaagtttatgtacctttttgatttagagagatgggcagactgagtatcacagaggtggggtgaccttctcaaggaaacacagctaccaggtagccaggccaagatctggaatacaggtatcatggaagaccctgag

SEQ ID NO: 722220 - DNA, 200 bp, Homo sapiens
agagtgatgacactcttaactcctgacttttatatccagtcataaagtagactttcagcacaaaagatacttataaacaaataaacaaatatatataaacgtctcttactgatagtaagcttatggcactctattatgactaggtgccattagcacatcttgcattattagtagacacactactagcacctagcctagct

SEQ ID NO: 722221 - DNA, 607 bp, Homo sapiens
  misc_feature (607)..(607): n is a, c, g, or t
gtgtttctcagtttcccgtttcgttgtggactgttccactgcccctcctcctcaccctatcacccatggagtcgtaatgtaaaaattcttttaccatgtcaaggaaaaaaaacaacaaaaacaaaaaacacaacaaaaaacctttgttgtttggcggccgcggcccttggcgccccttgggaaaaagcgctttttaaacaccccatttgtttgtggggcgcccggggcccacgtgggttaggtggcaccgtgggcccatagcgcggtgtttccctggaggaaaactcgcgggccctggacataggtggctgtggagttttttcaccaagttatcaacaaaccgcgccggggggggaaaacccaggagcgggttgtgtggaacaaaaatcccccagaatgggagaggttcccgagaggagtcccataacgcgggggattccaccatcacagcggggaagtgtcaacagcgagaggtcccagatatcaatgaatttaggccccgggactgtggggagtaactagaacaaagcagcaggccgacacgacaacaaaaccacacagcacaggaacacaaacagcaagacaccaagagcagaacaacacgacn

SEQ ID NO: 722222 - DNA, 981 bp, Homo sapiens
gctgtaatcccagctacttgagaggctcaggcaggagaatcgcttgaacctgggagtggaggttgcggtgagccgagattgcaccattgtattccaccccgggtgacagtgcaagactccatctcaaaaaaaaaaaaaaaaattgggcatcatttacaatttcatagaaattactgtgaaggcctttctaggttgagatgtgggggtattggggattctaatggtaaccccagaagaaggtaatttagctggtatttatttaaaacccatttagccttttacttatatcgggtagaattccagtgatcatcctaataaggtatatctcagaataattttttagttccttcagaaataacttagaatcagatgctataaaggggcctaggagccttatgagaataggcctagggcctagagatggaaggggccccctagaggcagcaggggaggagatacaccggagcagaaaatacaataaggactgtaccgtaaacagaatgtgacaagacaagcaccagacggcacataaaccaaagtaagaatatcacagacaatagaagaagagtgtagggccctaaggaacatacataggagagagagcaggacgacaacataaaaggatcagaagcaggagacgcaaagaacaacaggcaaacacacaacaacacaagatacagaaagcgacgcgaccaggtggtccgaacagccacaaggaaatacccccaccaaccggaaaacaccaccgcaggaaaggacacgaaaacacaaaaggaccgcacgacagacacggcgaagagtggagcgacgaaagcagccacaggagcccgcagaggcaacatagcagcgaagacgggaagaaaacgacagagaaacgaaccagcagacgagagaagcgacaagaagagcagaccagcaagaaaagacgacgagaacaatagagagggcacacaggaaacgacagaacacaacacatcaaga

SEQ ID NO: 722223 - DNA, 203 bp, Homo sapiens
ttgaacaaggccgtcatcggatctttttcatccggacgggtttccacaacacgctcgtacaagcgaccaaaagcgctgcggatagatacgcgctttgaccagggcaaagaaacgtttgcgctcaaagtcgaactccagatccacgtcgtagacctgacccagctccagaccacggaactcaaccttggagcccgggtcgacgc

SEQ ID NO: 722224 - DNA, 148 bp, Homo sapiens
acataatgatacaaccctgaccaagctaacagacgcttgttcaaaggctattttctatatttattgttgggaacaagtcactttacaagcactatgtagctatttaggaagcacaagctatatttttattgtacagctggaactgcag

SEQ ID NO: 722225 - DNA, 143 bp, Homo sapiens
gtgagttctttgtggatgtgatgtgagcagggccctcgcccagctccattccgctcccaccccagccggtctgcgttcctctctccatccgtccgtcttttttacttgtctggtacctgaaacggaaataaaaggaactaaat

SEQ ID NO: 722226 - DNA, 4035 bp, Homo sapiens
aagcttgcggccgcggggctgggcggcggggacagcggggacggcacggcgcgcgcagcttctaagtgccagatgatggaggagcgtgccaacctgatgcacatgatgaaactcagcatcaaggtgttgctccagtcggctctgagcctgggccgcagcctggatgcggaccatgcccccttgcagcagttctttgtagtgatggagcactgcctcaaacatgggctgaaagttaagaagagttttattggccaaaataaatcattctttggtcctttggagctggtggagaaactttgtccagaagcatcagatatagcgactagtgtcagaaatcttccagaattaaagacagctgtgggaagaggccgagcgtggctttatcttgcactcatgcaaaagaaactggcagattatctgaaagtgcttatagacaataaacatctcttaagcgagttctatgagcctgaggctttaatgatggaggaagaagggatggtgattgttggtctgctggtgggactcaatgttctcgatgccaatctctgcttgaaaggagaagacttggattctcaggttggagtaatagatttttccctctaccttaaggatgtgcaggatcttgatggtggcaaggagcatgaaagaattactgatgtccttgatcaaaaaaattatgtggaagaacttaaccggcacttgagctgcacagttggggatcttcaaaccaagatagatggcttggaaaagactaactcaaagcttcaagaagagctttcagctgcaacagaccgaatttgctcacttcaagaagaacagcagcagttaagagaacaaaatgaattaattcgagaaagaagtgaaaagagtgtagagataacaaaacaggataccaaagttgagctggagacttacaagcaaactcggcaaggtctggatgaaatgtacagtgatgtgtggaagcagctaaaagaggagaagaaagtccggttggaactggaaaaagaactggagttacaaattggaatgaaaaccgaaatggaaattgcaatgaagttactggaaaaggacacccacgagaagcaggacacactagttgccctccgccagcagctggaagaagtcaaagcgattaatttacagatgtttcacaaagctcagaatgcagagagcagtttgcagcagaagaatgaagccatcacatcctttgaaggaaaaaccaaccaagttatgtccagcatgaaacaaatggaagaaaggttgcagcactcggagcgggcgaggcagggggctgaggagcggagccacaagctgcagcaggagctgggcgggaggatcggcgccctgcagctgcagctctcccagctgcacgagcaatgctcaagcctggagaaagaattgaaatcagaaaaagagcaaagacaggctcttcagcgcgaattacagcacgagaaagacacttcctctctactcaggatggagctgcaacaagtggaaggactgaaaaaggagttgcgggagcttcaggacgagaaggcagagctgcagaagatctgcgaggagcaggaacaagccctccaggaaatgggcctgcacctcagccagtccaagctgaagatggaagatataaaagaagtgaaccaggcactgaaggtactgccttgctaagaaccacttctttgctgtcagcttgtgctgactgcccgtgtgctcgtacgtttaagtatcccaacagtcaggtgagagcgtgtggttgaggcagtggtgatgacgtattgacagagaagccaaacgctgctcagaaacgtgtccctcggctgagggcgatgctgacaggtggccgaagctgagcctaggtcttccgactccagttcctccaccatcagctgtgctttcaaaataggcctgatgggcattccctaagggggaagcaggtggcggagaggagggacccgcggatatctttaaacagtggaaaacaggcccttctgttgaagtgaggggccagaggccagccagccccactgcagtgccctgtgccattgctagggaccactcaagccaagccctgagttgggccaggtttccgcaccctggtggggagggcagaatgacacattccaccgaagagcaggagtttgcaggtggcccggtgtgggtgcgggtgccaggctgagctgcagggcggagagtgtgggagaggaggcagacattcgggggcacggcagcctggccttcaagacagccttgcctgcaggagcaccccgcttcggcctcagctgtgccgtggcagcaatgcaaaagcagtccctttgcacactgttccacgtggtgcagagcagggaccctgatgtctctgggcatctaacttccaagtgccaggtcaggggcagcaactaacagcagccgggacttctaggtaatatcagtttcacagcatcagaggatagaaatcataaaacaggactctagagccgccagagctctttgatgtcaggatgaatgtcctgggcacacactggcagccccaagggtatatggctctagctcagtctgtgaggatctatttgtcagcaagaaaatcttgtccagcagatgttaacaggccagaaaagtacctcatgcctttgacttctctggaacaccccagtccctaagcccaaataaatcacaggtgctgcttcgccccgagaaagccctctgaggggccacctttcaaagcctcagccgcctcccctgtggaatggagtccgtgtgctccccagggctggtgaagaatcagggctttggcccgcacggagaagggcttcctcaggcctgtgggacgcagtgcccgctgtcagtcaccttctgtctctccacaaggatcagcgtcagcaagtgtcttagtctcactcagatttggcccttcttccgcgcctgccagttcagctagcacttcggccagtgtctcaggcagggtctagggttgcaggcaccagaagctcgctctgcttacttcagccaaagggaactgattgaaagtgggagtgtgcctgagtgagcaggtgctggagaccgcctggaggccccagggcagcctgcagaggccaagaggtggagcacggagctaggatgcagaaatcccggctgcggccagacggggaaagagccccttgatgacagtcctgtgaggccccatctgatggagaaacagtgcctcactaggaaacaggtgctatgagggacaatggatgtggccagaacgcagctacccactcatcaggggcttagacagaaagtggattctagaatgtcctttcctcttcagggccacgcctggctgaaagatgacgaagcgacacactgtaggcagtgtgagaaggagttctccatttcccggagaaagcaccactgccggaactgtggccacatcttctgcaacacctgctccagcaacgagctggccctgccctcctaccccaagccggtgcgagtgtgcgacagctgccacaccctgctcctgcagcgctgctcctccacggcctcctgaacgtccgtcctcaggagcacagcctcacggacagtgccaaaccctgtgggtctccaggggcttgggaaatgtgttctttcccaagagaatcaaaggaaagaatcaaatttcttgcccggtcactggcactccagaagacagcgtgccggaaccggcagctctcacctttctgtgacttgttcggaattaactcctctggatggaaacttccatcttacttggttacatcacggctctggttcagctagaacccgaaacaaaaggtactaaaggcaggtggcctgagagccatctaacctatttcggactagttcagttctgctagtgagtagttttcctctcctaccttccttctaaaaacctgattcatgcacagcgtttgacacacatggagtctgccagtgtgccttctctgcttcagacaagagatctgccatttcatgcccttgtgactacctatcattggccctgcaataaaatcatttatttttcaaaaaaaaaaa

SEQ ID NO: 722227 - DNA, 807 bp, Homo sapiens
gccgcagtgtggaagaaacactccgtttggtaaaggcgttccagtttgtggagacccatggagaagtctgcccagccaactggacaccagagtcccctacgatcaagccaagtccaacagcttccaaagagtactttgagaaggtccatcagtaggccatcctatgtctgcaattacctgaagcttttcaggccaaaaaagagccccagctggaatccttccaatgccttgaagattatttatagaatggcaaaacctcattatgtttgtgtttataagtactgctccacaggcttgtaattttaagacaggttcaggctctctaaaggtggctagctgcttccatagctgctcttactagggacttcttgatggctaaccaattctccccgagtgcttggcccccatttcttggatcatgtccttagagggtaagcattctttcccttagcctgccctgaaccttggtctacagtgaagtagcacatagtgccagtacttggtgaaatgaagtagcacatagcaccagcacttaatggaagcttctgatcaaggtcctaaaatttcctctggaattttgtgaattatgctgaatttccctttttttttttttcaaatgtagtcattaactcacaggtgtcctggtggtgttctgaggtatcgacgaggtataatcatgaaggctatgtctactccataagtcatttcttcaagagctggtatttgaattaaattaccttaaaaacaaaaaagggggggggctaaaaatccctgaggccaattagcgtaccagttttggaaagggcc

SEQ ID NO: 722228 - DNA, 579 bp, Homo sapiens
aagcttgcggccgcggggctgggcggcggggacagcggggacggcacggcgcgcgcagcttctaagtgccagatgatggaggagcgtgccaacctgatgcacatgatgaaactcagcatcaaggtgttgctccagtcggctctgagcctgggccgcagcctggatgcggaccatgcccccttgcagcagttctttgtagtgatggagcactgcctcaaacatgggctgaaagttaagaagagttttattggccaaaataaatcattctttggtcctttggagctggtggagaaactttgtccagaagcatcagatatcagatacaacttcatgattttgctactatcatttttcacttttcaaagaatttaacctattttacagcagttcagttctgctagtgagtagttttcctctcctaccttccttctaaaaacctgattcatgcacagcgtttgacacacatggagtctgccagtgtgccttctctgcttcagacaagagatctgccatttcatgcccttgtgactacctatcattggccctgcaataaaatcatttatttttcaaaaaaaaaaa

SEQ ID NO: 722229 - DNA, 199 bp, Homo sapiens
taaagttagatatacgccgatgtaatatgatagatgaatatggtattttggcagtgggtttggtctacgggtgtagcctgagacgtagggtgaaatcagttgaagtgaagcctccgtatgactggctcaatagcagctccctattggaccctttatcggaggggcgatcctcgtagaggtcgacgctgcagtgcatgca

SEQ ID NO: 722230 - DNA, 351 bp, Homo sapiens
tttcatttcgagtctctgagaatacttattcggtctgagtatcgtcctcactctcttccacgtccatcaagctcatacgcagcttcatccgcatgccttggatcctcagtattccacaaaaccatagcctcagttcagatcaatatctctgatcagtccatatcccttgaagactctttagacgtccttatctctgaccgatggattgagtctaccgatgaatacccgacatccactcatgatgtccggctagtacttctttccggacagggtctatgccggctgagacacagacaggtccgtagtatgagcccgagtcgtcgacctccacgcagtccagcacttaactcg

SEQ ID NO: 722231 - DNA, 321 bp, Homo sapiens
cgtcgacattagctcttataatccatatttagaaaaggagtgatcagtgttatttatttagctttattatggtaattcatttttatgaacgtgcacaaacagattgtaatgtccccaacattgaatagaagtctattagaatatttagaagagttcagcgtattctgtcctctcatttgtaagcattgatatcatgttaatcgccagtcattatgtgtgtacattatatcttttaatccccatagtcaaagagctcccagtaagtacggatcatgggtccgaggctttggatgccttgccatttgaacacacagtcgacgc

SEQ ID NO: 722232 - DNA, 244 bp, Homo sapiens
ctgaagggtatatggtagattacaatgttggaggcgatccatatggatcaacatttactgaccaatcaatccttttcccactgaattataatggcaactctgccatgtaccatacaccaagtatctatctcttcatgagacttgccaatcttccccgtagatactgtacagctatggcacaatgtcacactgttgtaatcaccaaaatgtactgctgtaagcaaggtcaaaatcctttctctat

SEQ ID NO: 722233 - DNA, 321 bp, Homo sapiens
tcctctccgggctcgtgagtagcattctcaggagtagtgtagcgagcaagttctggaagttagtcctcaatcttcgatttcccagcaagaactttctcagtgagcagatcttgctagtcgaggaacaggatcacagagatggtgcgcagccctctgtggtcccagatgctcttaatgagtttcggagcctcctgcagtcgctgggactgtttgtcctccgggttgaccatttggtagctgctgctggccgccatgtaaacatatggcagtcacttcgttgaagcactggatccacttgcgggcgtacatcgcgctggccac

SEQ ID NO: 722234 - DNA, 949 bp, Homo sapiens
gcgtggagtgaaggcggacacgtagcaacatgcttgtagcagcccgggcggcggcagcaacagcggctggctggcatacgtgcccgagcctgccggcctgccctaaccaaccgtacgctgacccgctggtaaccctaagctaccctaccactataggaataccccctaggtacccagatcgctacagagccggggagactagcatactagtagctatactctactactagatatactaccagtagcactaccgacacctggacggccggcgcactagcacgcaaccaggacaacacaatagtgaattagacggggcgctacagcacaccgtcgataccacgtatatcacgcctaggacgaaggactagttatcaacaatcacaccagacgggtcgacaatcacacccgcacgcgggcccaacgacacagcgggggccattccacaaccaactagtctacccaggcgccacaccacgttcaggccaatagctactcacttctagcatagcagaacacccacatagactatacacctaacttagacgcactagcattacaatagacaggacgtactaacatccccctaatccacatcgaacaccctacgaccagtacggtcttcgaccacataactagtagagataacaaccgcagacacatatagaagtaacaccaaataggaggacatctcaagccagcttcgataggcagtaccagcattagcccactgaaatctgaacagaactatccccgatgttgccaaggcctaacggaaatagcgatagcccgccaaaaacaccgactaccacattaccacagcaatacacagccaacacatactactaaacaccatacactatcccccattagaatagtatggcgtacctatcaacaacgtcatattcgaaaggcatccgcaggacagagacacatcagaatacagagtcag

SEQ ID NO: 722235 - DNA, 218 bp, Homo sapiens
gcagatgcacaggagaagagcatctaggagcgcttccgatagactcagctgagatacgctgctggtagcatgcacgcagcaagaacacgctccagtctcatcacgacgcagaagctgctagatgcagcatgtgtgttggcaagtctagaggcatgaggtgtgcggaggtgagagcaccagacagacagcggatagacccctgaggatgtatcatcgca

SEQ ID NO: 722236 - DNA, 272 bp, Homo sapiens
cagtcacactggatctgagccgtgtctgcaacctacaccacagctcacggccgcgccggatccttaacccactgagcaaggccaggaagggcactcacatcctcacagacactgcattgggttcttaacccattgagccacaacaggaactcccctacggtcagctggtgagcaacctgaatttcacctgcgtttaattctcctttgctgtgtgacctaacgtactcagctgccgttgattcccctttcaggaattcagtctaacttaggat

SEQ ID NO: 722237 - DNA, 218 bp, Homo sapiens
ccaacagatgcttgggcattcaggctgggccagcatccacttgcagtgccagcacagttcccagcacccagccgtggcccaaccatggttgcacacaccttgttctctcaatcacatcaatcaccacacacacattcagccagggccattggttggttgtgttgccgttgtaaatccgccagcatcacctctgtggccaggcttgcagcactgtggca

SEQ ID NO: 722238 - DNA, 186 bp, Homo sapiens
ctgtgctgttgatgtatccatgctctcacagcaccacacgctgtcccactgtaggcttgtttcaagttagcccaccctctttagaagtctatgtaaaagttaaatgctgtctgtgtccgtggcccagtctatggatgttaatccactgggtctgagtgcactcaataaaatcctccttttctccca

SEQ ID NO: 722239 - DNA, 217 bp, Homo sapiens
ataaattctgtgggcatctttttttgtttggaaaaaaactaggttcaattcattttcctgagatgtttggtttataagatttgaggatggttttaaatactgtaagtattgtaatgttatgaatccaggttatttgaaaactgtttattactatctccttcctggtaatgctatgggagtgtttttaataaaatttatatttatttaatgcgcttta

SEQ ID NO: 722240 - DNA, 81 bp, Homo sapiens
tttcccattttttttcaaacaagtatgaatctagttggttgaggccttttttttcatgacataataaagtattttctttaa

SEQ ID NO: 722241 - DNA, 176 bp, Homo sapiens
ccagataacaagtcttcaatgtcgtcctgcaagatgggttacaattaacatctcctcctaaaaacaaaaacaaaataccagttagatatgtgcaactctgcacaagcttttaaagagtccactattcatagaatttgttttaatgtcctctactttattttcattcacataattaa

SEQ ID NO: 722242 - DNA, 576 bp, Homo sapiens
atccggtgtttcctttgtctcatatcagtcagaatggttagataaaaagtaaaaaacaaaacaaaacaaaaaaacctaaaatcagatgctggcaaagctgagagagaagggaacactgtacactgtcggtgggaatgtaaatgaattcagccaccacggagagcagtttggagatttctcaaagagctaagaatcgaactactatttgacccagcaatctcatgattgggtatatacccaaaggaaaataaatcaatctaccaaaaagacacatgcatccatatgttaattgcagtgctattcacaaaagcaaagatgtggaatcaacccaggtgcccatcaatggtggattggataaagaaaatgtggtacatatacaccatggaatactacacagctgcaaaaaagaatgaagtcatatcttttgcagcagtatggatgaagctggaggccgttatcctaagggaactaatgcagaagcagaaaaccaaataccacatattctcacttataagtgagagctaaactttgagtccacatggacataaagatgaaaaccatagacaaagggaaaca

SEQ ID NO: 722243 - DNA, 164 bp, Homo sapiens
ccaacaggcaatcgaggtgcttttgtgataagccccatgctactgtgccagtgtcacattgaacaagttatcatgtcccttccgcgatcaagctgcagaacaaggagcatgtcattgatgcccatgcgcctggccgagttcaagtttcctggccgccagaagat

SEQ ID NO: 722244 - DNA, 1162 bp, Homo sapiens
  misc_feature (20)..(20): n is a, c, g, or t
  misc_feature (22)..(22): n is a, c, g, or t
  misc_feature (55)..(56): n is a, c, g, or t
  misc_feature (96)..(96): n is a, c, g, or t
  misc_feature (607)..(607): n is a, c, g, or t
  misc_feature (870)..(870): n is a, c, g, or t
gacccgcgtgtggcgcaggnangaccctcaaaataaacagcctctaccttgcganncgcgtcttccccaggcctgcgtccgagtctccgccgctgngggcccgctccgacgcggaagatctgactgcagccatgagcagcaatgagtgcttcaagtgtggacgatctggccactgggcccgggaatgtcctactggtggaggccgtggtcgtggaatgagaagccgtggcagaggtttccagtttgtttcctcgtctcttccagatatttgttatcgctgtggtgagtctggtcatcttgccaaggattgtgatcttcaggaggatgcctgctataactgcggtagaggtggccacattgccaaggactgcaaggagcccaagagagagcgagagcaatgctgctacaactgtggcaaaccaggccatctggctcgtgactgcgaccatgcagatgagcagaaatgctattcttgtggagaattcggacacattcaaaaagactgcaccaaagtgaagtgctataggtgtggtgaaactggtcatgtagccatcaactgcagcaagacaagtgaagtcaactgttaccgctgtggcgagtcagggcnccttgcacgggaatgcacaattgaggctacagcctaataattttccttttgtcgcccctcctttttcctgattgatgtcgtgtacatttctctgaatcctcttcactgccaaaggtgggcacgatagaggcaactccaggcagtgagctttactgtgccgtgtcaacggcggaaggggtgaacaaaaaccgactttgtgccataactacaacaaaagttatgtcagcaggcacgaggagcaaggataaggttggtaaagaacnccctttcgtggcactgtgagctagggatggctggcatggcgagcggtgagtcagaaccagtaagccgtctgggtccttggactgtcccctgtggaggcaacactcggatgcgacgaacgccaaacatacgagacggaaggggccggctgaggcccacggctaaaacaccagaacgggtaggccactggaaacgtgggggaccccaaaaaactcgcaggcggacacggcacgcacgaacaccgggggcaccggggggcacaaacaaccacggacgggggaaacagaagtagac

SEQ ID NO: 722245 - DNA, 1182 bp, Homo sapiens
  misc_feature (20)..(20): n is a, c, g, or t
  misc_feature (22)..(22): n is a, c, g, or t
  misc_feature (55)..(56): n is a, c, g, or t
  misc_feature (96)..(96): n is a, c, g, or t
  misc_feature (238)..(238): n is a, c, g, or t
  misc_feature (627)..(627): n is a, c, g, or t
  misc_feature (890)..(890): n is a, c, g, or t
gacccgcgtgtggcgcaggnangaccctcaaaataaacagcctctaccttgcganncgcgtcttccccaggcctgcgtccgagtctccgccgctgngggcccgctccgacgcggaagatctgactgcagccatgagcagcaatgagtgcttcaagtgtggacgatctggccactgggcccgggaatgtcctactggtggaggccgtggtcgtggaatgagaagccgtggcagaggtgnttttacctcggatagaggttccagtttgtttcctcgtctcttccagatatttgttatcgctgtggtgagtctggtcatcttgccaaggattgtgatcttcaggaggatgcctgctataactgcggtagaggtggccacattgccaaggactgcaaggagcccaagagagagcgagagcaatgctgctacaactgtggcaaaccaggccatctggctcgtgactgcgaccatgcagatgagcagaaatgctattcttgtggagaattcggacacattcaaaaagactgcaccaaagtgaagtgctataggtgtggtgaaactggtcatgtagccatcaactgcagcaagacaagtgaagtcaactgttaccgctgtggcgagtcagggcnccttgcacgggaatgcacaattgaggctacagcctaataattttccttttgtcgcccctcctttttcctgattgatgtcgtgtacatttctctgaatcctcttcactgccaaaggtgggcacgatagaggcaactccaggcagtgagctttactgtgccgtgtcaacggcggaaggggtgaacaaaaaccgactttgtgccataactacaacaaaagttatgtcagcaggcacgaggagcaaggataaggttggtaaagaacnccctttcgtggcactgtgagctagggatggctggcatggcgagcggtgagtcagaaccagtaagccgtctgggtccttggactgtcccctgtggaggcaacactcggatgcgacgaacgccaaacatacgagacggaaggggccggctgaggcccacggctaaaacaccagaacgggtaggccactggaaacgtgggggaccccaaaaaactcgcaggcggacacggcacgcacgaacaccgggggcaccggggggcacaaacaaccacggacgggggaaacagaagtagac

SEQ ID NO: 722246 - DNA, 983 bp, Homo sapiens
  misc_feature (20)..(20): n is a, c, g, or t
  misc_feature (22)..(22): n is a, c, g, or t
  misc_feature (55)..(56): n is a, c, g, or t
  misc_feature (96)..(96): n is a, c, g, or t
gacccgcgtgtggcgcaggnangaccctcaaaataaacagcctctaccttgcganncgcgtcttccccaggcctgcgtccgagtctccgccgctgngggcccgctccgacgcggaagatctgactgcagccatgagcagcaatgagtgcttcaagtgtggacgatctggccactgggcccgggaatgtcctactggtggaggccgtggtcgtggaatgagaagccgtggcagaggtttccagtttgtttcctcgtctcttccagatatttgttatcgctgtggtgagtctggtcatcttgccaaggattgtgatcttcaggaggatgcctgctataactgcggtagaggtggccacattgccaaggactgcaaggagcccaagagagagcgagagcaatgctgctacaactgtggcaaaccaggccatctggctcgtgactgcgaccatgcagatgagcagaaatgctattcttgtggagaattcggacacattcaaaaagactgcaccaaagtgaagtgctataggtaaggtgtcagaatgttgttagaagaaaactcagttgcggagattcttccagagatgaattagctataaatggaagggccttagtaaattcagtgaaacttagctgtgaccagataagaccaattttcagcatatgtaactggcagtctatctgtatataattctgtattctgccctgatatcctgtggcttatggtacctgggcagttttcacaactggacttttttaatatataaaagtaagagtgttataatttgaaacttcctgagacttcatagaaagctctgtaatatacataaatcttttatcatgtaaccagaaatcttttgcctgtttgtgacatgtaagtgtataattcgataaatggtcgtcgtgtacatatctgtgaaaccttaggggttaattgcatgaaaacaaagatcaggcgcttgttctgcatggtgactgttgcttgg

SEQ ID NO: 722247 - DNA, 595 bp, Homo sapiens
cgccgaaggaaagatggaggactaccaggctgcgaaggagactgctttggtggttgatgaagtgggcaccattgtaaaggaggctttggaaggcgcaattgggggtaacgcttatcaccacagcaaagggaaccaggggcccacaaatgtagtagaccaaactttaagccaactaaccaggctgggaaaaccatttaaatccatcgggacctgggtaattatgcagaagaatggagctggattccacacagcaggttcctgcttttgggacagttttactgccggaagctgcactgtccgatgggagaataggaccatgtcctgaatcgtcagtgccttcggactgccaatttgacctgcagtccagcctatggcctttctcctttgggctctagttcatcctttaaccaccagccatgaattcagtgaactcttttctcattcccttggtttggtggcacttttacaatgtaggggaaaaacccaattgaccgaactgggaggtgaatggcaccgaagtcagatgagtatccttggaggtaaccttgagcctgcgttgccactggccttaactctgttcaattcggtgctccct

SEQ ID NO: 722248 - DNA, 530 bp, Homo sapiens
  misc_feature (32)..(32): n is a, c, g, or t
  misc_feature (87)..(87): n is a, c, g, or t
  misc_feature (101)..(101): n is a, c, g, or t
tattatttaatatttcaattaaaaatttcatntatttatattttttattttataataatttgagattttttaaatattataatacanaaattaaatttaanatattaattccaattttacttttcctcctaaacatccctatccgttgtcctctcccttttttgtattggatagttttatcctaccgcattgtttttttatccgcgcgacaatggcactctattgtatttctgtcacatctttttcgcgtcattcgtcgcgccgtcattaaattcgctttgctatttgatgatttcggccccggaatcgcgcggcatttgtatgtgcgctcggtctatatttgcgtttatatacgtcgtcatgttgttttttattaaatccgaccacaccaatgttacatttatttcgctttccccccatctactaccctcctataaattagctcttgtatattataaccgttttcgtatcgccctccattccggtatccacatattatgttctcccgttctatcccgtaatttattttt

SEQ ID NO: 722249 - DNA, 319 bp, Homo sapiens
  misc_feature (16)..(16): n is a, c, g, or t
  misc_feature (20)..(20): n is a, c, g, or t
ccccctggataatccnctcngttgcacttttggtccctctgataatcctgactgttacactcagggccccctggataatcctcactgttacactcagggacccctggataaccctcactgttactctcagggcacctggataatcctcactgttacactcaggccccctggataatcctcactgttacactcagggccccccggataatcctcactgttacactcaggcccccctggataatcctctgtgtgttcacgcggtgccctcggtgtgcagtgtgtgtcattgtgcctgctctaaagtgaggtaccgagctcg

SEQ ID NO: 722250 - DNA, 276 bp, Homo sapiens
  misc_feature (17)..(17): n is a, c, g, or t
catatggggctcactgngatacaagagtcagaccatgggtgtgctgtattcaggagatccatctcacatgcaaagacacacacaggctcaaaataaagggatggaggaagatctaccaagcaaatggaaaacaaaaaaaaaagcgggggtggcaatcctagtctctgataaaacagactttaaaccaacaaggatcaaaagagacaaagaagggcataacctaagggtaaagggatcaaggaaacaagcagcactatcataatatatatgcaccca

SEQ ID NO: 722251 - DNA, 281 bp, Homo sapiens
ggcaagggcacatgaccccgggaatgagccacagacaatggcagacggccagagagtcgggattgctcagtgcctgtcggttccaacggaaaaggagacacagcagcttccggtgtcccagggaacaagccacaatcagagggtgcaagagaattgatccacgttgagcggtcaactctgctctaagtccagcttccagtctccacattccgccactgcttcagggtctcgatgaggcgggcatagctgggcagcagcaggtgcagaaggctcatgcccgg

SEQ ID NO: 722252 - DNA, 219 bp, Homo sapiens
actggagttggaggaagaggtttcagagtggaactgagggttggaactatacccgggatcaaactcacggaccactcgaggcctgcaaaccttcctgggaggacaggcaggccacgatggcccctccactggggaatgctcccagcttgtgctgctgccgcagaagctgattgttttggctgctattgtcacgccattcgctcctgggcactcggagac

SEQ ID NO: 722253 - DNA, 164 bp, Homo sapiens
gtccacttcctgtgtggccactccttccaccaaacactgctttgagagttactcggaaagtgatgctgactgccccacctgcctccctgaaaaccggaaggcatgggtattattccgggcccagggacaaaaacgaggtcttcatgatcaattccgcatcagct

SEQ ID NO: 722254 - DNA, 242 bp, Homo sapiens
ggctgagatgtctcacaagaaaatttaaaaatttaggaaagaaaagtgttcaggagtaaaattgataggattggtgattgactgaacacagatgtgagaaagaatgaggagttgttgatttttccaggttaaaaccttagttagatactaggtgggtactgggatcggcacctgagatagaggattgcagaggaggccctggcagggacaggggaagcaagttcaattctgggcttattcag

SEQ ID NO: 722255 - DNA, 692 bp, Homo sapiens
ggaggcgcggcggcatggaggcgctgctgctggtgctgcggtgttgctgctgggctgcttacgtgcttgtctactacaacctggtgaagtgccccgccgtgcggccgtgcatgtgtgcaaccctgcgtgggccatgacggcgtggtcacgtggtgagtgctggagtgctgggtgagtgctgagctggcggtggcgcagctggagaggagtgcctgggcctggctggtatgcagcgttgcccagtcgggctcagactcagctctggttcccgcacctgtcggtccgcaggctgccaaacagctggcatcggaaaatgaatgacgtgcagctggagacatggcggccgccgtgggaagcagcagcggtttggtgcatagtgcctgcccgccagacccaagtgagctgcggggggatggcgggcgtgcacattcgaccatcctgccacaggaagaagtgggacacacattgacggtgtcatcttttaactgggcccttgggaccttttgggcccacagatattggcccttctgggttggccggcgcacttttggccaacgttgccttttcctgcagcactcttgtagcccaacgtggttgggtacattccctacattccagcaaattgaccaggtatcgaggttccttgatggcccgagacccggttgaggacgtttaacccatgcatgctatcg

SEQ ID NO: 722256 - DNA, 264 bp, Homo sapiens
acaccaaactcacatctctgatattcttgtccatacaggtagataatccacatgccagtgtgccagcacagaactgtaccactgtactggaggaagctcaaactgaagatcgaggatgtcacaaatcaattgacttgacttcatcacgtgctacaatctccaaaaatatactgcagggctgtgagatgggccatgagctgccctgtatcatttgggactccgcagatcctaccgtgctgctcactgctgcttccccctgataca

SEQ ID NO: 722257 - DNA, 106 bp, Homo sapiens
tctgcatcgctagtcttttgtattgcttggggctgctggggagggaggggccgtgttcgggactttcccagtctgagtggctcaggagcacccacccctctcccct

SEQ ID NO: 722258 - DNA, 893 bp, Homo sapiens
  misc_feature (7)..(7): n is a, c, g, or t
  misc_feature (73)..(73): n is a, c, g, or t
  misc_feature (94)..(95): n is a, c, g, or t
  misc_feature (105)..(105): n is a, c, g, or t
  misc_feature (113)..(113): n is a, c, g, or t
  misc_feature (139)..(139): n is a, c, g, or t
  misc_feature (152)..(152): n is a, c, g, or t
  misc_feature (154)..(154): n is a, c, g, or t
  misc_feature (157)..(157): n is a, c, g, or t
  misc_feature (181)..(182): n is a, c, g, or t
  misc_feature (190)..(190): n is a, c, g, or t
  misc_feature (194)..(194): n is a, c, g, or t
  misc_feature (196)..(197): n is a, c, g, or t
  misc_feature (214)..(214): n is a, c, g, or t
  misc_feature (233)..(233): n is a, c, g, or t
  misc_feature (246)..(246): n is a, c, g, or t
  misc_feature (248)..(248): n is a, c, g, or t
  misc_feature (253)..(253): n is a, c, g, or t
  misc_feature (256)..(256): n is a, c, g, or t
  misc_feature (281)..(281): n is a, c, g, or t
  misc_feature (289)..(289): n is a, c, g, or t
  misc_feature (296)..(296): n is a, c, g, or t
  misc_feature (342)..(342): n is a, c, g, or t
  misc_feature (362)..(362): n is a, c, g, or t
  misc_feature (367)..(367): n is a, c, g, or t
  misc_feature (436)..(436): n is a, c, g, or t
  misc_feature (470)..(470): n is a, c, g, or t
  misc_feature (472)..(472): n is a, c, g, or t
  misc_feature (494)..(494): n is a, c, g, or t
  misc_feature (497)..(497): n is a, c, g, or t
  misc_feature (500)..(500): n is a, c, g, or t
  misc_feature (511)..(511): n is a, c, g, or t
  misc_feature (514)..(514): n is a, c, g, or t
  misc_feature (531)..(531): n is a, c, g, or t
  misc_feature (588)..(588): n is a, c, g, or t
  misc_feature (642)..(642): n is a, c, g, or t
  misc_feature (664)..(664): n is a, c, g, or t
  misc_feature (666)..(666): n is a, c, g, or t
  misc_feature (668)..(668): n is a, c, g, or t
  misc_feature (681)..(682): n is a, c, g, or t
  misc_feature (730)..(730): n is a, c, g, or t
  misc_feature (734)..(734): n is a, c, g, or t
  misc_feature (815)..(815): n is a, c, g, or t
  misc_feature (864)..(864): n is a, c, g, or t
cgtgacnttcgtttataacacataaactacatttttagttgttaagtcaccttgtagtataaatatgttttcntcattttttttgtaataaggnncataccaatnccaatgancaatggccaccccatcttatttcgtnattcttccaatgncnaantcatctctggccaacccccaattnnccaaaganaagncnnccaattgtccctctgtncaccaatacggtccttttnggttgtttggggntntgtcnggnggggccgcggcgttgggctgggggngccatggngtggggnctggttgcgttttcctcggtggctttttcctttgtctttccttcgnctgttttttcggtttttggncggtncgggtgggggttggtctcggctctctctttctttggtctcgggtgttccttttgtgctctgggttttcngtccttccctcctggcttgtgtttttggtgtgtntntctttctttggcttccggtggngtntcncgccttttttnccncttcctgcgcccctccntgtggctggctctctgtccccccccacccaacaatattcccccggttgtgacaagantctgctcctccggtctctcttatctcttcattgctaagcccactctcccagatnttgccgcctgtcagtctccccnancnggctaatgtttcnncccccccaccccccacacagcagccattcttttcttggccaatctgcnggcntcctccctcaggcccaatgtgacctgtggccatctcaacagtggtcgccgccagtccccctttcccccacacggctgtccncccttcctctgccttcccaggcgccgcacaggtgggtccccttcccccngcccacatggcttctgccacccgtttgtc

SEQ ID NO: 722259 - DNA, 314 bp, Homo sapiens
cctgtcttcctaagatcttcattcctagattatgaaaatattgtccatcatgtctttcagtatttctattgagttatttttattacctagatctgtttttttttctttttgagacagggtctcactctgtggcccaggctggagtacactggcatgatcttggctcactgcaacgtctgcctccccagctcaagccatcctcccacctcagcctcccaagtaactgggaccacaggagcacaccaccatgcctggctaattttttgcatttttggtagagacagggtcttgctttttttgtccaatctgatctc

SEQ ID NO: 722260 - DNA, 1494 bp, Homo sapiens
  misc_feature (116)..(116): n is a, c, g, or t
gggtgtttgtttgtcgcgtcctctctccgtgtgttgttgtctctcgtatgctctgtttctcattggggtcctcctggtctctctaattgggtgttgtatttgtatttgggtttttnttttggggagttctcgatcacgcacgcctggtagtagtttgtgtgctgccggtgattcggggggggatattagagttcccgtctcttcgggcgtcgtggggttctcccccgggggggtcacctaaaccactcccttccgtgtggtggctctcccctcacaggttttcttccggtctagtttttttcctggggccccccccacaggttgcccctcgaggtcccttctgggcctcattggtggtgcatgttgtgttgctccctttgttgcgcctgccccgtgggctgtccttatacctataggccccgtcggttcctatgcctctgtcttgtggcttcctcttgcgcaatgccccccccccggggcgccgtcccgggtataatggggggcctggggcctgcgtgagttccccgttcgtgggggggcaccccgggcttcgtcggccactatctgtgctctgggcgccctggggtcctccgcgtttttcaccccctgtgtggcggtctctctgcccctcgttctccccccgggtgtccgcggggtttcctgagtgcgcctccagcgcactttgcgtcggggttgcccccccccgggagagctttgtgagagaattgccccccgtgggtcctgtagaagagccgccacagcaccttgggcccctttggggcgccctcgggaaactctttacgcgggccacccacaacctcgcgggagaccccccacctctttggagatgtgtctcggcgcaaaaggcacccgctcgggagagagagacccacacgctggagagagataaatgatgctttgccacagagtttctctctcttgtcgtgcccctgggagagtgaagaggcgcttgttccgcaggggggtctttaaaaacgtggtccgccgccttcactacaccgcggtttctttctccgcggaaacctcggtggaagcccctcgctccggtatttccgcgagggaaacacagcgtttttgagatattccccgctctcacgggagagaaatattggcttcttctcttgcacccacacacacagggcttcggagagctccccgcacaccccacaaggagagccaccctctgggcactctgggccacacgaacacttgagccacatctttgttgtgaacccacaaaaaccctatttttatgtaattctccacacacacctcgaaccctcggaaccgttctgcccccttcttcccaactttccaacttccggcccccccctcttacagaaggaacaccctttccttcacagcccccgaaccctgaggcgtatgggaagcgtagacccccaaggtaccccggagggctaaatttgtaattttgggttgaactatttgttagaataaagtaattttgctaat

SEQ ID NO: 722261 - DNA, 766 bp, Homo sapiens
gaggcgcgtggggcttgaggccccacgcgctagaagctgaagaagccgccctggttgcaaatgccgtcgcgcatgatgtgtatgctctggtggtggtgtctatacttcctcatacacccggaggaacatacattctatcgatgattattgttagaacctccaagtgtcggctcgctatgactggattgaacattggcccattcagagcgccagtacgctttcttggggccttacaggcaggtacaaattgcgaccaatactattaatggaaacggactttgccaattccagttttccttatttaccaatggcgaagggtacgcaaggttgcattaactccttggaaccgatgtcgaaacgtgccgccaaatttattcgccagaagagttcagttaggaattcctttctttcatgctccattggcacttctgctctgtgctcccttattgtgagttatttcccaatgggctaagagctatttcattgaagcactgaaaacagctgcccgggacatactcttgcatgggggctatagcaggtgccctctttgacgaacagcaaactcagggtggcataccggggcatttggcttcccttgttcacatggcacgcttttaacaaggctttgtacccaaattccttctatctattgacactgctggcacacaacgactttgacacgagccgccagtaacaccgcaaatatttacgtgcaacaccagggaaagccgtattgaaccttggactacgcaattcttctgggaat

SEQ ID NO: 722262 - DNA, 376 bp, Homo sapiens
  misc_feature (10)..(10): n is a, c, g, or t
cggatcccgntatcccaacacatgatacttatgttctttaatgatatagggtaatgcagagatgcaacatgctggaacttcttaaaatatacagtataactgggcgcagtggctcacgtctgtaatcccagcactttaggaggccgaggcgggcggatcacctgaggtcgggagtttgagaccagcctgaccaacatggagaaaccagtctctactaaaaatacaaaattagccaggcgttgtggcacatgcctgtaatcccagctactggagaggctgatacaggagaattgcttgaaatgggagacagaggttgcagtgagctgagatcatgccactgcactccagcatgggccacagagtgagactccgcctc

SEQ ID NO: 722263 - DNA, 138 bp, Homo sapiens
tgtgccattctagacttccagtatcgtctcagccgtgcaggcttgcagttgcccggcccacgtgactcagcgcctcaaatgaagagacgggtgtggggaggagagagatgtagagagccttggaagaggtctacggag

SEQ ID NO: 722264 - DNA, 329 bp, Homo sapiens
attaaaaaaattttgaagattaaaaaaagataaaacatctaaatgatgaagtacacataaagagacaaacagactatcatgttgcaaacatgaaaacagcatatcaggtataacacttacattcaataccatgggataccaatctcatatcccactaaatcacctggtgaggagggagcacctggatgactcatacagagtttgagccaatcagagaaatgaatggtctccagctctaatttccataaacaaatcctttcagttttctgagctgcagtgctaaaacagatccctaaaaggtaatagcatctaccagactagtttaatta

SEQ ID NO: 722265 - DNA, 253 bp, Homo sapiens
  misc_feature (74)..(74): n is a, c, g, or t
  misc_feature (157)..(157): n is a, c, g, or t
  misc_feature (168)..(168): n is a, c, g, or t
  misc_feature (192)..(192): n is a, c, g, or t
  misc_feature (228)..(229): n is a, c, g, or t
ctgacgtatccgtaccactcccaattaatctttacattttcgtctgcgttagtaaatgcgttaactaggcttanaatgacgcaattctccctgcgtcatggatttcaaggtcttttaatcaccttcgggtttaatctcttttttaaaaggatcgccnttcaaattatnttaattcaaacctacaacttttanaactaaaactttagagcttgtttaatggtcaccttnncattttaatctaatgagcatttgc

SEQ ID NO: 722266 - DNA, 213 bp, Homo sapiens
aactgtggtgttccgtggggactttataacccacttacagcaactggatagatcaaccagacagaaaatcaataaggaaacacaggccctgaatgatgcattaaaccagatggacttaatagatatttatagcacattccatccaaaagcaacagaatacacattattcccaagtgcacacggaacattctctaagattgatcatatactggg

SEQ ID NO: 722267 - DNA, 364 bp, Homo sapiens
  misc_feature (8)..(8): n is a, c, g, or t
aatcgagncggtaccgacagcatcctaaccaggaggactgtaaataagcagatccccggcccagtccctgagatccaattcacatagacagatgggtgggggcccaggaatctgcattggttgtgttgtggtttgagacggaatctggctctgtcacccaggctggagtgcagtggtgtggtctcagctcacggcaacctcggtctcccaggttcaagcaattctcctgcctcagcctcccaaatagctgggatcacaggcaccagccaccatgcacagctgattttggtatttttagtagagacggggtttcaccatgtgggccagggtggtctcgaactctcgacctaaggtgatcaacctg

SEQ ID NO: 722268 - DNA, 110 bp, Homo sapiens
gtactctaagatcccagcaagcctacctatagatcaggtgctgctgagctgtgcgggatctgagtggtcggctcatgggaatgcagtgcatctgatgatgatgtctgcag

SEQ ID NO: 722269 - DNA, 417 bp, Homo sapiens
tttgagacggagtctcactgtgtcacccaggctggagtgcagtggcacgatctcagctcaatgcaagctccgcctcctgggttcacgccattctcctgcctcaggcttccgagtagctgggaggcaggagcgttgcttgagcctgggaggcaaaggctgcattgagccatgaccatgccgctgcattccagcctgggtgactgagcaagaccctgtcttaaataataataagaattattatcatccagggggcctttaattacaatgaatcgttttctgattctaaaaaatattcttcatttgaaaatacttactataatctgttttttctttgtaattctaaactgtcttaaataattttaaatatttcctcccatggttaaatattggacactttcttacttttgcctggttttc

SEQ ID NO: 722270 - DNA, 429 bp, Homo sapiens
  misc_feature (126)..(126): n is a, c, g, or t
taggcggcgcatatttatggtatctgatccgcatctatcgcaaagtgccgttgtatgatggtgacagaacgccggtgagtgaaacgtaatagtcggatgccggcgcattatcctgcctgagggtanacgcgccgcgccattaactataaaaagatgtatgacccggatcacgagtgctatcatccgcccttatgcttagcgcattaaccccaggggcaaataatgaaccacgatatcccgctaaaatattttgatattgccgatgagtacgcgaccgaatgcgcagagcctgtcgcagaggtgaacgcacaccgctggcccactacttccagttactgctcacccgtttgatgaacaatgaagagatcagcgaagaagcccaacatgaaatggctgctgaagcggggattaatcccgtacgcattgatg

SEQ ID NO: 722271 - DNA, 173 bp, Homo sapiens
  misc_feature (87)..(87): n is a, c, g, or t
  misc_feature (170)..(170): n is a, c, g, or t
tgtggagctaaactaagcacagtgcctatagaccagggtgctatgaacaggcggaaagagtgttgacaatcagaaattgtcaatggnaattgcaaataggaagacgcaagggcagaatggcagctgcaagcactgatttgcaattatgccactttcactgggaactctgngta

SEQ ID NO: 722272 - DNA, 732 bp, Homo sapiens
tcccaattagcttggcctacagtcatctgccaccacacctggctaattttttgtacttttagtagagacagggtttcaccgtgttagccaggatggtctcgatctcctgacctcgtgatccgcccacctcggcctcccaaagtgctgggattacaggcatgagccactgctctccagcctaggcaacagagtgagactctgtctccaaaaaaaaaaaaaaaaaaaggggactataacacccccagggaaagggacaggtgggacattcttattcttaatttaaataaattgacaggggaaagttgggccactcttgagcttgtgggtgctcaccaggttgaccccaaaaaaagaagccttccacaaaacattaatttatttccctaatatacccgcctctgtgagttaagggataatgcatcaggactcttgcaaccagacaaaattatttaaaaacgccacttgggggggaggcgggtccctcctggggattcgcctttgtgggagagaaaactgcacagacttgggcaaataatgttttttgtcaccccaaaacgtattcgcgagacatttcattagaacgaagctttaccctaatattgaactccccatttaaacagtttccacacacacttagggagatttttccctctgtgagttccgcagaacaatagttggacgggaatagaaccctgaaacactttagttcaccacgaactattatagggcggg

SEQ ID NO: 722273 - DNA, 442 bp, Homo sapiens
gggacgtctaaaagcatgtgctcatagtacgagaacaaagagatgatctgaagttggaacttacatttaaaagagaagcagagcataaaagttgtgaaattggcagcttgaccatgcaatagaaaagagaaacctattttccaggggtaaattcaagcgggctgcagacatttgcataagtaaagaggagcccagtgttaatagccaagacaatggggaaaatctctccagggcatttcagagaccttggcagtagcccctctcatcacaggcctggaggcctaggagggagaaatggtttggtgggccaggcttagggcccggctgctctgtgcagcctcaggacatggtgccctgtgtcccagccactctagctccagctgtggctaaaaggggccaaagtgcagcttgggcccttgcttcaaggggtgccgatgaatag

SEQ ID NO: 722274 - DNA, 130 bp, Homo sapiens
  misc_feature (116)..(116): n is a, c, g, or t
ctcccaataaataaaccctcgttccacatgaagctgccatcaatgtatttctctcacgcaatgcaacctgcatccactaatcctctctatatagctatccctcttcaacaattccntcactccttgggag

SEQ ID NO: 722275 - DNA, 667 bp, Homo sapiens
aaataccatagcactttcttgcatgccaaagatccctttttaacgaccagtccttttaaaggcccatgaaactccccaaggtgatgtagggtttcttatgaaacagtacactggataaaaaccgacgcaacggtttacgccaagatatctctcatctccctgaaattctccgcgggtgtcatgataagtactggagaagcctacatgttgatagtgaagaatacaattcggcccagagtctcaaatcagtcaatatattaacgttagagcaaggatagtgtcgttacgcggcatatgaaacccacatctctagattctataggcgcatatgttaacagcatagtctggcacacagccctgctcctgtgaagccgttagcaccataagcggcacccactagcacggtttggtgggcgcttcattagaagatgcgacatttctcgcatgttgggaactcacaataataagtgcatacatggatctcgctaactaggcgtcctaatcattttttcccagtcattgtacacggatgggtgtgctttagggtcactcagaagacaggccctaagacgaaaatgggagcaaaatgggtacagcttactgtacacagtggacgtatagtacctttgtgagtggggcttgactcgtgcatcaatcaatgatttac

SEQ ID NO: 722276 - DNA, 433 bp, Homo sapiens
ctgtcagtgcattgtccaattgcatgtgtcacttgggtcctgtgtcacatttgggtaattatgacaatatttcaaactttattatcatatctgttatgctgatctgtgatcagtgatctttgatgttaccatgcaattgttttggggtaccacaaactatacccatataagagggcaaacttagtggatatgtgtgtgtgttctgactgctccactgaccagctcttccctgtctttcttcctcttctggggcctccctatttcctgagacacaacagtatcaaaattaagccaattaataaccctgcaatggcttttaactgttcaaatgaagagttgcacatctcttcattttaaatcaaaagtagaaatgattaagcttagtgaagaaggcatatcaaaagccgagacaggctgaaagccaggcctctgg

SEQ ID NO: 722277 - DNA, 343 bp, Homo sapiens
ggatttagagatataaatataaactgcctcagaaaacctccattctcttatatcttttcatccccttaaatacctactcgcatttcacttacagcacatatattcttatatcctttagagtatagagtgcttttttttttaaaatgaaaatccaggccaaagactaaattcttcaagctttcattccttccttagaacctcatatatttgtgttcactgctgaaaatcccttttctacaaagctcccaaactccacattcttccctttgatactacagtcatttgacacaatgactagagtcagtgtaaatctatatagactgcaaattgcgctctaatctcc

SEQ ID NO: 722278 - DNA, 102 bp, Homo sapiens
ccggggtgtggtggtgctctgcgtacttggcttctcatctttgtagcttgcttccagttcacaactctttccttctgctctccttcttcttcttctttttgg

SEQ ID NO: 722279 - DNA, 371 bp, Homo sapiens
tttttggaaagagcccaaacctttgtgccttggagggagccaaccccccctgacagggagacattggcaaaatagaccaaaaacaaaaggtgttttcatggtatccagcctggatgccaagcccaatttttggtggataccaaaggccagctgtttgggaaaagggcaggatgttttgaggcctggcacccacatttccatgtgtttttttaccaaaaaaggggttttttttttgagggttggacagggggggtgtacacacaggcataaaaaaggtggagaggggtttttgggggcaaaactcagactgtaaattttgtggggttcccttgttttttgagcccattaaataaaaaggttgttttggggta

SEQ ID NO: 722280 - DNA, 176 bp, Homo sapiens
ggacacagtatactcaatcagtacagtctattcctttgtatctcatgccacggcaaaatacagatagcagacagcagcgtctaccccatatgaaagaccttactaacctggataagcagagacatacacctatatgagaactatctctacgaatgccaagacagagcatgggtggt

SEQ ID NO: 722281 - DNA, 946 bp, Homo sapiens
  misc_feature (19)..(19): n is a, c, g, or t
  misc_feature (74)..(74): n is a, c, g, or t
  misc_feature (93)..(93): n is a, c, g, or t
  misc_feature (106)..(106): n is a, c, g, or t
  misc_feature (120)..(120): n is a, c, g, or t
  misc_feature (132)..(132): n is a, c, g, or t
  misc_feature (154)..(155): n is a, c, g, or t
  misc_feature (197)..(197): n is a, c, g, or t
  misc_feature (336)..(336): n is a, c, g, or t
  misc_feature (422)..(422): n is a, c, g, or t
  misc_feature (429)..(429): n is a, c, g, or t
  misc_feature (434)..(434): n is a, c, g, or t
  misc_feature (439)..(439): n is a, c, g, or t
  misc_feature (453)..(453): n is a, c, g, or t
  misc_feature (457)..(457): n is a, c, g, or t
  misc_feature (460)..(460): n is a, c, g, or t
  misc_feature (606)..(606): n is a, c, g, or t
  misc_feature (624)..(626): n is a, c, g, or t
  misc_feature (631)..(631): n is a, c, g, or t
  misc_feature (633)..(633): n is a, c, g, or t
  misc_feature (635)..(635): n is a, c, g, or t
  misc_feature (637)..(637): n is a, c, g, or t
  misc_feature (651)..(651): n is a, c, g, or t
  misc_feature (656)..(657): n is a, c, g, or t
  misc_feature (660)..(660): n is a, c, g, or t
  misc_feature (664)..(664): n is a, c, g, or t
  misc_feature (670)..(670): n is a, c, g, or t
  misc_feature (672)..(672): n is a, c, g, or t
  misc_feature (677)..(677): n is a, c, g, or t
aggatgaaaggcgcctctnccatgatctgtattaatgtttttatttctcggtgcatttgagagaagccacgctntcctctcgagcccagatgnaaagacgtttttntgctgtgggcagcnccctcccccgcngcggggtagggaagaaaattannctgcgggttttaatttatttcatccagtttgttctccgggtntggcctcagccctcagaacaatccgattcacgtagggaaatgttaaggacttctgcagctatgcgcaatgtggcattggggggccgggcaggtcctgcccatgtgtcccctcactctgtcagccagccgccctgggctntctgtcaccagctatctgtcatctctctggggccctgggcctcagttcaacctggtggcaccagatgcaacctcactatggtatgntggccanaaccntttcntgggggttacaggnaaanaanaaccccccagaactaaggccgtttttctgaggacgtcatcggaggctgggcccctgggatgggaccagggatgggggatgggccagggtttacccagtgggacagaggagcaaggtttaaatttgttattgtgtattatgttgttnaaatgcattttgggggtnnntaatntntntnacaggaaagacatncgaannctncttntgtgtnanagttnttggtgactgtcccaccgggagcctccccctcagatgatctctccacggtagcacttgaccttttcgacgcttaacctttccgtgtcgccccaggccctccctgactccctgtgggggtggccatccctgggcccctccacgcctcctggccagacgctgacgctgccgctgcaccacggcgtttttttacaacattcaactttagtatttttactattataatataatatgaaccttccctccaaattcttcaataaaagttgctttt

SEQ ID NO: 722282 - DNA, 427 bp, Homo sapiens
  misc_feature (189)..(189): n is a, c, g, or t
  misc_feature (383)..(383): n is a, c, g, or t
  misc_feature (386)..(386): n is a, c, g, or t
  misc_feature (389)..(389): n is a, c, g, or t
tgctggtaccggatgtgctgtaggccagcgtacggcccatgcttgtggtcatcctcctccgttgctgtccccacaaagtccaagaaggatcggagaccagagccccagcatccgaggtgcatccggcagtcaagggatggggacagcggcccccaggggatgcagacagacgttccctcatgcaagtgncagatggccaggcactgtgtctcctggaggaatgggacagaacacgcccctccctcagaactgccctagcccagcccagagaacgccacacctcagggccagcccccacgtgcgctgcgcccttgctgtcctctgaaggcaggggatgagccagggcagaatcaggtgtgccccatacctgactccaccgctgnccnacngcacaggccttgaggctctttttttttttttttttggg

SEQ ID NO: 722283 - DNA, 1560 bp, Homo sapiens
  misc_feature (443)..(443): n is a, c, g, or t
  misc_feature (445)..(445): n is a, c, g, or t
acgcgtccgcttccagacagcaaccacaactatgcaagctgctgactcgcggtggtttcccagggtgttcaggggctacgcggagaggaagcgccggaaacgggagaatgattccgcgtctgtaatccagaggaacttccgcaaacacctgcgcatggtcggcagccggagggtgaaggcccagagcagtgacctgcagagctcccactgcacgctggacgaggccttcgaggacctggactgggacactgagaagggcctggaggctgtggcctgcgacaccgaaggcttcgtgccaccaaaggtcatgctcatttcctccaaggtgcccaaggctgagtacatccccactatcatccgccgggatgacccctccatcatccccatcctctacgaccatgagcacgcaaccttcgaggacatccttgaggagatagagagcnanaaggacgaagtcacggccatctcaactcccgtggaacatggctggaagaagaacgaccgctgtggaccagagactcgcaggactcccagcgctgtaccggaagggatgctcgcgaggcgcctccctgggggggccccttgcggcggcggccccgttcggcgccgtcctgggccggcccgccctgtggcccgtggatgctcagcggccaggcactgacctgccatgcctcgcctggaggctcagctgtgggcatccctccatggggttcatagaaataagtgcaatttctacacccccgaaacaattcaaagggaagcagcatttcttgttaactagttaagcactatgctgctagttacagtgtaggcaccccggcccagcagcccagcagcccacatgtgttcaggaccctccctgcccaccccctccctgccgtatcgatcaccagcaccagggtggcccgtgtgcgtggggccagcgtcgccgggctgcccagcctggctctgtctacactggccgagtctctgggtctgtctacactggccgagtctccgactgtctgtgctttcacttacactcctcttgccaccccccatccctgcttacttagacctcagccggcgccggacccggtaggggcagtctgggcagcaggaaggaagggcgcagcgtcccctccttcagaggaggctctgggtggggcctgctccccatccccccaagcccacccagcactctcattgctgctgttgagttcagcttttaccagcctcagtgtggaggctccatcccagcacacaggcctggggcttggcaggggcccagctggggctgggccctgggttttgagaaactcgctggcaccacagtgggcccctggacccggccgcgcagctggtggactgtaggggctcctgactgggcacaggagctcccagcttttgtccacggccagcaggatgggctgtcgtgtatatagctggggcgagggggcaggccccccttgtgcagagccaggggtctgagggcacctggctgtgttcccagctgagggagggctggggcgggggccgggcttggaacgatgtacgataccctcatagtgaccattaaac

SEQ ID NO: 722284 - DNA, 399 bp, Homo sapiens
  misc_feature (193)..(193): n is a, c, g, or t
  misc_feature (196)..(196): n is a, c, g, or t
tgccatcccccagggttccccatcacccgaaaggaaaggacgccccaattaacccccgttggcccttgggcctcccgagtggccggctgcaaccccggctcctttccagggtaggccagcttgaggaattttatttattttatttatttacccaaatttgaactagtttgttgggttgggggaaggaggtggntgntacccccaagccttcccagtgttgacaaccccgggggcaggggagggggcccagtccctccccatggggtgcacattgggccctcgggccctcccatgtccctgggggtactgccctttcaaggcttcctccaatttggggtcgggggcccctgggaggtgctttacagaccgctaataaaaaacgatttgggtgaaccccca

SEQ ID NO: 722285 - DNA, 190 bp, Homo sapiens
  misc_feature (132)..(132): n is a, c, g, or t
  misc_feature (138)..(138): n is a, c, g, or t
  misc_feature (170)..(170): n is a, c, g, or t
  misc_feature (183)..(183): n is a, c, g, or t
gagaagcgctctcgccgattccggtcatagtcccgatattcaccccgactacggcgctcacggcccacggtcccactctctgtcattccaatcgtcccctcgacgtctttcatctctctcgcgggaacggtncgtaangcctgcgctctcttctgaacttgtccctgcgnccttcgatcgtanctcgtca

SEQ ID NO: 722286 - DNA, 240 bp, Homo sapiens
tagaagtttcaatagtaggaagaagtcaagagctctatggtataccatagtaactctaggatctttgggtttggttttttaattttaagttccagggcacatgtggaggatgtgcaggtctgttacataggtagacatgtgctgtgatgttttgctgcacttatcaacctatcgcgtaggtattaagcccagcatgcattagccatttttcctgatgctatggaaacttctaaaactagg

SEQ ID NO: 722287 - DNA, 234 bp, Homo sapiens
  misc_feature (71)..(71): n is a, c, g, or t
  misc_feature (131)..(131): n is a, c, g, or t
  misc_feature (133)..(134): n is a, c, g, or t
  misc_feature (147)..(147): n is a, c, g, or t
  misc_feature (150)..(151): n is a, c, g, or t
  misc_feature (175)..(175): n is a, c, g, or t
gaaatttcaacaccacatgttctcactcacgcagaagctaaaaaaaaaagttgatcttatagaagtaaaangtagaacagaggatactgcaggctgaaaagggtagggagaaaggaggaatagtaagacantnntcaatggatacanaannacagctaggtaggagtaataagtnctagtgttctatagtaccgtagatgactatagttaacaatactatattatgtagtttaa

SEQ ID NO: 722288 - DNA, 579 bp, Homo sapiens
tagaggatccgtagctgaggaggagcctgagcgggtccgaaggagccttcagaaactcatggcacttcaatacatagtctgctgacttgcctctgccagagtgtgcttacagatgcccgagacgagatgactaggcatctgcatcatctgtgtcggtcccctccctgagccagcatctccatccaccaccccgtgcaagctcgcgtgccagcatttattcctcccagtgtccaagcccctccaggagggtcctggggttgggccagatgcctgcccagctctgtctcctgcctctgttcctctgcccttcttatagccagaacttgtatcttctcagcaaccttcactttgtccttgtccttttaccattccccatcaaagagtagtctgctataatcactttgtgtaagatatgtctgtcttttggggtcctcagagaaaattgccattttctcggagaattctctggactcctctctgcttcacattccactttcccagacactggtgttactgctagaccaagccctctggtggccctgtccgggcataagagaaggctcaactcttgtctactgg

SEQ ID NO: 722289 - DNA, 417 bp, Homo sapiens
catttcattcttgacattcggaagcatttgtcatcccacaatgacctggttaactagtgagggacggctggttccctgtaattcctgtcatgactacataacgtaaaggtcaaactcagattgatgtgtgatggtactatccactgtagtgcctgctggtacattgccacttttctcctaccctttctgttttatctgcacagaagagtcgtgactgatatcaaccctggcgccacaatataagttattcctggccggtaatcttcttccaagctaatacatgcctttcgaattgctattagttctggccaagctacctgtttcatttgtccctcagatacccctccacggtaatagatgatccgagtgggtttgaagcgtgtggatttgtagaactgaatcagcagctctcgaacc

SEQ ID NO: 722290 - DNA, 391 bp, Homo sapiens
  misc_feature (24)..(24): n is a, c, g, or t
  misc_feature (87)..(87): n is a, c, g, or t
  misc_feature (178)..(178): n is a, c, g, or t
  misc_feature (188)..(188): n is a, c, g, or t
  misc_feature (197)..(197): n is a, c, g, or t
  misc_feature (200)..(200): n is a, c, g, or t
  misc_feature (213)..(213): n is a, c, g, or t
  misc_feature (218)..(218): n is a, c, g, or t
  misc_feature (254)..(254): n is a, c, g, or t
  misc_feature (333)..(333): n is a, c, g, or t
  misc_feature (347)..(347): n is a, c, g, or t
taaacggtacatcccagaattctncgctgtttggtcaagaaggggctggtaaaaaccaaaaagccttaaacctgctcggggccccanggatgctggtggactgtgtgcccctggtggaggtggacgacatgatgatcatggcaagaagctgaccccaagtgtgtcttcacctatgtgnagtgctctanaaccacctngangccacgaacatgnctcgnggcaagaatgtctagcctgcccgcccgcatggccancagtggcaactgccgcccccactctccgggcaccgtctcctgcctgtcgtccgcccaccgctgccctgtctgttgcganaccctcccccccanggacacacgcagcgttttgataaattattggttttcaacgaaaa

SEQ ID NO: 722291 - DNA, 761 bp, Homo sapiens
gggggggagagctttaaaaaaaaaagaacaggcggtcacctctaaaaacaaaaaaaaacaaaaaaaaaaaaaaaaaaacaaaacaaaaaaaaaaaaaaaaaaaaaaaaaaaaaaaaaaaaactttttgggcgcccccgcccccccgatttttttataatccaagttttttttttttgcccccaaaaggggggcttttggcaaaaacccctttttggggggggtttaaaaaaattcggggggcggtttaaaaaaaccgggggggggaaaaccccgggggcccccccaaaaaaaccttgggggaaaaaccccctttttcaggggggggaaaaaaaaaaaaggggcccccaaaaaacctttttaaaaaaaggggcacccccttgggggaaaaaaaatttttgcccgcttttttttttaaaaaaacccccaaaaattttttaaaaaaaccactttttttaacaacaaaccgcaaaagggaaaaatccttttttaaaaaaaaaaaaaaaccccggagggggggggggtgttccccccttgaaaaaaaaaccccctttttaaaaaggggggcccccccaaaaaagggggaaaaacccctttttagggggggggccccccttttgagaaaccccccctctaaatttttttgggggggggggccccaaaaaacaaaataagccccccaaggggggcccccctttataaattcttgggaaaaacccccccttcgggggaaagggggggggggggcccccccccccccccc

SEQ ID NO: 722292 - DNA, 170 bp, Homo sapiens
aatcggaatgtcttctggacttgtgcgctcagagcagaggtcccaggctctaacaatatacaccctgtcagactgctaatgcctcttctctctcatcgggccagttaaagtctccttccctctctcagtcacaggcatccagagtgttagattcattccgttcgcatgtt

SEQ ID NO: 722293 - DNA, 319 bp, Homo sapiens
  misc_feature (76)..(76): n is a, c, g, or t
  misc_feature (120)..(120): n is a, c, g, or t
  misc_feature (234)..(234): n is a, c, g, or t
  misc_feature (237)..(237): n is a, c, g, or t
  misc_feature (260)..(260): n is a, c, g, or t
  misc_feature (278)..(278): n is a, c, g, or t
ggattacaggtgctcgccaccacgcctggcgaatttttgtatctttagtagtgaaaccccggccccatctctacantataaacaaaaatgacccaggtgtgatggcacatgcctgttgtntccctattgggagacagaagcaggaggatttcttgagtccaggagttcaagaccagcttgggcaacatagctagaccctgtgtctacttctcccatgccccgccaaaaaaaagngtnatttataagtgcttaagcatagngtagatactcagtatatnaaaggtgtttggcatagagttgataataaaatgtcgattta

SEQ ID NO: 722294 - DNA, 529 bp, Homo sapiens
actcaatctgatataatgcatctatatcttcatgaatacgttgacgcaactttatcgccggaagcgccgaaacatggttaatacgggcgtacaagatcatttaacgcttcaagaaaggccaaacgatcagcgtcatagagatcaggggaggactcaatataatccagtattactgtcaaagtatcaaaacggctaggagcaccagaagcaagcattgcatcaattcttttagaaaacgcggtgcgttgattcaatccttcattaaacagaatttggccaacttggctcgaagtaacccgctcctgaggcgactgtacctcatcatccgtgagaagcaccataatacgacggtaactctctaactgttgatgcaaagacgctaaaagtggctgggcctgttgtgggtcaggggaatgtttaacgtcaactgaaacggtagtaaccggtgatgcagactcaacaggtttagattgatgcttacaagctacaagtgcccagcatgtacacagattcagtaaaaaagaactga

SEQ ID NO: 722295 - DNA, 102 bp, Homo sapiens
gcttgaatccacaggacttttggaattgtggctgtcagattatagcaatgaattttccagactccgggtccaatgatggaccttcacacgggctgggttctt

SEQ ID NO: 722296 - DNA, 223 bp, Homo sapiens
ctgatgacttccactcaggctgcagccgaacgccaccaccccgggcactactgtgccccaacggaacttcccgcgcctgccggcaacagccgcgagaggaacgaaaacagcgtgcccactgcagtgttgacgatcatgccgaagatgatcaggcacatcaccagccccagcagcggtgacacttcgttggcaatcgacagcatcggcatgggcaggtctgcca

SEQ ID NO: 722297 - DNA, 446 bp, Homo sapiens
ccgccccaggtcgaagtaaatatcccatggctattgtgccagtgtgtcccatgtgcctccctctcaggggcaggttcacaagtctgcagcaacaacatgaggagccaatggaaaccagcatcagaatgcaaaggaggaagagaagcatgccagtggcacaggaggacaccacatgtagacagagcaacagcagccagacaccagcagcaaaataaggcagagtctgaagacaatggagacctctcaagctggatccaaggataaaaagatggaccaaccaccccatgccatgaaggcaaaagtgaagaacagtactgtggacctgccaatcgagaatcagctaattatggcagatagacagagagatgctcaactagtcaccattgcaactgagggtcagatgatcatgcaggataaacctggagcaaggagcggaatgctgctaa

SEQ ID NO: 722298 - DNA, 229 bp, Homo sapiens
tccagcatcgtagagtgctgggctctaccgtactactatgatctgagtcatggctacatgcatgcatgcataactagaagctaacactgagctgtatatctacagacctgtgcactttgctagtatgtatatcacacctacaatggaaacttgtaacaggaacttaataacttttttttttaaacgcttctaatgtgaactttacctaagaggtatatcatgtaacagc

SEQ ID NO: 722299 - DNA, 474 bp, Homo sapiens
  misc_feature (24)..(24): n is a, c, g, or t
  misc_feature (67)..(67): n is a, c, g, or t
  misc_feature (73)..(73): n is a, c, g, or t
  misc_feature (254)..(255): n is a, c, g, or t
aagaccagcctggggtaatatagngggatcctgtgcctctataaaaaaattaaaaattagtcagttntagtgncacatacctgtagtcccagctactcaggaggctgaggtggaaggatcacttgagcccagaaggtaaggctgcagtgagctgtgactgtgccactacactccagcctgagtgacagagaaagaacctgtcaaaaaaaaaaaaaaaaaaacctacatttcaagtactatttcccttctctccnntctaattgctaaagattttctttcatacgcacacactccagtgactggaaaaacgggagttttcagtcaaagcttgacatttagagaaaacaaggactttctgcctttataaatggaaatcaactgtgtgtgaactataactctgcagaggttatgaattcatcctttacaaacaataatgaacttttagtcctgtaataaatgaaatgttattaggca

SEQ ID NO: 722300 - DNA, 424 bp, Homo sapiens
tgcgctcacgttctcaggcggctgctccaggccttcgagggggagctggctcctgtggggggagttggggctcggtgggccagctgggagttggagctattcgatggagttgagtgttttggtggagtccgaatcaggctctttgtcgaagtcctggtctggatcagacatacttctcaaatgcacattcacgctatgctccgatccacctgatgagggccactagactgtagggcttgttcctgaatggatgctgtcgagccaggtcggtgtgagcgtggcccggcctttcctcctgggaagggggcacagccctctagaggcaggtccatgacgccctgcatgccgtcgcctgggcccatgttcgccacgtgcttaaagttggttgcgtaggctatcatttcggatccccattctgggtctc

SEQ ID NO: 722301 - DNA, 417 bp, Homo sapiens
  misc_feature (17)..(17): n is a, c, g, or t
  misc_feature (26)..(26): n is a, c, g, or t
  misc_feature (183)..(183): n is a, c, g, or t
ttacgatgacttctctnttttgcttntacccgctccccctcctctggtcccgctcccgtggtggggcgcggggctgcctgtctttctggtctggagccacaaccgcaggcccccgtcctcgcccgtgaccgacggccggcgctgctgcaggccccctcgcggactccgcactgcgcacccacngccgcgcctcgcgtccccgacccaacagggctaggagcggggaatgcaggactgcggaggggcagggagagacgccctgagacgcggagataaacacccggagacgccgggagagacggggagagacgcacacagagacaccaagacacagacacgcaggttgtagagacaaattcagagacacgagcgaggatagaggcgcggactgagcccgggactgggacccggcggccg

SEQ ID NO: 722302 - DNA, 87 bp, Homo sapiens
aggctaagaatacctttttgaatttgttggtttttacaaaataaaaaggcccccagaagaattgcaaaaaaccagacgagtgaccaa

SEQ ID NO: 722303 - DNA, 856 bp, Homo sapiens
ttcccgcgggtgattttttctccgcgacacttttcctcttgctgtcttggtgccctacagaagtgtggtccctaaaaacaggtggttgctcggcgcgtttctcccgggtgcttcttcccgccgcctggcgcgcccttcttcttttttcaacccgacgccgggtgggtgctccgcctgtctttcttcctagatgaggacagcctcctccttgtgctgtccctctcactcgtgctgtaagtaggtgagaggctttttttgctgggcggctgacgccttcttctttcttcctccaatcactgttgttccccctcctctattttattatcttttctccgcgcgatcgctccccagccgcttgtgtttctccccccaccatcttcttcgcatagaatgatacttctctctgtgtcgaatgaataaaaaacaaacagactcgtggctgcgttgaatatcaactcaacacgtcaccaccacactctggtgttcttctctccccccccaccaaaaaaatatagatgtgtctgctcctcctctcctccttcccctccccccccccccactacatttttttgtttttttggtgtgcgcgagcctctgtttccttctctcctccttcttggtgtgccgcacggcgccccttctcccacctgcgtgtgtgtgtctctgctgcttcctcccgctgcgctgtttcttcttcttcttttttttttcttgtcgggtcgttgttttgtttgcccccccccccccgcggggggtgtgcccccccctctttctggggggggggggaagtttgttgtccccccaaaaaaaaacccctttttttccccccctttttttttaaattttttttttttta

SEQ ID NO: 722304 - DNA, 284 bp, Homo sapiens
cagccgggatattgattcgatgacagacttatcatcgttcagtgatgtacctccgggtcaaacttagatatccaagataggttattcttttttttcttgagacagaatttcactcttgttgcccaggatggagtgcaatggcacgatcttggttcaccacaacctccgcttcccaggttcaagcgattcacctgcctcagcctcctgagtagctgggattacaggcacgtgccaccatgccgctaatctttgtatttttagtagagacggggttttactatgct

SEQ ID NO: 722305 - DNA, 583 bp, Homo sapiens
gaggacccccgaacatgtcgagctatagggaaaaaaaactccttctacttgagaaaagaagacattaaagaggactttatcttgcagcttaggtaccagttaggccacagttgggtagagcaacaagtggtctattggcatccctgattccaggcattagctcttggatggcatttctataactaccctgagccagagagaagccaactgccctgaaggtgagtcctaggcctggcagcactcatcataagctgactaaagagcctttggtccttgaatgaatatcattggtagccaggcagtactccctgtgggcctgtggtagtggtggccatgagaagagactcctcttcttacggaaaggggtaggaagagtgggaaaaactatcttgtggcttgggtaccagctcaaccacagtagaatagaacaccaagtaggttcctaaggtttctgattccagtccctagacaccggatgtcatctctggatgtgcccaggaccatggggaacttgccaccctgaagggaaggatacaagcctggatggcttgatcatctactgattgtagagtactaagggctt

SEQ ID NO: 722306 - DNA, 784 bp, Homo sapiens
gggatccaacgttgcagcgtgccaccatccaccagacagaccaccgtgaccccattctcaaactcctgtaaggatggatgcgaaccatcaaacccaagcgcaggttgacaagttcactatcgagcgggaaaggggagagaagaacgattcaagatcgaactgtgtgacgattggcgaaaaccagccaaacgcgatttatggggtcaaaacaagccaaatggccgataaccttatgcggagattttgtaccaccatgtgtgtaaaaacacttcactttacacgggcgacctgtggttggtcaaaattggggctcgcaactcatggggggtgcgccttgggggcccaaccgcggggtttgggcggcccctgcacgggtgggcccccttagtttccccgcaaaagggatggctctccgcgcaaaaaggcgttaacgcttgctcagcacgcaacattacacaccgacagtttcggcaccgggtggagcagacccaacaaggccgggaagacaggagcgcaatttttacccccctcttattgaggggcccttacacaaacgcgtagtggaagcgcatacacccccacggtagactggtaataggttaaaacagcaaacaaacagctatgtgtcgtccaaccttagtcactaacacgagggagaaacaagttaccccttgtgggctgcacaagggggctgaaagcacaggacagaggtagatgagtatttcccagcagaactcacgacaaatatctcttttggcaaaccagccataacaacaataaacgg

SEQ ID NO: 722307 - DNA, 973 bp, Homo sapiens
  misc_feature (972)..(973): n is a, c, g, or t
tgcctcctgggctcaagcaattctcctgcctcagcctcctgagtaactgggattacaggtgcgtgccaccacaccctgctaattttgtatttttagtagagatgggggtttcaccatgtggccaggctggtctcgaactcctgacctcatgagccccctgcctcagccttccaaagtgctgggattacaggcgtgagccaccatgcccagccatattattactttttttttttttttcctctggagacgggagtctggctctgttcgcccaggcttggcagtgcagtgggcgcaatcttgggctccctgcaagctctggcctcccgggttcatgggccattctcctgctttaagctctcccaagtcgctggggactacgggtgcccaccacccatgcccagctaaattaggggtatcttcagtgggagaggggtgtttcactggtgttagccaggatacgtctataatcttcccgatcttggtgatcggcccacctgcggcctcccaaaagtcctgagattccgggtgtgagcccaccaggccccagcgcgtattcattactttttaacactatgtcttaggatcatatataatggggagctaaatttttcggccatctacgagaatgcttgcagatcatggatactcctgcgggtttgtatacatctacctcatggattacacattcggccgtatattttagcatgggggtggtgaaattaaaccaggttgcttagatagcctcgctatggacgtttcatatgagaacgaggatttgaacgttatactgtggtccaatttagaacacggctgggcttaggagggaatggggtatccgcccttggagtaaacacggtgtatgttggaaggtaacttcctttcgattatatatccacagggagtattcggtcaatgggtcggagagtgccactactgatcactaggcatacgtgtaaatgattatatagttann

SEQ ID NO: 722308 - DNA, 278 bp, Homo sapiens
  misc_feature (121)..(121): n is a, c, g, or t
atagcctggtcctgctggcttaagacctgcccggcggcgtctggtgagctctcgtctgtgccctttaaatctgggggacgagggtgtaaatctcgtgccgttgcctgtacccatatctganagcatgtctccaatggttaacagtctctggcacgttgtaacaatgtatgtaagggaagtcgacaagcctgatccgtaacttcgggataaggattggctctaagggctggatctggtcatgcttgaggcgcgaagcttggtcttgttggctgcatggt

SEQ ID NO: 722309 - DNA, 100 bp, Homo sapiens
gtgcaaccagatttagggcatgataaagataaggacaagtggaaagaggttcaaaagaaggtggttgagagtccttatgaggtgatcaaaataaaagggt

SEQ ID NO: 722310 - DNA, 306 bp, Homo sapiens
  misc_feature (40)..(40): n is a, c, g, or t
  misc_feature (163)..(163): n is a, c, g, or t
gggtaccgctttagagtaatatctgtcccctgaactttgncatgagcggaagcagctgaaactcttaccagaaccagaactgtgtcaaacctcttttccttataaattacccaccctctggtattcctttatagcaacacaaatggactaagacacagctacnacaaagactggaatgttttaacttcatttactctccttcatgacttatttgttactattttcatgtattatgaaattctaccttgattttaccccatagatattattatattactaaacaattagtggggttttttggagggg

SEQ ID NO: 722311 - DNA, 380 bp, Homo sapiens
  misc_feature (64)..(64): n is a, c, g, or t
  misc_feature (126)..(126): n is a, c, g, or t
  misc_feature (128)..(128): n is a, c, g, or t
  misc_feature (219)..(219): n is a, c, g, or t
  misc_feature (268)..(268): n is a, c, g, or t
  misc_feature (286)..(286): n is a, c, g, or t
  misc_feature (354)..(354): n is a, c, g, or t
cttaaattaattatataaccactagcaagacacagaactggtcttgaactcctggactcaagcnatcctcccgcctcggcctcccaaagtgctgggattacaggcacaagccaccacacccaactntntttaaatttttttaacagtgttttggctaggcacagtggctcatgcctgtaatccaagcacattatgatgctgaggcagagagattgcttnagcccaggagttcgaggtcagcctgggcaacatggcaaaacctcatctntacaaaaaattacaaaanttagtcaggcatggtggtgcatgcttgtagtccctggtactcaggaggctgaggtgggaagatttttntgagcacagtaggtaggggctacagt

SEQ ID NO: 722312 - DNA, 306 bp, Homo sapiens
cgtactgacaaagttgaagaggacataagcagctctatgaccaaatagcacagctgccagtagacccccgtgtcaccctgaggctggtggtccctggtagtcagtgtggctctctcattggaaaaggtggatgcgagatcaaggaaatacgagagagtacaggggctcgggtccaggtgggaggggatgtgttagctacctaaattgactggggcgggcattattattggtggcataccatattccatcattgtgtgtgtcacacagatctgcgtggtcatgttggagactctctcccagtccccc

SEQ ID NO: 722313 - DNA, 362 bp, Homo sapiens
gcttatggtagatttgtgtatctaaccagatatataatagaaaaagtatagtaaaagaaatctaaaagattaaaaatggaagccgggggctgtagctcacacctgtaatcccagcattttgggaggccaaggcgggtggatcacaaggtcaggagatcgagactatcctggccaacacagtgaaaccccatctctactaaagatacaaaaattggccggacgtggtggtgcgcgcctgtgatcccagctgctccagaggctgaggcgggagaattgttggatcccgggaggaagaggtttcattgagctgagatctcattactgtacactccagcctgggtgacagagcgagactccatctc

SEQ ID NO: 722314 - DNA, 128 bp, Homo sapiens
cacggatccccatcactagcgtttgcctagctacccctcgaacttggcacttccttagtaactcttcaacccattgttatctggcctctgctctcacaacacggaaaccgtttatggtgagcaggatg

SEQ ID NO: 722315 - DNA, 789 bp, Homo sapiens
  misc_feature (323)..(323): n is a, c, g, or t
  misc_feature (337)..(337): n is a, c, g, or t
  misc_feature (359)..(359): n is a, c, g, or t
  misc_feature (393)..(393): n is a, c, g, or t
aaaaaaaatgtttaagggatcttgggaacctttccggggagggttgttaaccgaattaagccttttagaacctaaaccttctctttttaacaggttaaattgttaaattttccaaccccaggtcaagagagctgcgccaaattattttttaacgaaaagtaatttatttccaagaatcccaattttggttaaatcacaatttgccaccttccaattttaattaagtaactggtctccctacgtgtctccttagagacttggcttgcttaatgggtacatttcttaatccactttttacctcctcaatatatctgcaggtgtgnaatatcagaaatgnagctatacctcctgagagatgnagttatataccagagatgattataaaataaaganttattcttaaaataagccaaaacactattttttttagaaaacgagaaagatcgcatatttagactattttctaacctttcgactgatgaaaggggcagcttaaaaaaactatctatggccaggcgtggtggctggcgcctgtaatcccagcactttgggaagctgagacgggcggatcacggggtcaggagtttgagaccagcttggccaatgtggtgaaaccccatcttctactaaaaatacaaaaattagctgggcccggtggtgcacgcctgtaatcccagctactcagggaggctgagacaggagaattgcttgaacccaggagccaaaggttcaagtgaactgagatcatgccattgcgctccagcctgggcgacagagtgaaactccatc

SEQ ID NO: 722316 - DNA, 212 bp, Homo sapiens
  misc_feature (29)..(29): n is a, c, g, or t
  misc_feature (68)..(68): n is a, c, g, or t
  misc_feature (197)..(197): n is a, c, g, or t
aaaacaacatgtcatagtagactgaaggnagaagcagataagagactaaaacaatttttgattaagcnagatatttaagagctttgcaaagatgtgaaacaatgccacttttcactagttttttttgcgtttgcaagtcatttttcattaaaatgttatttatgttaatttgtaatgagtttgttattttaaaatgnataaataaatattat

SEQ ID NO: 722317 - DNA, 134 bp, Homo sapiens
tcaaaggacctggcggggctccatatccctcgtagcggcagcctgttctgtagatcgataaacaccagtaagtaccccatacaccggaagtaccccatacaccggaagtaccccatacaccggaagtaccccat

SEQ ID NO: 722318 - DNA, 148 bp, Homo sapiens
aagcataatatagccaggactaacccctataccttctgcataatgaattaactagaactaactttgcaaggcagaaccacagctaagcaccccgaaagcagacgagctacctacgaacagctaacagagcacacccgtctatgtagca

SEQ ID NO: 722319 - DNA, 241 bp, Homo sapiens
attgctatccccactgtgcgtcaagtatttagctgactcgcaaactccacggacgccatatgaaatgatctgctgcagatgctctgagccctaggattcatctattcttttcacctgtaggtggcctgactggaattgtattcgcaaactcatcactagccatcgtactaccaccgacacgtactacgttgtagcccccttcccctctgtcctctcactaggagcggtggcgcactcatgt

SEQ ID NO: 722320 - DNA, 242 bp, Homo sapiens
  misc_feature (60)..(60): n is a, c, g, or t
  misc_feature (203)..(203): n is a, c, g, or t
ggcacgagcttgagttcaggagttcgagactagcctaggcaacatggtgaaacccatctnttaaaagaaaaaaaaaagaaagaaagaaattagcgaggtatagtgcatagtggtgtacagctgtgatctcagccactggggaggctgaggcaggaggttcgctggagcctggggggtcaaggctgcagtgagcagtgattgcnccactgtactccagcttgggcgacagagtgagaccctgt

SEQ ID NO: 722321 - DNA, 730 bp, Homo sapiens
  misc_feature (425)..(425): n is a, c, g, or t
aacggctaggtacgaggctgggtggcgcatgtacacgtatctgaaaactggagggccttcaaggctctcatcgctgctcagtacagcggggctcagtgtcctgcgtgctctccgcaccaccccacttccattttggccaaaccaacctgcacccctgaatttctccgcaaatttcctgcctggcaaggtcccagcatttgatgtgtgtgatgatggattcttgtgtgttttgagagcaactgccattgcctactattgtgatgcacatgatgtgatgctgctggggaatgtactccatgagtgcatgcatgcccagtgtggtgcagttgggtgagctttgctgattcctgatatatgtgcccccagccagtacctgggtgttccccaccttgtgtgcatcattgcagccacagacagaacatgtngcccacttgcagaaattgcaacatgtgatgtgaatgtgatgtgcgaattctggtggctgcttggatgcttacttgaagacgaggacttttcttggttgggctgaactgatgtgacattggcttgacatcacatgttgtctgcaccctgttgtggctctataagcatggttctagagccttctttcctgccaggcctttcccaataccaacctgctggttcctcacctgcattaaccagccccagttcctgggctgtcttggggggaagtgaaactgttgtgaggaagatggcccagtttgatgct

SEQ ID NO: 722322 - DNA, 144 bp, Homo sapiens
ctctagaggatcctgtgcttatcatacctacccaaaaacaacccggtcccaaagcttaaaacaagtagactaacatgaaagccacatatcagtggctaccagtggttacaataaatgctaataagatacacttccctatgaaaa

SEQ ID NO: 722323 - DNA, 882 bp, Homo sapiens
  misc_feature (173)..(173): n is a, c, g, or t
accgtcttcatgggtgtgccctcctcgtaaacacccctcgggggcaaaattaccctttggggcggtaatacctttggggcgccgccaacgagggcgagtccaacactcacttcctggtagccctccccctcggggtagttgcgccacacggcttctctcccgtgcggctcagnggaggaacgcaccccacgcaatggggtgtgcactcactctcacacttgttggtctcgataacgcgcacgccgttctgttttcgcgacgtaaaggacacgccctggggaggtactcccatccggtcgtttctcccatttataaaccaggtggcccccactcttctcggggctgcgcccctcgtcgagggatacaaacacccggtggcggtatacagtaaagggggtcggcccaattggaaactcccccactctacgcgctacaatggacagccagcctcgagttgacgcgcactaacctcgagcccgcaccgctcttggaagacaacacactgcgggtgagacaaggcgctggggtgtctcaccccaccgggagtacaggcacagccagggacactccacggggtggcctcccggagtcaacaagctgggaccaatcaacgtcgcgcgcgcatgatctgagggaaccgtgcacacacgtgtgcacactggccgcgcaaggacgcggctatagaatgataggcgggccccacctagggggctcgcggcccgttggagcgatcgagcgaggagtggttgtcgtgagtgcggcagccaattgggcgagtggcggtgaaccaccgacaaggggggcggtactacacagggatccgtgcgcccagccgccaagacagaggtgaacaacaaattccggcgtcccaacaaagacgcc

SEQ ID NO: 722324 - DNA, 115 bp, Homo sapiens
caagctgcagcaagcaaggcagctgaaagagctgctgcagacggagctctctggcttcctggatgcccagaacggatgtggatgctgtggacacatgtcgctgcaggagctagac

SEQ ID NO: 722325 - DNA, 447 bp, Homo sapiens
  misc_feature (7)..(7): n is a, c, g, or t
  misc_feature (14)..(14): n is a, c, g, or t
  misc_feature (445)..(445): n is a, c, g, or t
ctgaagnagctctncaccccagccacccagaccctgtcactgttacaggacacgtgactgagtccagctgtatggcccagcctggcactgatgccacatcaagggaaaggacacactcgtttgcagatcattctggaacaatagatgacagagagccccttgctaatgcaatcaaaagtgactctgcagtaattggaggtctgatagctgttgtgatttttatcttgctttgcatcactgccatagctgttcgcatttatcagcagaaaaggttatataaaagaagtgaggcaaaaaggtcagagaatgtagacagtgctgaggctgttcctgaaaagttgagcttaatattacaaaatggcagttcaatggaaaatccagaaagagtacttcttctggattggcagctatgattttaacataaaattatgatagtttggttttnat

SEQ ID NO: 722326 - DNA, 169 bp, Homo sapiens
cagacaagccacatcgcgcagtgtgagagagccactggacgccacgaagggctggatggcatgctacctccctcagtgacagaaacaagagaccgttaaactcatgctgaataagagttccagacacgtccaaaacgataaagccgcagagttagaaccacagcgtctg

SEQ ID NO: 722327 - DNA, 312 bp, Homo sapiens
cttttagagctcgcgagccaactgccccatagcgtgctcgacgcttgcacaggccaacgcctccttggaatcaaaatgagcatagaaggctccgtgagtcagacccgatgccttaatgacctccgcgatgcttgcaccggcgatacccttgctgcggaacaaacgtgatgcttcatgcaggatcttttcgtggcgctctgccgtcttgctagctggatatctcaccaaggaatctccaatagttgaacatgacgcattacatgatgatcgtcatacttgcgcgatagtatgacgaccatcatgttagatgac

SEQ ID NO: 722328 - DNA, 811 bp, Homo sapiens
  misc_feature (219)..(219): n is a, c, g, or t
taacacagagaactcactgccctagtcatagcatgtaggcctcttattctatggtcttgacatatgcatgagttaaatgccttaaagtagacatacatggaaaaacttacattgtttattggagtataaaatattacccaagtttgtgtcaatgagtagaccagtgagctggttttaaggtacgtgggtgtatttgtggagtaacaaggtaaaatatantgtaatatcagtaaaaaatggttaattgatgatgaagcttattcacccaagatgcctttggtgcaatatgatactggaaaagtcgcataatgtgccgtcagttattacagtcagtaaaatgttgtgtttcttttccagtgtagtgtgtaagggaatataaatttccccatgctagatatagtatcgtgcagtcaaagagaattggcccgcaggaggtcgtcaggaaaggaataccgggtcttacccagtcgtaatgatggaaggctgtctgtgaaaagtggctgttgtacttataaggttaacacatttgatgggatatgtaaagtgagagaagagtttggtgcaaccagtagtaggatatatttctgctagaaaatccttataggtgagatggatttgtgcctattagagatattggggattgggcaataaagaaccgaggtggtaaacttaattaagaaggggggaaagcagtatccaagggtggagcctttgtaaaaatttttctaaaaaaaattgatgactgaactgggccgttagatgaaacaacgcggtgaaaaacgcgccagtttggggcacccgggttgaaaag

SEQ ID NO: 722329 - DNA, 121 bp, Homo sapiens
tcgacagaggtgagtggcctcagggggcttcacctctgcctgccctctacagtgcttgcacggctataccgatgttggttgcaaggaagaacacagaaagcatgggccaccctgattttac

SEQ ID NO: 722330 - DNA, 83 bp, Homo sapiens
tgagcgtatataaaaggcgcttgtgaagacagtaaagcagcatacacaaccttgggtttccttcttccattcgatttacccat

SEQ ID NO: 722331 - DNA, 105 bp, Homo sapiens
tcgcacgggttctgtgctctgtcgccccaggcgggcatgtgcagtggccacgcatctccctccacggcaccctctgcctcccaggttcacgtgcttctcccacct

SEQ ID NO: 722332 - DNA, 298 bp, Homo sapiens
tatgtgttggagaatgacatttgataaatagcaaactgggtgtggtgttgcaccgctatactcccagctgttggggaggctgagacagaaggatcacttcagcccaggagattgaggctgcggtgagctatgatcacaccactgcactccaggctgggcaacagagtgagaccctgtcttgaaaataataataggctggtcacagtggctcatcctgtaatcccaacactttgggaggctgaggtgggtggatcgcctgaggtcaggagtttgagaccagcctggccaacatggtgaa

SEQ ID NO: 722333 - DNA, 387 bp, Homo sapiens
ggccaccagcacagacaaacatactaaagaacaaaggcttttaatccacctccttaatggtagggcctgacggggaccctcccttgggaccctgagccccgaagccctcaggcccgggaccaccggcaccctgggacagtccgctgaggatggtgatacacacctgctccagctccttcctctagtgctcaaactcgaacttctcggccaaggtgttgtcagtccagccaacgagatgacctcttgacacttgtccagaaccttcttattgtccgccttgctgatcttgcccttgagcccctcatgctgcacggcgctcttcatgttgaaggcgtaggaactccagcgcgtacttggctgacaccctttcgcgctgcaccttgtcct

SEQ ID NO: 722334 - DNA, 644 bp, Homo sapiens
ggtgcagtgggggggccggggtgccctggtggccctgggatgggtgaaccgcggtggcttccgcggaggtttcggcagtggatccggggcggggtcgcgtgcgtgcgagcggggccggggctgaggctgagtgagcctcgctgtgcaggcgaaggccgcagggataaggcagtggattgccccggtctaaccaagtttggggccgcttggtcagtgggtacctgcaagaatcaaccgtccgctggcagggtagatcatatctcattcctccctgccctatttcaaggaaatccacgagcatcattcggattttctttctcttggggggggcgcctctacttcctaagggcgcattggcaggtggtccttttggaaacgcgatttagtggggccccaataggtttgccacgcacacagcaacggtaacaccgctggttggcctccgtggtcccaaaggcgggcccaaccctcaagagggtttttccaagttggtgcattttctgtggtgtggcttacaatcacggcggcgggagagcgtaaagaaatgtgtgccccacgtggtgccgcgggtccttagggcgggtttggtttccacctggtgtgcgttcgccaagatgtggcaaggggttcgtgccgctaccgcg

SEQ ID NO: 722335 - DNA, 146 bp, Homo sapiens
  misc_feature (116)..(116): n is a, c, g, or t
gtaatgactcccgtggtctgtgtcagatgtgtattggtctggccagcttctccctgttaccataattctgcctctttccataatccgtggttcagtttgactttgtatatcaagtnggggtttttttttttttttttttttttttt

SEQ ID NO: 722336 - DNA, 980 bp, Homo sapiens
  misc_feature (154)..(154): n is a, c, g, or t
ggtaaggaggctcccaggaaccggagctggaaacccggccgaggtccagccagagcccaagagccagagtgaccccgtcgaccatgtcagcgcatgggggagatggagccaacctgcgatcagcgtaagcggcagcacgctcaagacagcaganttgcagtatgccagggaaagccttgtgctgacgtttactctggccagagtctggttgtctggacctagcaggtggctgggacgagttccacgagtgcagacgctggcggtaccgttaagtgggacactctggccagatatttatctgccatgctactgggtccactgtattctataggctgtctggctaatgctgcctcgcacaagatgggaaggctgatcgtcgtgggacagactacagccagccaacaaggtgacacgccagtcccactgccgctcctcctggggtcatgaccgtgtgcctatgccccagtcagggtaactttgctggcatgtggggggctggaccgaacatgtgttccatctagaagctcaaaatcccgatggagggcaatgtcaaggatcagacgggagcttactgcgtcacacaggttatctctcctggctgccgcttcctggcatgacaactaatattgtcgagcagctcggggtgacaccacgtgtgccttgtgggacacttgaagactgggcagcacgtacagactgtatatgtgggacacacgggtgactgtatgaggcctggctggtgctttcctgacttgcatatctcttgcagtatcgggggcctgtgatggccatgtgccaaggctctggcgaatgttgctaaaacgaggacctggcctgtgcagaactttgcactggcccacgatgtcggacgtcaacgccaatctgggatcttctccccttcgaatggccagctactatccgttgggtacaacaattccactggcatgtccgggactccataagttgaacgtgtggcattc

SEQ ID NO: 722337 - DNA, 178 bp, Homo sapiens
ggggcaatgtggcaaaccgcgtgtttacaaaaaatacaaaaattagccaggcatggtggtcatccctgtagtcccagctgtttgggaggcttaggcaggaggatctttagcctaggatgctaaggttgcagtagccaagatggcaccacttgcacatctagcctggcagcagacaaga

SEQ ID NO: 722338 - DNA, 321 bp, Homo sapiens
tgaccttttgcaaggactctgaatttttgcagtgtatttttggatactgtaaaaaaaaaaaaaagaaacaacacacacacacacacacactcatagcagagctgctctgctcgctctaagggcctctttgaggggaaggacagtcccaaaggggcactgcccgggtgacttggggtgggccctgccctctcctcgaggcagccagctacagccagggcccggtccaagggggccccacagcacagtaatcatctatcccagccagggcacaccagcccccgacaggggtctcaaatggcaacgaggggcatcctctaagag

SEQ ID NO: 722339 - DNA, 770 bp, Homo sapiens
  misc_feature (146)..(146): n is a, c, g, or t
  misc_feature (233)..(233): n is a, c, g, or t
  misc_feature (280)..(280): n is a, c, g, or t
  misc_feature (307)..(307): n is a, c, g, or t
  misc_feature (627)..(627): n is a, c, g, or t
ggcggcattggagtcaagatggaggagtacgcgcgagagccttgcccatggcgaattgtggatgactgtggtggggcctttacgatgggtaccattggtggtggtatctttcaaggcaatcaaaggttttcgcaattctccagtgngagtaaaccacagactactgcagggagtttgacagctattaaacaaccagggctccacagttaggaggtagctttgcagtttggggnagggctgttttccatgattgactgtagtatggttcaagtcagaggancaggaagatccctggatatctccatcnacaagtggtgccttaacgggagcctatacgtggcaggcagagagaatggaccagtggccatgggttgggtcagccgcaatgggtggcattctcctagctttgaattgaaggagctggtatcttgttgacaagatttgcctctggcacagtttcccaatggtcctcagtttgcagaatgacccctcccagttgccttcaactcagttaccttgcctcaccttttggagactatcgacaatatcagtaggacttcgtttcctaggattctttaaacagaacgagttgtggttcgagaaggatttgcgagaagatcaagttanagtctgttttgaaaaccataggtgggacagttatggccaataggctataaagagacattaggctttggtctattaaaggaacacgcggggaggggttgaagataataggttttttttccacttgaattgcttggtgtcaaata

SEQ ID NO: 722340 - DNA, 370 bp, Homo sapiens
cctctaagcttcacctaaaacccatcctctatttccaatatgaccattctttacctttactgtactgatttgtatgtagagataaggtctcaccaagttgcccacactgttcttgacttcctgaactcaagagatcctccagtctcggcctcccaaagtgctgggattacaggtgtgagccaccacacctggcctgtcaggacatcttcacctgttcctgtgtccaagatggtattgcataggttgtcttctggggtttaaatagcatatggtttgtcacatttaactatttaatacatcttgagttaagtatagtatatggtataaagaaggggtccactctactgcatatagtaaggcaggtatctca

SEQ ID NO: 722341 - DNA, 292 bp, Homo sapiens
tgaagaaaaagaaagtataaatcagctgggcttggtggcttgatgcctataatcccagcactttgtgtgaggcaaagatgggtggatcacttgagctcaggagatcaagaccagccgtgggcaacgcagctaaatcccgactctacaaagaaaaactacaaaaattagccaggcataggggcacgctgcctgtagtcctagctacctgagaggctgaggcgggaggatggctggagcccaggaggaggaggttgttgtgagctaagatcacactactgcacttcagtctggg

SEQ ID NO: 722342 - DNA, 517 bp, Homo sapiens
  misc_feature (158)..(158): n is a, c, g, or t
  misc_feature (171)..(171): n is a, c, g, or t
ggcggcattggagtcaagatggaggagtacgcgcgagagccttgcccatggcgaattgtggatgactgtggtggggcctttacgatgggtaccccacttgtggggtgggtggggtattctttccacacgccaaattccaaagggggtttttcgcaaantttctttcccagntggggggacgttaaaaaccaacaggaactaacggaggggcgagacgtctttgggaaacccagggcctccaattgtgaaatacaccccaagggggcctttccccaagccaggcttttccaggggcacggcgcttaagcccttttctgtgcgccaaagctttctgcgggcgcgcaaacggcggcggcctttgggttcattattctccccccaattgggaaattctgggggaaacctttgggttaaaggttaattgggggttcttccaaaagggttccaaggaggggcacaacgggaaaagaatccccttgggaaactcccaatcacaatgtggggccttaacgcggag

SEQ ID NO: 722343 - DNA, 261 bp, Homo sapiens
tgcatatccatgacataatagaaaccttctttccaccctcccatttgacatttctttttaggatgtgggtcttcaacagactgacctataactctctctcacaggggaaatatatcatacaactcttgaaagggaaatttccatgtcagctctttcacagagagagtggctctttgaatgggaggaagaggcattttcttatatccttttgtccattctaagggatagtttggggttggtttcttattccattatatttga

SEQ ID NO: 722344 - DNA, 866 bp, Homo sapiens
tgaactgtttgggcctcggggagccttcttgctggctgctgcaaacatggcttgtgcgggagccttgcctgaagctcccttattgctcaaagtctgcccacgtgagtgagcatttcgtgccggcacgaattgaccagcagcatccaggtcgaggcggatcggtggagccctaagagaaatggagtaggctggcacagtctgccgagcaatgctctgcctagaagcgtgtcctgattatatctccgggcttgagaggatagactcaccatgtttatgagcattattactcagctagctactatgggcggaccgtgctccatggagcgtggtctcggatgcctggctggagggggccgtgctgggaatgcgaagacttcggttccccgtggctttctctcgcataagccgcccttcgctccctcaaggtacgattgtttcgacacgaaaggcacatgaaggctaagtctcttgagaaggaagccgtgagaggcgcacaagatttcccagcgtcgtacctagctcccaggcaggcttgcgatccaggaaactctcttgcaaagcttggagcgataccgggagggaacgaacacgtacaaggtggggcctttgggggctccagttggccgagggatgcacaaatgtagcgtatgaaggaaggaaggaaacggctggaggtggcacgcaggccagctgggtgggattgatggcccggagggcgagagggaagggaccacccgcaggaccaaatgcaggggcctctgacctaatgcaagggggcacatggcagaaagtaggtctgtgctggtccctgtccccggagactcctggccctggagccctcaatctggccagcactgagacccgaa

SEQ ID NO: 722345 - DNA, 419 bp, Homo sapiens
ccagaaacctgggcatcactcttgattagttcttctccactgggcacaatttcttccctccattcaccaagtcttgttgattctaatgcttaattgcctctgaaatatgtttatttctccataaccccatttctccttccataacttgagatattatctctcatggagattagtttaataggaaattcttatcttaaaaaaataccttataaatataaactgtattagtccattttcatactgctatgaagaaatacctgagactggataatttataaagaaaaagaggtttaattgactcatagttccacatgcctggggaggcctcacaatcatggaggaagttcagtgaaggaggagaaaggcacatcttacacggcagcaggcaagagaccatgtgcaagggaaatgccctttat

SEQ ID NO: 722346 - DNA, 463 bp, Homo sapiens
gagtgtgatcgtaaaattaagacgtaatgtttcgctctatgtcatcgtatataggataatccagtaagagtggcatgctactcccaacatcaggcattagttctttcaactcatccaaggatggcttcttattcagtagtttcttatatcaagccaaaggaaaagggaggtccagaatggtacaattataaatagctaagccacagataacaccaatcaaatgcaacaaatcactgtcttcaaatgtcttatcagcaacaaccaaatgagcctggaatctacatcactacctaacacatgccgtatgtcggatccaataattccctcatgatgagcaagaaaatattctttgcgcaccccatcctgcatccacagcatcttctccaacaaatataacattgagtggcttcttgtaatctatgttctttgtattcctaaggacttccattgcagcgtaccacaa

SEQ ID NO: 722347 - DNA, 613 bp, Homo sapiens
aagaaggttcacccgcagaagcgcctcaagaattttctttgccgcgcacacatttgagggcccacacgcggcacaccaacaggagcgcggagaagccacaaacgcacagagaaggtggaatgcacttccgccgagcttgtgtggggagagtgaacctggtggagaggcgggcacactctctctctctctgcgtgttctcccctctcccgcttcttgtgagctctcttgcactaatctccacggagaaggagatcttgcgcacccctccacagagaggagaggcacagcacccgcagagggtggcctctgtttgagaagcacagaccacgcacattttgggagaaatttggccctcttcctctcacagggttctgcttggagagcacagctcctctgcacggcaccacagcctggagactaattcccacggcacacacagctgttgggcccacaggagagccacagctcacaggtggctcccctccacccacatgggcacaggctgtgcacaaaaagcccccggcttttttcagcactttgctgctgggcctctcctgggagctacccgtgtggctcttacgtgttttctttgctaaaataaccctagttttta

SEQ ID NO: 722348 - DNA, 120 bp, Homo sapiens
gctgcactatggctggccgccgtgcagactggctgccagtcgattacgcgatacgctcgcgtaccgcgggacatggtacagacgctcgacgaaggtactagatggaccacgatggggccg

SEQ ID NO: 722349 - DNA, 232 bp, Homo sapiens
ggctaaaatagcgagggatatcgcagtattgtgatactttgtatggcacagatggtaactagacttgtggtgatcatttgaaatgtatagaaatatcaaaccactatgttgtgtaacagaaactaacatagcattgtaggtccattatgcttcaaagacaaacaaaatcatacaaaaagagatcaggtttgtggtttcaaaaggcagggaatgagggggaaggggaattgga

SEQ ID NO: 722350 - DNA, 263 bp, Homo sapiens
gaaggtgctggtacctatacacgaatacgggttaataactgtatacaaactagtcatcttccctctctttacttttatgcaccacctgcattctagatactatccatcacactaaataataataaaaaccaaccaccttcaatctgatcattctgggcaggaaactgaatacagttttgaccagatcttcgagcacgcttcatatacacgaacttaactagttctgttggtggtatcagggttttcgagctcgaataccgtaa

SEQ ID NO: 722351 - DNA, 440 bp, Homo sapiens
agtgtatagtctgtatgatagaacatgttatatgtaaaagtagctcacaatgtactagttaaaggcatcttaacaatccctgccagccagtctgagggatagtgcaaaggtgttcatagctagcctgcaaatcgaggtggtcaagcaaaatctccctacagctgccactcaattagagctaatgaaactgcgcccagatgagtaaactagtctatcagaggcctgttttctctctacattatgcagaataatcttgtgcaaggttagaacagatataatgagactttctgagaatagtcgtgagaatttatggatggagggtgggccgcagggaaaatgataaatgcataatttacactgttttttcactggctagtaataatgactataatatcatgaaacattgttttaacaaatgaattattatgcctagtagtata

SEQ ID NO: 722352 - DNA, 571 bp, Homo sapiens
  misc_feature (154)..(154): n is a, c, g, or t
aactggggacgtatcagtcactggttctagtgtggatgagacagtgagatgaaatgctctaattactcaataggatggcagtattttacatacatttaaacggcggtccagttcctggagaattctacttggcaattgttcacctccttgtgtnttcacatcacttaggtttgttggttttggttttggtttggtttttgggtaacctaaaatcttgtgataaagggtagagtggtgaaagtattggaattctgactactctcattaattattccatctaactgggtagtttcatttaaagggataatatgtttaaaaagccaaaccagaagttcatagctagtattgtatttaaaagcctgctcagggcagatatttttatctgaaatttagactttcacattcataacagtgctcttacttaattgcacatatcaatatcacaatattacgcaattaaccatgtcaagattttactgcataaaatttttaggcaagcccagacaaactcatttctctggaggctgaggtaggaggatcactacagctgggaggtcaagctgtgtgaggg

SEQ ID NO: 722353 - DNA, 186 bp, Homo sapiens
acccttcccctaaaaagggaattccctaaatttaacagttctagccattcctgatcatagtctttcataggccccccttgggttgaatgcctttttttgggaaaattcaaacctgaggccccccctgatcttctcccaactaataccatgggctgcccattcgggatgggggaaaattgctcccca

SEQ ID NO: 722354 - DNA, 414 bp, Homo sapiens
  misc_feature (19)..(19): n is a, c, g, or t
  misc_feature (21)..(21): n is a, c, g, or t
  misc_feature (363)..(363): n is a, c, g, or t
  misc_feature (410)..(410): n is a, c, g, or t
gtttgttttgagacggacngnctactgtcatccaggctggagtgcagtggcatgatctcggctcactgcaacccccatctcccaggttcaagcgattctcctgcctcctcctgagtagctgggactacaggtgctcaccaccacacccggctaatttttttgtatttttagtagagacggggtttcaccatgttgaccagggctggtctcgaactcctgacctgggtgatctgcccacccagggcctcccaaagtgctggggattaaaggtgtgagccaccatgcctgggccctatgtgtgttttttaactacttaaaaattattttttgtaaatgattgagtcttctttatggggaaacaantgggccttcagccctttgcggcccttaattgtgattcccggggtttnattt

SEQ ID NO: 722355 - DNA, 290 bp, Homo sapiens
tactactactaaattcgcggccgcgtcgacttgaagcctacttgatcatggtgataagctttttgatgtgctgccagatttggtttgccagtattttattgaggatttttgcattgatgttcattagggatattggcctgaagccttcttttttcgttgttctttctttgccaaggtttggtatcaggatgatgctgacctcataaaatgagttagggcccggggtaggttttttccgtttttatgccaaactgggggttcaccatgttggccaagctggtctcaaactc

SEQ ID NO: 722356 - DNA, 146 bp, Homo sapiens
ctgcttgtcttcacgccactcctgtgtgcatgtgcctcctcggcctgtccatgtcgctggcggcccctgcaggtcggcgcgtgtgtgtttgagtgtgggtgcgttgctgctcctcccacaggggctcctctccagcgtcgccctgc

SEQ ID NO: 722357 - DNA, 975 bp, Homo sapiens
  misc_feature (975)..(975): n is a, c, g, or t
ggatgagagcgatcgctatatcgctccacggtggctgggatggatgtgcaggagatggagcctgtgatgcaggaggagatcttcgggcccatcctgtccatcgtgatcgtggtgagcttggacgaggtgatcgagttcatcaaccggcgggagatgcgcctggccctgttggccttctgcaagagcaggcaggtggtctgaggcgggtgctgacccatgacacagtcgaggcggggagtccgttctgtgtggataactgacgggctttcgatgtcgctatggaacctggccgaggctgccttgtaggtaggagtgggtgccagtgggatgggccggctaccatggccctgttctccttcgacagcttctcccaccatcgtgcctgcctcctgcgctgccccggggatggagacgctcaccgccctcgcgcttaaaccttgcgggatctgcgcgcgccgtctgaggggtggctggctagggtggcccagtgggaggtgccgaatggcttgttggttgctgcggctgcttctgatgcctcgttgcccacaggggcccaggctcgtcagagcaccatgatcgtgcctgtccgcctgcggtcttggtgtgagactgggggcctgggctccctgggcccgaggaggctgccacggatgggcaagggttcagagggacccctctgagcatgggcctgtctcctcccttgctggggttgtcctctcacgtgcgtgaggctcctccctcagcgctcgcaagcatgaaagccgaggtgggatgcatggggaaatagtggagtgattgtacccccctggcccgataacgggcagcgaattccggagaaaggagagaacggccctttggaggtccgcgctccggggccggtgccgagggccggattggtcgggccaggaactggtcagcaaccgccttggttcatgcttttcgggaaaaaatcgcacccgggggggggaccgtcan

SEQ ID NO: 722358 - DNA, 126 bp, Homo sapiens
tgtgattggggatgaaccagagtccttaggtgaatgagtgcttggcattgacgagttcaggcacctgacttagggtactgatttggaccgtgactttttgtttgagatagagtttcgctcttgttg

SEQ ID NO: 722359 - DNA, 911 bp, Homo sapiens
  misc_feature (20)..(20): n is a, c, g, or t
  misc_feature (61)..(61): n is a, c, g, or t
  misc_feature (63)..(63): n is a, c, g, or t
  misc_feature (71)..(71): n is a, c, g, or t
  misc_feature (73)..(73): n is a, c, g, or t
  misc_feature (79)..(79): n is a, c, g, or t
  misc_feature (93)..(93): n is a, c, g, or t
  misc_feature (143)..(143): n is a, c, g, or t
  misc_feature (174)..(174): n is a, c, g, or t
  misc_feature (197)..(197): n is a, c, g, or t
  misc_feature (223)..(227): n is a, c, g, or t
  misc_feature (229)..(229): n is a, c, g, or t
  misc_feature (246)..(246): n is a, c, g, or t
  misc_feature (256)..(256): n is a, c, g, or t
  misc_feature (279)..(279): n is a, c, g, or t
  misc_feature (288)..(288): n is a, c, g, or t
  misc_feature (319)..(319): n is a, c, g, or t
  misc_feature (330)..(330): n is a, c, g, or t
  misc_feature (332)..(333): n is a, c, g, or t
  misc_feature (336)..(336): n is a, c, g, or t
  misc_feature (342)..(343): n is a, c, g, or t
  misc_feature (346)..(346): n is a, c, g, or t
  misc_feature (349)..(349): n is a, c, g, or t
  misc_feature (366)..(366): n is a, c, g, or t
  misc_feature (371)..(371): n is a, c, g, or t
  misc_feature (431)..(431): n is a, c, g, or t
  misc_feature (447)..(447): n is a, c, g, or t
  misc_feature (464)..(464): n is a, c, g, or t
  misc_feature (485)..(485): n is a, c, g, or t
  misc_feature (494)..(494): n is a, c, g, or t
  misc_feature (500)..(501): n is a, c, g, or t
  misc_feature (525)..(525): n is a, c, g, or t
  misc_feature (535)..(535): n is a, c, g, or t
  misc_feature (554)..(554): n is a, c, g, or t
  misc_feature (566)..(566): n is a, c, g, or t
  misc_feature (570)..(570): n is a, c, g, or t
  misc_feature (583)..(583): n is a, c, g, or t
  misc_feature (593)..(593): n is a, c, g, or t
  misc_feature (595)..(595): n is a, c, g, or t
  misc_feature (600)..(601): n is a, c, g, or t
  misc_feature (603)..(603): n is a, c, g, or t
  misc_feature (624)..(624): n is a, c, g, or t
  misc_feature (652)..(652): n is a, c, g, or t
  misc_feature (658)..(658): n is a, c, g, or t
  misc_feature (701)..(701): n is a, c, g, or t
  misc_feature (704)..(705): n is a, c, g, or t
  misc_feature (727)..(727): n is a, c, g, or t
  misc_feature (734)..(734): n is a, c, g, or t
  misc_feature (740)..(741): n is a, c, g, or t
  misc_feature (743)..(744): n is a, c, g, or t
  misc_feature (755)..(755): n is a, c, g, or t
  misc_feature (765)..(765): n is a, c, g, or t
  misc_feature (772)..(772): n is a, c, g, or t
  misc_feature (786)..(786): n is a, c, g, or t
  misc_feature (812)..(812): n is a, c, g, or t
  misc_feature (824)..(824): n is a, c, g, or t
  misc_feature (826)..(826): n is a, c, g, or t
  misc_feature (850)..(850): n is a, c, g, or t
  misc_feature (892)..(892): n is a, c, g, or t
tgggatagaaatggcagtgnagtgtcctatgaacgaggcgaggaatgggcatggcgctgcngnaccacccngnaacctntgtgcttccaaacnacactatgtgtggtggagacaaagggtgtcgcggtttgcttttaattgcncacagttccttgggcttctcatttgtttttnaagttgtcagtttcttcaaatcnctttccaacccccccccccccccccnnnnnanggcacttaaccaatgtngcatttccanatttacaccaacaaaaaaaattnacaagacanaatagcaaacaatcttgacatttagtaatancaataaaacangnncanccattnnaanttncccgtacaaaccatcanaacanaactttattcacattaaaaaaaccacctttaatttgatttgacctacatatcccccattncatttcacccatttcncaaaccccccaccacgncacccacaccttcaccagacnacagaatcnataagnnattagatctaacacctaaatagancttagaaagncctctcccaaacatttccncacttccctganaatnccccaaaaaacanaaaaaaaacncnccccnngngggccttccccttcccttccncatttcaatcatcaaatccgccagacgncctttncacctcaatctgaacaaggttagaaagagagagttcctctgtnggnnatcttgatgctacacccatgantttggtntttttnntnntgttctgctcnaaaaaaaggncgtttantggaaaaaaaaacnacaaaatttgtggtcgattcagccanactgtgttgagnancagtagagctggaagtgactcggnatcaaataggatctcatagcatgagggctgcaatacatctgntgcatcaagtcttctgtgg

SEQ ID NO: 722360 - DNA, 297 bp, Homo sapiens
cacggagagagcggatatagcgggtcatctcagttcctgatggtcagagtgaatagccgagaggctcctgcccggcccccataggtgatcagagcccccaggggttactgcggcgaggactgtgccgtgggaacagccacatgggctggagagccctaaagctggacctgaggtgaccacatctggctgggcaatggcccgagcagcgtagggagagctagggaacgcaccagccttgcccaaccgtccttcccccaacaccatgtccgaggtgagggtctgggagcccagtcaacc

SEQ ID NO: 722361 - DNA, 320 bp, Homo sapiens
gtccacagccacgtaaagctggagctccacgctcctgtgtgtacctgtcatggctctacttagaccgggacgacgtgaccctggagcgtatcagccgctgcttcctgagaccaatcgcaagagaagagggagcacgcccaagaagctgataatgctgcagaacctgcgcggtgggcgcctctgccttcgtgacatctggaaaccagagcgtgaataactgggagagtgggctccaggccatggagtgtgccttccacctgaaggagagtgtcacctaccggctcctggagctggactcacctggccatggagccggggtg

SEQ ID NO: 722362 - DNA, 546 bp, Homo sapiens
ttctcccagcactttggtcatgctgaggcaggcagatcacttgagtccaggagtttgagaccagaatgcacaacatggcaaaaccccacctctacaaaaaataaaaaaaatagctgggtgtggtggtgcacagctactggtagtcccagctactcaggaggctgaggtggtaggatcaccagagcctagggggctgcagtgagccatgatcacaccactgcattcctgagcaacagagtgagacccttcctcaaaaaaagtgaaaaagcatgtttagaagaggaaatcaaggatgtagcacggcgacctcttgccaaagagattagcacagctagaaggaagccaggtgcttctcctcaaaacagtgaaagaaagaccgcaaagccattttaaagacctttgaggcttccccgctgttacaggcccagaggcctatgagggcagggatgagcccaagacaccttccacagactccctccccagggccacctcaggaccctgctaaccagattctggtgaggtgcttctcagctgccccagctgtgg

SEQ ID NO: 722363 - DNA, 906 bp, Homo sapiens
cttctgaagtttatgtaacaagtaaaatctttaataaataagctagctttaaaattattggtaaagtaatattagacatgtcttaaaaattgccagcatgcatttttgtttgcatttattaatcaagcaatttcatgcttatccctgtcaaataccataaggtgtcaaaatttgccatggagttacaaaactgtaatagaatgatctttgcttgtataatctttaataaataagacattgatattggtttaataaaaatagtcacatcttgaatttagtgagattactgtaacttctaattttgtggttttggtggtctagtccacaggcagtaagatttagtttgagaatgaactgttataatctttgtttcaaaggtaaactataaactatgttcctctcaacgtctgttcagcctgtgcccaggattgaacaagaacagtttggaggttagaagcaagatggagtcaattaggtcagatctttttcactgtctcagttataattttgcaatggcagttccataactttaaatgatgactattgcagttttcataaataatctaggtaaacaattcctttttaacaaggtgaacaattgtcatctaattcaatgcttatttaaagcattatgtcataagacaagtttaaacaggaaccaggaaatcagagagatgtacagacaggtactcacaactaacgaggctaacgagggtccttccggtcaggaaagcttaacagagcaaatcatttcatattgagaacagatcttgtatggtacattcagaactaaaataaaatgaattggtcaagaacgatggatgttccaaacaaaccagaaagtccagctatccattaacatgtcgctatcaaaccaagaaacacgcaacacacagcaaaaacagg

SEQ ID NO: 722364 - DNA, 231 bp, Homo sapiens
taacaaaaagtggtgttggttgggcctccataagtaaattccaagcagtgaggatttggtggtgcctgaaatggccgagggcacagggagtgagctgtatgtgtagaggaattgggagagcgagataaaagtccagggtgtcaaccccttaaaacttgggtgccctgtacattttaatactatctccactctaacggcctttaacagggcttcccggattttcacgggcct

SEQ ID NO: 722365 - DNA, 809 bp, Homo sapiens
gtgcgcggccccgaactcctgccccattctgggtcgcgcccgctctcccgccttgactgcttggggaggggtatctaccgtttcgtctggccccgcccctgacggttccggggcccctgagaagcttagtcccttctttgtcaagccaggacccgaccacggtctatatcatagggtcccaaaccacttatgagacacaacaaccccgagattggtccgaatgacctcgtgagattcgtcgctggctcgttgcactctagtgctgtcgctgtgcagacctggcttagaaggagcccataatggctgagggggtcacttgcgcagaactgagtccggtccgctaggtcctgtcttactacttccaggccaggccccccttaaactgtgttcccccaggaaaggcgggcgcttgctacatgggaaccagtgagccttgccttgcggaaacttagtggctggggccggggggggcttccggtaccatgggggcagcagggaggcgggtccagtacagaggaaccaccgcctacttcggggcccaaggggcacggcgaaggaaggaaggcccggggattgaccttggacggagagggggcacagggaaggaacctaaggcgcccgggcataaaaccgcggccgtgggttcgcgaccgggggtcccccgtggggattgatgagggggcggtcccccgtttgcacgcgaagatgccttaccatttggcgggccttgcgtgtggaacggccctggatggggggaacactcacgaggaaggcaaaagggcagtgggaaacaacacgatgggagatgc

SEQ ID NO: 722366 - DNA, 1536 bp, Homo sapiens
  misc_feature (150)..(150): n is a, c, g, or t
  misc_feature (198)..(198): n is a, c, g, or t
  misc_feature (322)..(322): n is a, c, g, or t
gacgaggaatcactagacggggagagatagtcatggagtaccaaatatcagtgtctacgtattcgtgtgctcctttgttaggcctctcgtccctaacaacatcatggccaagcagatcacctgcgagtccaaaccatgggacaagccaanggaagtgcatcagaacacggacatcttgcgcaccacgaacactcgtcnccagagaagctctgcgtcgctaagaacgcgattgtgaggttgtaggcaacatcatcagtactggtagacatcagaagcattatatgtaatagaagtcctcataatacataagacataccacagnacccatggcaatgaatatacctctagtaatgattgtatctgaatctagctcggcagtgcaagttgacgccatcatacagcgtacaaacggcgtttacgacgtacacacgatgtatatagcactgaatcacagtacaacgtaaggatacgcaggacagatttgggtcacgcatgccatgcatattgcttggcttccatcaaattactggggtttgacctagaaaacacacccctttgacgtacacaatggagctcgtttctacttctccgtgaattgcgcacagggatacttgatcgctctcagggtgaagatctacctagttctgtggattgagaccaaccgcaataatcgatcgtgcagacagtgcttcacgcatgtgccagagaatattatttaccatgggggaccacggaatttcatttgtaacaagaagcctcctgttcggataacttcaccttgggcatgtaaattgaacaaggccctttgcgtagggataatgtaccttagtgggacataacttgggatattgaaacattttgaaaacaaaagagcttacttgaaaaaggaattatagggttgtaacataggaaaaaggtgtaatggttttggataacggaacgcgatggaaaaccttcgcgcatattacactggacaaaagggcaccacctattttcctttggtctaaattgggtcccccggtgtcctcggttgccatgggaataaccatggggacaccatgtggcaacgaacaccttatgcaaggctcggttcgaaggacaacggaacacgtggggctcgtaacggaatgaggtaggggaatgaggcatatagtcgtggtgggcagacacagcgacccattgaggattgaagagagcaaacccactgtggggactttccagacggggttttcatagcggactataacacattggatttgtaccagagaccaaaacataattaaatccaaggaatcgtcaaacgcaaacaacctcatgtcgttgcttttccgcccaacagatttgttgaggccattgtgcgagttggtggagttaaccattgtttgttggtcataactcaacactaggggttttaacgcacccatatatatggcactgccccatcacatttgtccatcacaacgagatcacgggagagagaaaggtagtagagggagggcggacacacgggactataccccgaagaaaacaagcaca

SEQ ID NO: 722367 - DNA, 969 bp, Homo sapiens
tgtggtggcacatgcctgtagctccagccatttgggaggctgaggtatgataattgcctgaaccattgaggaggttgcgaggtgaccagtgcactccagcctgtgtgagcagagcgagactctggcctcactacagatgagaatgcataaggagttggggcctgttaagataacttttctggaggggcttacgggaaaggcattcaagcagaacggaccacttccaggaggtggtctagggcagatgagataccgtgaagctgctttggaacttgtaccgtcctaccactggtggctgcctcgttccctgtctgcggctcattcggtccatagtccatccccaggcctggagatgtaccggactcagaacagaccttcgaatacacttcggcatcttagggactggtcagatgctgtgcttatcatgcacctgtcctcatttcctggtccgataacttcattgccataagtgctcgtagcaagtgtgccaagttgtcattagctggcctagaaggttcctttagcactgttatgattagggccatttggacaggcgctctgtatgtgtattcggttttccaagtggacatcagcatggtggcatcctgattttcgaccaggtcctgtaaaaagcctttcggtgctaccttgctcggtctccgtcacagacttgctatagcttggcctctttcgggacttggcgttcccgagacggtgcgcaatgtgcaggcaccttgctgcctggctcacgtgggtcgaaccagaagcggttggagcccggtctgccggtcctggtccggtcagccgaggagggcttctcgatgtcgtacccttcgtgttggccggcgcccccagtgtctggcgtcgcgtctctttttcacggcttgccaagcctaagtgggggggggccacaccctgctctcctctccttctgcccgtcctttctacctcctcctcgctctggaggtg

SEQ ID NO: 722368 - DNA, 281 bp, Homo sapiens
aagcaccacatcctccattgctgagatctatgagacagagttgatggacatcgagaaggccattgcccactacgagcagtctgcagactactacaaagaccaggagtccaacaactcagccaacaagtgcctgctgaagacggctgcctaagttgcgctgccggagcagtaccacaagaccatcgatacctacgaacgggcagaaccaacgccatgcacagtcctttccctaagtaccatgtccgcggctaacagcggaagctgcatccatgctactcttg

SEQ ID NO: 722369 - DNA, 806 bp, Homo sapiens
  misc_feature (173)..(173): n is a, c, g, or t
  misc_feature (193)..(193): n is a, c, g, or t
  misc_feature (270)..(270): n is a, c, g, or t
  misc_feature (297)..(297): n is a, c, g, or t
  misc_feature (302)..(302): n is a, c, g, or t
  misc_feature (369)..(369): n is a, c, g, or t
  misc_feature (371)..(371): n is a, c, g, or t
  misc_feature (377)..(377): n is a, c, g, or t
  misc_feature (417)..(417): n is a, c, g, or t
  misc_feature (445)..(445): n is a, c, g, or t
  misc_feature (495)..(495): n is a, c, g, or t
  misc_feature (498)..(498): n is a, c, g, or t
  misc_feature (513)..(513): n is a, c, g, or t
  misc_feature (534)..(534): n is a, c, g, or t
  misc_feature (568)..(569): n is a, c, g, or t
  misc_feature (577)..(577): n is a, c, g, or t
  misc_feature (581)..(581): n is a, c, g, or t
  misc_feature (593)..(593): n is a, c, g, or t
  misc_feature (596)..(596): n is a, c, g, or t
  misc_feature (599)..(600): n is a, c, g, or t
  misc_feature (628)..(628): n is a, c, g, or t
agcggctaggtaatttcatgcttaaaaagatgcgcctaggctccctcttggtggctggatttctttttcttcgcccgtggtggccatggttcttaatagggccaccggaatcatggtttctttcttttttttttttttggagatggagtctcgccctgtgacccaggctggantgcagtggcacgatctcggntcactgcaacctctgcctcctgggttcacgccattctcctgtctcagcctcctgagtagctgggactacaggtgaantgccaccacgcccgcgtgattttggtnttttntagtagagatggggtttcaccataggggtcaggcgtgttctcgaactcctgacctcaggtgatccancntgcctnggcctcccaaagtgctaggattacaggtgtgagccaccanacccggccccagagtaagggtttcttgnactttctgtagcccttgttccttagtctgctgtgatatttatgttgaccnttnatcattttctattcngaacccctcttagcatttaangtgaaatctaagaaattagaagtagaagggcttnnatggtttngacncctttgaaattnttnttnnataatttttccagagcaaaaaagcaaanacgctcaataagactaaacaaaacaaattatagtgtcatcatttaatgtccaagggtctattctacctgtagaaatgtttcaaaccctagatattttgagctgaaaatcagttctggaaaaggtaacatggtttttcaccgaaaggaatcaataaagacgtcttaataactaatgtga

SEQ ID NO: 722370 - DNA, 395 bp, Homo sapiens
  misc_feature (149)..(149): n is a, c, g, or t
  misc_feature (217)..(217): n is a, c, g, or t
  misc_feature (319)..(319): n is a, c, g, or t
  misc_feature (370)..(370): n is a, c, g, or t
tgtcaatctgtaacttcgatattgttttattccgggtccatagcgaggacttctcatgctaagctaaaccctttttttcggaacttttcgtttagtaattgtcgctaaagggtaaaacgatatacaaacacaaaccaccaacccaaaangaacttagaaaatgtaacttttgtgtaagtggataaggaagtcaatatttttttaattttagtttgtntgacaatttcctaaggcacccgaaattttctacacagactttcctacctttcttttcataattcagtcgtcgtctctttcgtaataagccccccaccctccngcaggtgtttcgaagttctattgcgaaccaccagacttcgcgcggttaaangtcaacaacgacgagacggcacagt

SEQ ID NO: 722371 - DNA, 134 bp, Homo sapiens
cgggatcggggcctcgttgggtctgggcctcctcctccaggtcttcttcaggatgttcaccgtccggctcacgtttggacctgagctcctgcggggcagctgtggaatccagcgtgtcctccaacgtctgtttt

SEQ ID NO: 722372 - DNA, 617 bp, Homo sapiens
ggcacgagattgttgagagcacacacgagcctgtgctctggcaacaatctgaattatatacttcctggagaacacagggcctggagaaccatagggtttgcccggcgcatttatgaagactctgaagcccatttgcaattgcagggcttctatgaagaagtggccaacccactggtgaccggtgtggagataggagtaccccgagaacgctattctggaccttacaccagaacacttaccagcacttctaccaaggctctgagaacgtggtggccgcgcgcctgtgggaccaagacatgaacaggtttaaagcagatagtgaaaggccatggggccaccaacgaactgacctttacagaggagagggacactgaaggagaaggagaaaggcctgcacgagccggactacatcttcgggaattacattgagcgcgtctgtgcctatcttaccattgagcacatgctgtagaagcgcaagaacgcccatgtggaggaggagaaccttacaggccggccctgtacctgtgcctcaaggtcactctgtgactccactgagctcaataggggtgaccaagcctgaggacaacgcggattagagggccattgtcgcgcctggg

SEQ ID NO: 722373 - DNA, 272 bp, Homo sapiens
tcgtgatccgattcgccactgtgtcgatttgagtgagctcaatctcatcgacgatggtctccccgatcgccaccacgtgggtacggccaccgggatctcgcagagccacattgcgtgcgctcaaccccacgatctcccaaccaggcagaccaggccgagacaccgaatgtggtgacagtgctttcacgtcgctcggtgaatgactgttcgcgggtacctcccgacgcaaatgtacggcctccggatcccggggggtcaattgccgatgaagc

SEQ ID NO: 722374 - DNA, 632 bp, Homo sapiens
ctcctgagctggagcctgggccgaggcttcctgcgggccgcggtggcgtgctgtgtgccggggctgtccgcgctgcctgctcccggtggctggcaggagtgtccggggcccgaggtgcagtgtgcctgccatccctgatgtctgctgcctgcactgtgccggggcccagtgcctgctgcctgctgctggcagcgctcgcctggttctcgagtgccctgctgcgggcgagagtgagtgagtgagcagcatgtggagcctgacgtgtggcctgcttgcctgagtgactgtgggctggactgaggccgaggcagagatcatccagctgctgaagcgagccaagttgagcattatgaaagatgagccagaagaggctgagttaattttgcatgacgctcttcgtctcgcctatcagactgataacaagaaggccatcacttacacttatgatttgatggccaacttagcatttatacggggtcagcttgaaaatgctgaacaactttttaaagcaacaatgagttacctccttggagggggcatgaagcaggaggacaatgcaataattgaaatttccctaaagctggcagtatctatgcttgcgcagaacagacaggaatttgctgttgctggca

SEQ ID NO: 722375 - DNA, 982 bp, Homo sapiens
  misc_feature (104)..(104): n is a, c, g, or t
attagcagtaactgcagtagagttactagttgaacagtggcctgaagcgcgtacacaccgccgtcaccctcctcaagtatacttcaaggacatttaactaaaanccctacgcatttatatagaggagacaagtcgtaacatggtaagtgtactggaaagtgcactgtggacgaagccagagtgtagggttaacgccaaagcacccagaattacacttaggagatttcaatcttaacttgaccgctctgagctaaacctagaccccaaagccgctgccaccttactaccagacaagccttgagaccaaagccatttacccaaataaagtataggcgatagaaatggagacctggcgcagtagatatagtagcgcaagggaacgatgagacacattatacacgctaagacatcatatacgtcataggtagcgtaacccctagtacctgtctgctagtaagtgaatgtagctagaacataacttggcgaggagaggcgaagctaaaaccgccgaaaccagacagaactaccgtaagaacggctaaaagagcgacacccgtctatgtcgcagaatagtgggaagatgcataggtagaggcgacaaactacgagcctggtgatagctggttgtccaagatagaatcttagggcaagtttaagattgccaggagaacctctagatcccctgtcacattgtaactgttagtcgaaagaggacaggtcttggcggtaggaaaagctgtcgaggagtaaaatttatcaccagtgtgtggctgaccagaggcaccaattagaagcgtcaggtcaaaccatactaaaatccaatttaatgatctgtaccatggcaattacttaaaagaagggtactaagaaaatcgcggaaacgtggtaaagagtggcaagagcatctcaccagatatacgtgccggctgcgggaaaaagacaacacgcgaaaccatagggacaggccacaaacaacgtacaa

SEQ ID NO: 722376 - DNA, 661 bp, Homo sapiens
  misc_feature (238)..(238): n is a, c, g, or t
taaggttcaattactttctggtattttggggaggggggtttaatgggtattagaaaaacaggtattggaaagaactaaataatcaaggccgggaagctcaagggaaatatggtaggtggcactccccgtgggggagtggaagaggtggattcccaacatgtgcgtgctcgtgcaaatgtgccctgtgccaaaggagggaaagttcgacagccgcggcatgcccttcgcagttagccanacagggtgattccgggggtcagcagagggtcagttctccatacccggtacctccgtgtgtaacgtggcagcagaaagtgaagccaagagcaccatcgtggttctcgtgcgtgactctcttgtggcatatgggtgggcagcgggcagcctcttccaacgagggcgtgcatccctgtggtgggacggacctcttggcgtgctagcaattgaaccaccacgcgctgcggccagggcgcacatgcccagtccggcccctgcgtggggaccccgctccaagcggtccggtccggggacgtgtcccttcgggaccaggaaggcgtccccaagtgtgcagccgcgaggcattgggatcgaagcgtcctcccgtggggccccgggggtgcccacgtccggagaacaagcgcgatgtccaggcgccccggtg

SEQ ID NO: 722377 - DNA, 905 bp, Homo sapiens
gaattctctttcccatcttgcaagatggcgggtgatgaagtggagatggccagatactaaaagagaagaagccgaagccgagaaggttgatgctggtggcgaggtgaaaaagggtaacctcaaagctaagaaagcccaatgaaggggaagccccattgcagccgcaaacctgtgcttgtcagaggaattggcaggtagttcccgagtctgccatgtgattccagagaaggccatgtacaagaggaagtactcatgccgctaaatccaaggttgaagagaaaaagaaggagaaggttctcgcgaatgttacaaaaccagtgggtggtgacaagatcggtggtacccgggtggttacaacttcgcaaaatgccgtagatataatcctacgtgaagatgtgcctgcgaaagctgttgagccagggtagaaaacccttcagtcagcatgtgagagaacgtgtgagcagcattacccgccgggagcattctgatcatcctcaatgtaccgcacaggggtgagaggctggtgttacatgaagccggtggctagtggctaataacttgtgactgactctggtcctcaatcgggtctctagcgaggagccccagaaatttgcattgcaatacatcaagatcgatgtcggatgtcataatccgaaacatcttctgatgctgacgtgaagaagaagaagtgcggacgcaagacaccagtaggtgaatttcgacctgaaagaaattgccaaacggggggagatgaccaaagtggggccggttgccaatcaggaactcgccgaccggacggggcggaagtacacacagggtgtggacacccgccacaaaaaaaagggcggcggaaatggggcaaaaaacactcggcacaggaagtgatacaccacgtatataagaaa

SEQ ID NO: 722378 - DNA, 314 bp, Homo sapiens
  misc_feature (72)..(72): n is a, c, g, or t
  misc_feature (113)..(113): n is a, c, g, or t
  misc_feature (251)..(251): n is a, c, g, or t
ggcacgagcgagcatcctggcttatccattggtgatgttgcaaagaaactaggagagatgtggacaacactncagcagatgacaagcagccctatgagaagaaagctgccaantgaaggagaagtatgagaaggatattgctgcctacagagctaaaggaaaacctgatgcagcgaaaaagggggtggtcaaggctgaaaagagcaagaaaaagaaggaagaggaagatgatgaggaggatgaagaggatnaggaagaggaggaagaagaggaagacgagatgaagaagaagatgatgatgatgaataagttgg

SEQ ID NO: 722379 - DNA, 156 bp, Homo sapiens
catcgctatagcatcctaaccaggatcatgctccttcattaacgcagcacgtggaagctacccttctgtccatgggatgtgagtccgtctcccttcacatggtcgctcagctgagatcagtatctgggagagcgttccccctatctgatactccca

SEQ ID NO: 722380 - DNA, 801 bp, Homo sapiens
tcctaggtccccacccggcgcgctgggactcgcccgcctacccgtactagtacaccccctgcgcctcgccgtggacaacggggtagagggcatatgtggtgcgtggtgtgccccagcctatgttccccctgccgtgcactagtgctgctgtgctgtgctctgctgcccgaacctgaaagtcctggtgactgtgggtgatgtgtggccctgatgctgccatgctgtgcctgtgtgctgtgtgacgtctacaagtgatgctggtgttccctgtgtccctgcatgtgctgtgcctggcatgtgtgtagtgcatctgatgatctagcatcaccttccccagcctgatgtagctgtagaatgactgcaggcatgcagctaggactgatgctgctcagcagccctgcctggcgtgtacctgagtggactccaacgaagacagaagacattggcacgaaacgcgtgtgtttcgttcgccatgtgctgtcctagggccttgtacctgctgtggccttaggctccctagctctactgtgttccagtccccagatggcgtgcctgtcagggttttgggaatgttcgatgttcctcaggcagaccacattgagtggatgcccatgtggactggcttgtgacagcacgcgtagggctgctgtgccggcagggacgctaggcgtaggcgatgcctgtggtggacgtttgcccaagaggagaccatcaggtgaagttcatccacgaccagatctacccaaacccaatacagaggttcttccacgtgtacgggagatttgcggacatggctgacgg

SEQ ID NO: 722381 - DNA, 628 bp, Homo sapiens
agcggatgaaattattagccaaaatgttggtgtagggtttagtgttctctgtctttttctgaagggccccgtccttccagaaatgtctgttattctaataatgaaaggaagattgtcattcacttaatatagatacatgtattagcgatataagagctatgaagggttccagccttcttttaacatgataagcagggtgtccgaaatttgaatcgcttgttctggtgactgacattcggactggataaccctatgcccttctatactacactgtcgtcccatcagttctctgcttgtaaccctcgtgacgcctgtaggaatgatgcgtgcacgactgggcccactcgtgtcgacatgaccttcctatggatgaacattattgaagcattttaccctgggtcgtactgtcctaagtaatacagcaaggagttaatacaccttaccttgagtgcttgctacttcattggcttatctgatcggaccttgtattcaaacagtagttggtagcatgtctgatggcagaggataatgagtacatatatcctcagtaagtgcattgtttgagtaaacgatccaacagtactagtcttggggactaatagttgcggggaagaaatggtatgactca

SEQ ID NO: 722382 - DNA, 460 bp, Homo sapiens
  misc_feature (1)..(1): n is a, c, g, or t
  misc_feature (39)..(39): n is a, c, g, or t
  misc_feature (107)..(107): n is a, c, g, or t
  misc_feature (217)..(217): n is a, c, g, or t
ngaccaaatatggcataaatttcctgctctcacacctcngatctcgttcccttaaaaaaaatgaattattatctaggcgtcacctctttcttgctgtaactttatgngctcttttcctctgctttgttctcagtccagattatttcacgtatatgttatgagagtggctatcttgagggacaaaagttgacttaaatgattttaaacttaaccgtgncaaacgttccatcactaaaaaaattaagtcaaggttttggatggatcattattgcaaataggcttcttctttttttccccttctctccccacccccagatggctattttaactgtaaattagacttcaaattttagatatgtctctttttcttactgtcatgtcctttcaccattgaaagaaatttaatttccaatctcttttgtttgtatgtcctccatctatgcaaaacaaaaaattgaag

SEQ ID NO: 722383 - DNA, 448 bp, Homo sapiens
  misc_feature (396)..(396): n is a, c, g, or t
  misc_feature (399)..(399): n is a, c, g, or t
  misc_feature (409)..(409): n is a, c, g, or t
  misc_feature (416)..(416): n is a, c, g, or t
  misc_feature (441)..(441): n is a, c, g, or t
acatgcatagcctcccaccactatcagtatcccacaccagagtggtacatttgttacaatcaataaacctccattgacacatcattatcacccaaagtccatagtttacatgaagattcactctggtgttgtacattgtatgggcttagacaaatgtatgatgatatctacaattatagaatcatacagaatagtttcactgccctaaaacttctctatgcttcacctgttcatccctttcttccctaatccccgggcaaccactttaaaaaaaaaattaggttcagggggtacatgtgcaggtaaactcgtggacaagggggtttgttatacagattatttagtgacccgggtactaaggcctagtacccaatagttacttttctgggtcctgtnccntttcccaccntccaccntcaggtagggccccgtatgttattnccttgtg

SEQ ID NO: 722384 - DNA, 952 bp, Homo sapiens
ggcgacagaggcccgttagtttatctcagactcggtctatgttcgctgagtctaaaaagggaccgcggatggaccttgtgaggtgaccatagccgccgaggacacataagtgactgcgcactgatgtggccacagttcgctaagaaggttgccatcgggacgcggtgtgttctagggctttcgcttccgggcttagtgcggctcgcagaagcgtaaaccgagtaacttgagtcgcctcttcacggtttaccttttcccagtgccagagtgcgcctacggttggggtcctcgctcaggcacatgagacccgacacgcgagcttggcggcttcccctgggatcgagggacgcgcactgccagaggagacgaaaggaacccgggtcggaccatatcggaaccactgaccattgcccatggcggccctaggccctagccagtcagaatgtcgactgaatacgtcgcttacgagttcctaagaatactaaccaaaacaatattacatcatggcttataatgcagaccgacaaggtcgactttgctacagtggaatcaggctcaggctaggtagccgggacttgagacaacactgacaaatctaccaagaggaggcagatgcccggagtcgcggcgcgtgcacgtgagttcacccgcgagcttcgggacgaggctccgaggacagaccgtaacggcattcgtcctcaagggaagttccggcaccggaggacccagcctcgtggctgctccgggtcaacggtaactcaggcaggcagtacacgggcatcaagaagggaggcgtagcaggacgatcacgtcctacttcatgttttcaccagttgccccgacgcgggacttcagaggccttcccacgtgcacacctgggtacaatctcaacaccgcttggtccggcttccgcacgctaattggcgcagaggctgaggaagactggaaaagg

SEQ ID NO: 722385 - DNA, 225 bp, Homo sapiens
gaaaacgtcccgcttgaaatctcgtaggtttcgtcgtcattttcttctaacctctcttggttttgtatggctgaatccaccttctccagcccacatagttggatcatatcggcaaccatttcacctggtggtttttgattgttgtcgatataattttcaatcatcttcgaaatattctggtgcccgaaaatcgcaccaacgttatgacaccattcgcgacctttg

SEQ ID NO: 722386 - DNA, 658 bp, Homo sapiens
ggtttcctgcttcatcagtgcttggacggaacccggacgctcgttccccaccccggaccggacgcccatagccagccctccgtcacctcttcacctgcaccctcgtgacatgcccctaaggcacccacggccgccgcagtccagcggccgacgcagccaaccgcacgccgccgaccgccgtcgtccgtataggtcagccgcaccatgcaccgaaccagacagtttccagaccatcgccagggttgcgccccagaaaaacttagccgaacacaagtgcacatccaagcagggccgctggcacaaattctaaacccgcccaggagtcaaacccatgagaaggacttcatacaggccatccatacgttttaccctgctccatttgtcttactacctttgaccgcagcatgacatatggctattgacatacaaccttgtccacaccattacgttctcgttcaccgcaaaatcatcaattgctggacgcagtggcaaacatttgcttgagaaaacaccgtgcactgacacgggccatgcacagaaaacccacacggcagggatggccccgacattccttcccgttcagggaactcgctcacaggacaaccccagaaccgtggtgcatagcactcgggacagcacgcgggcgtgacaagtggca

SEQ ID NO: 722387 - DNA, 139 bp, Homo sapiens
cagcacggtacttagctctcagccctcttgcttggctgagagagctgcttcaccacagaatgcctcttcctagggcaagtatgtcagtgctcatcatgtgagagtgagcagtgctcgagcatattaggtgatgatgata

SEQ ID NO: 722388 - DNA, 384 bp, Homo sapiens
tcagggtatactacataagatatcatgccatctgtaaacatagataattgtatttagtctttagtgcttggattctgtttatatactataacctgtctgattgctctggctaggtataccagtgctatgtagaagggaagtgacaagagtgggtattcttgccttgcttctgatcttaaaggaaaagttttacagtttttcaccattggcatgatgtggggctgtaggcttttcacatatggcctttattatgtggatgtcattccctttttattttaccttttgtgtagagtgtttttatgatgaaagttttaggagtttcgcaaaatgccttttctgcatcaattgagatgatcacataggtttaggcaccaatcacagtga

SEQ ID NO: 722389 - DNA, 426 bp, Homo sapiens
  misc_feature (17)..(17): n is a, c, g, or t
caatatctattaaatanaactgtatctttgactcactattcccatctctaataatctgtcttagcgaaataagaatgttgaatacagatatatttatagaaatatttattgccaccttattttgtaggggtggaaaactgtaaattaaggcaaagctcactgatagaagaatggatgaatacattggagaatacctacttcatgaactatcagatagcattatttcaatatattaataaataaaataaataatcagaaaattataaatgaaattaatctatgttgataaagcaaacatgaccaaaagcacattagttaggttcatgtgtgagtacatggttgtatatatacatacatatgtacatgtagaaaatgtataaagtattcagcctgggcaacattgcaagactctgtctcaaaacaaaa

SEQ ID NO: 722390 - DNA, 220 bp, Homo sapiens
atggccatacgatagaggagaccccattctataccaacacctatactgataatcggtcacccagaagtgtctatacatatcctaccaggctacggaatactctcccatagtgtaacttactactccggaaaaaaagaaccatatggatacatcggtatggtctgagctatgatatcaataggatacctagggtttatcgtgtgagcacaccatatatata

SEQ ID NO: 722391 - DNA, 206 bp, Homo sapiens
gggaagctagctgtgacctgggagcatatgctaccaaggccaggactatattagtaacttatttttatagagatggggtctcacttatgtggtccatgctgttctcgaactcctgggctcaagcagttctcccgccatggcttcacaaagtgttgggattacaggcgtgagtcaccacgcctggccccacactcccttttcttgtt

SEQ ID NO: 722392 - DNA, 847 bp, Homo sapiens
  misc_feature (6)..(6): n is a, c, g, or t
ggaatngcaactccgaaatatgtgctacttagccgcctctattactgtacacctggaaggcaaggttaattaagtcctgtgtggggtttgagggccagaatttaattttggagttttatttaatgtcgggagcagattgggtaataaaatgtatactgagaataagacggcctttgaccttttagagtctagggctgtaaagtgtcttagggttgatgccaaacgagccatgaactgggctggatttttatattgatgaaaaagagcctaaacgctatctgattgggataaagaaaaaggagcattaaccttgactatgcctttggctccagctgactttttaagagtaaattgctggtcaggagggggagggctagttacggaacgaaactgtaagccggaccgggtgtgaggaggggagatgataaaaggattatagggtggaggagcagaggctgaggaagaattgggatctagcttggcctggcgaggaggggaggtgtcgtccctgcgtggtctgacacctctgaaacctgggtgaataatcagagaggtgtgtccctgcaatgattaacacgaagggaaggctgcttccttagtccggactggcgccaaagtttgggttccaggataagacgtgtctccttgttctctacagaagatgaaaggatgaaattagagagggggaaatgagtggggcggcaaattggaaaaagagtaggatagcaggagttgggaagaattaaaaaaggggtaggattgaatggggaggtttgggcgggatggaacgtggttatgaaagcggatattcatgaaaaggacaggtaataaaagtgattacaaaaga

SEQ ID NO: 722393 - DNA, 187 bp, Homo sapiens
atattgtggatctcatgcatacttgactctctgcatcagcagaggtcaagcagcagtgccggctgagcagctggccagcatgatattctcaaagaccccttcatgggtcactctcaccgtgtgcggctgctaccataagcacgtccacctgttcctccaaggaacacttcatgagtggtcctgtgtc

SEQ ID NO: 722394 - DNA, 416 bp, Homo sapiens
  misc_feature (144)..(144): n is a, c, g, or t
  misc_feature (185)..(185): n is a, c, g, or t
  misc_feature (221)..(221): n is a, c, g, or t
  misc_feature (244)..(244): n is a, c, g, or t
  misc_feature (253)..(253): n is a, c, g, or t
  misc_feature (325)..(325): n is a, c, g, or t
  misc_feature (331)..(331): n is a, c, g, or t
  misc_feature (335)..(335): n is a, c, g, or t
  misc_feature (338)..(338): n is a, c, g, or t
  misc_feature (346)..(346): n is a, c, g, or t
  misc_feature (355)..(355): n is a, c, g, or t
  misc_feature (359)..(359): n is a, c, g, or t
  misc_feature (368)..(368): n is a, c, g, or t
  misc_feature (375)..(376): n is a, c, g, or t
  misc_feature (379)..(379): n is a, c, g, or t
  misc_feature (384)..(384): n is a, c, g, or t
  misc_feature (388)..(388): n is a, c, g, or t
  misc_feature (390)..(390): n is a, c, g, or t
  misc_feature (412)..(412): n is a, c, g, or t
tccctcccccaccacacatcagtgtttcctccctcctgctttggtgccttccctttgcaccagcccgagtttaggtttgggccaagcacattacaagtgggaccggtggaacagcccctgggctccctgggcaggggagttttnaggctcctgctctcccatccacctgtctgttttggcctaangccagggtttgagttttgtgaccaaaaccagggggnttccctttccttcccccccctgnggccccagntttggagtgggagggttggttgcccctcccctcaaagctcccccaaaggccagtaatggatccccggccccngtcccnactntgntttggganagggtgagnttcnttttggacncgggggnnttngtccngttncnaaccccataaactttgtagagnggga

SEQ ID NO: 722395 - DNA, 285 bp, Homo sapiens
atgcatttcaagatagatcaaagtcaataatggtataaaggtgaaagaaagataataaacattcaatctaagcttaggtgacggttggtgtcagtgaatttcttgtgttggcctgggagctcgtgggcatggtggggatgggacatggccttcatagccactcatccatgcttccccggaggtcagagaccaaggtttgtccctttctaacatggcccttggagaaggggctcagggccacttccgtcgtaccaaacccgaggaaggccagcgtggcttccacat

SEQ ID NO: 722396 - DNA, 723 bp, Homo sapiens
aagacaattgatgacctggaagataaactgaaatgcaccaaagaggagcacctctgtacacaaaggatgctggaccagaccctgcttgacctgaatgagatgtagaacgccccagtcccaccctgctgctgctctccctctgaccagacttcggctgagggcagctgggggaaggtgaactttaattggagggttggaatctttaactggaagggtggtttcttctttcaacaaccccttctttcctggtgttctttttcggcaaactggtcttctgtgcttccttccgggaaaatccaactgggcttaaaaggctgaagcaactttggaaaccacatttaagggaatggtgagccacatggcataatggtctttaaaaagccatgttgggatggtcccattttgtaatttaccttttttgttgttttgtagcaaccatttgtaaaacattccaaataattccacagtcctgaagcagcaatcgaatccctttctcacttttggaaggtgacttttcaccttaatgcatattcccctctccatagaggagaggaaaaggtgtaggccttgcttaacgagagccaaacagagcccagggagactccgctgtgggaaacctcattgttctgtacaaagtactagctaaacagaaaggtgattccaggaggagttagcaaaaaaacaaaaacaaaaatgtgctgttcagttttcagttaagatata

SEQ ID NO: 722397 - DNA, 671 bp, Homo sapiens
atccgccgcgggctaagatcgcggccgatgtttgctgtgcgggctgcagcacagcaggatgttgtttgtcgcaaagcagcggcgtcgacacacacttgctgtgtccctgctcactgtgctgttgtgctgcttgtcctccgctctcctccccaaaagtgtggatcccccctcgcacagctatcacagtagtagtgtggtattcgctgtcgtctctaggagaagaattacccccatttaatgtttagttagtagcttgctggcggtgttttccagttgtccccgcgcgcgtgcgccgcaccccgcgactcttctgcgtgtggccgcgccccgcccgtcgccgcactctcatgctcacgcgcttttcttttttcgtctgtggcgtggcgcactccctatctcgtctctatctccccaggtcgaagcttccgcgcacgcgtcgctcttaggggttccgcttggtgtggggcgtgcgtgcgtgtgcgtcgtgtgtgtcgtggtatgattattgtctctcgcatgcgcctctctctggcgcttcccacgcgctatcttctgctgcgcgtaatgttagctccaaacaatagcagtagctgacctcattatataattgctatatcaacccctctgttatgccgagcgccctctctggcggccaacaataagcaaaaaac

SEQ ID NO: 722398 - DNA, 236 bp, Homo sapiens
  misc_feature (17)..(17): n is a, c, g, or t
  misc_feature (114)..(114): n is a, c, g, or t
accgctactgtggtgtnccgtgaactatgtctagatactcatgtgcacagaacaaagggtgggggaaaaaaatgtaatgtatataacttgatccccttgctgtacagttggaanataaaattcccgtcctgacgcagcggaaacgaatccgactgagaaccacgaggtggcgggttttttcctaggccttattcagtaggttaaggatcccgccttgccatgagctgtggtgtagg

SEQ ID NO: 722399 - DNA, 123 bp, Homo sapiens
catgttggcgacgtggtcggacatgtaaggtgtctaagacctgtggacagctagaccgctgaccaggtgatgtcacagcctgcagaggtctgcgggcacaaagccagagctacctggagccag

SEQ ID NO: 722400 - DNA, 594 bp, Homo sapiens
  misc_feature (45)..(45): n is a, c, g, or t
  misc_feature (74)..(74): n is a, c, g, or t
  misc_feature (84)..(84): n is a, c, g, or t
  misc_feature (89)..(89): n is a, c, g, or t
  misc_feature (102)..(102): n is a, c, g, or t
  misc_feature (122)..(122): n is a, c, g, or t
  misc_feature (135)..(136): n is a, c, g, or t
  misc_feature (162)..(162): n is a, c, g, or t
  misc_feature (173)..(173): n is a, c, g, or t
  misc_feature (175)..(175): n is a, c, g, or t
  misc_feature (189)..(189): n is a, c, g, or t
  misc_feature (202)..(202): n is a, c, g, or t
  misc_feature (207)..(207): n is a, c, g, or t
  misc_feature (209)..(209): n is a, c, g, or t
  misc_feature (212)..(212): n is a, c, g, or t
  misc_feature (222)..(222): n is a, c, g, or t
  misc_feature (235)..(235): n is a, c, g, or t
  misc_feature (238)..(238): n is a, c, g, or t
  misc_feature (247)..(247): n is a, c, g, or t
  misc_feature (255)..(255): n is a, c, g, or t
  misc_feature (258)..(260): n is a, c, g, or t
  misc_feature (262)..(262): n is a, c, g, or t
  misc_feature (269)..(269): n is a, c, g, or t
  misc_feature (275)..(275): n is a, c, g, or t
  misc_feature (280)..(280): n is a, c, g, or t
  misc_feature (283)..(283): n is a, c, g, or t
  misc_feature (287)..(287): n is a, c, g, or t
  misc_feature (292)..(292): n is a, c, g, or t
  misc_feature (296)..(296): n is a, c, g, or t
  misc_feature (302)..(302): n is a, c, g, or t
  misc_feature (320)..(320): n is a, c, g, or t
  misc_feature (361)..(361): n is a, c, g, or t
  misc_feature (363)..(363): n is a, c, g, or t
  misc_feature (374)..(374): n is a, c, g, or t
  misc_feature (379)..(379): n is a, c, g, or t
  misc_feature (382)..(382): n is a, c, g, or t
  misc_feature (386)..(386): n is a, c, g, or t
  misc_feature (405)..(405): n is a, c, g, or t
  misc_feature (421)..(422): n is a, c, g, or t
  misc_feature (427)..(427): n is a, c, g, or t
  misc_feature (450)..(450): n is a, c, g, or t
  misc_feature (453)..(453): n is a, c, g, or t
  misc_feature (474)..(474): n is a, c, g, or t
  misc_feature (477)..(477): n is a, c, g, or t
  misc_feature (501)..(501): n is a, c, g, or t
  misc_feature (504)..(504): n is a, c, g, or t
  misc_feature (515)..(515): n is a, c, g, or t
  misc_feature (546)..(546): n is a, c, g, or t
gggtgggccggcatccactgtgtggatatatctgtatactcgggngggcgggggacggggcagtgggggaaaantggaaaatanaattntgactatgagcangctgggggggcggtgcaggngtggctgtgaagnnccaaccaaaccacagggcacgggggnggggggggggngnctgggagggcaggnagaacctcctgancagangnggnggccagaacngggcgcgtttgtnctngtgggggtntggggggnggnnngncggtggncggggncgcgnggntggnctggntccncggggncggggctgcgctgggggngggggtgggggggtggggcgggtcgtcgggggggtctgggngngagtggggtgnttggnttngggngggtccgagcctgtcagcngggagatggtggggtnntcggngaagtgcccacttcggagatgtnggngccctctcccagctcaaacancancggcaggtcgttgctcccggtgtncanggagccggggnccagcaggttcagcggctgcgctgtgtagtncaccagctgcttccctgaatccgggctgctgttctctgccttgggagg

SEQ ID NO: 722401 - DNA, 215 bp, Homo sapiens
agtagtggttattcgcctaaaagacggtctggatatatctcatcttcagggacacgaagagttaatgagtcatcacaagagaaatctcctgggcaccaaggatgtggtagtaaagtgagatatagtaaacggtccactttagatacttccagaccactaagtgaaaacccaattacacacagagagttccaaggcctatttttgccttaatgagc

SEQ ID NO: 722402 - DNA, 813 bp, Homo sapiens
  misc_feature (54)..(54): n is a, c, g, or t
  misc_feature (61)..(62): n is a, c, g, or t
  misc_feature (108)..(108): n is a, c, g, or t
  misc_feature (162)..(162): n is a, c, g, or t
  misc_feature (187)..(188): n is a, c, g, or t
  misc_feature (190)..(190): n is a, c, g, or t
  misc_feature (193)..(193): n is a, c, g, or t
  misc_feature (209)..(210): n is a, c, g, or t
  misc_feature (218)..(218): n is a, c, g, or t
  misc_feature (220)..(221): n is a, c, g, or t
  misc_feature (224)..(224): n is a, c, g, or t
  misc_feature (234)..(234): n is a, c, g, or t
  misc_feature (238)..(238): n is a, c, g, or t
  misc_feature (241)..(241): n is a, c, g, or t
  misc_feature (284)..(284): n is a, c, g, or t
  misc_feature (332)..(332): n is a, c, g, or t
  misc_feature (336)..(336): n is a, c, g, or t
  misc_feature (346)..(346): n is a, c, g, or t
  misc_feature (458)..(458): n is a, c, g, or t
  misc_feature (466)..(466): n is a, c, g, or t
  misc_feature (519)..(519): n is a, c, g, or t
  misc_feature (525)..(526): n is a, c, g, or t
  misc_feature (530)..(530): n is a, c, g, or t
  misc_feature (544)..(544): n is a, c, g, or t
  misc_feature (555)..(555): n is a, c, g, or t
  misc_feature (592)..(592): n is a, c, g, or t
  misc_feature (594)..(595): n is a, c, g, or t
  misc_feature (599)..(599): n is a, c, g, or t
  misc_feature (607)..(607): n is a, c, g, or t
  misc_feature (614)..(614): n is a, c, g, or t
  misc_feature (641)..(641): n is a, c, g, or t
  misc_feature (643)..(643): n is a, c, g, or t
  misc_feature (689)..(689): n is a, c, g, or t
  misc_feature (696)..(696): n is a, c, g, or t
  misc_feature (706)..(706): n is a, c, g, or t
  misc_feature (711)..(711): n is a, c, g, or t
  misc_feature (713)..(713): n is a, c, g, or t
  misc_feature (787)..(787): n is a, c, g, or t
tttaattgcaaacatttttacacaaaagtagttgcactctattttattaagatngatattnntaagttatcagagacatttaagagctagaggccatttattccaacngtaatgcattctatgctgaaagtaaactaagttttctgaccatgatgtcctggntattttttttttctttttttttttnncnagnctgctcttttctgggnntaccgggncnngangggctcttcntgcngtntcccagcagtgtgtttccagatttattcttggatgtggttggngctcccaacatttagcctgaactaatgttacagctcaatgtgaaacantgcngctttctgtnacagctgcctgtggttaatgagatttaatacagggggtacagttacaaatgatagcattttagaagaattataattgccatatgatttagaattagtaatcaaatactttantaacaganacgtgtattctatatttctgggaggggagtggcatacttcaaaatagtcactnttttgnntgcntgatatgttaattntttctttgggngtgtgagaataaattgcgttttttcccctaccccttngnnttcnctcctttngaaatgntttctataatggtgttctccaacatgntnttagctttattacattattgtcattaaaatatacatatacatatangtggacnctaaacaganttggnanacatgatataaatatacacatggccaaacactgttcagtttcatttaactaaattcaacaaatatttattgggngcctactacttgcagatcccatgtta

SEQ ID NO: 722403 - DNA, 173 bp, Homo sapiens
cggatcccctccgtggtataccagtcgctacgagggaaggatacatcgccctgagctgatggatctgcgctcctggaccgccggggacacgggcggtcagatcacccagcgcaatgtgtggagtgcggccctgtgggtgctgtgagcagcggtcgagcctaccgtggagggca

SEQ ID NO: 722404 - DNA, 285 bp, Homo sapiens
  misc_feature (21)..(21): n is a, c, g, or t
  misc_feature (31)..(31): n is a, c, g, or t
  misc_feature (58)..(58): n is a, c, g, or t
  misc_feature (64)..(64): n is a, c, g, or t
  misc_feature (69)..(69): n is a, c, g, or t
  misc_feature (78)..(78): n is a, c, g, or t
  misc_feature (81)..(81): n is a, c, g, or t
  misc_feature (93)..(93): n is a, c, g, or t
  misc_feature (95)..(95): n is a, c, g, or t
  misc_feature (118)..(118): n is a, c, g, or t
  misc_feature (127)..(127): n is a, c, g, or t
  misc_feature (136)..(136): n is a, c, g, or t
  misc_feature (146)..(146): n is a, c, g, or t
  misc_feature (159)..(159): n is a, c, g, or t
  misc_feature (174)..(174): n is a, c, g, or t
  misc_feature (202)..(202): n is a, c, g, or t
  misc_feature (245)..(245): n is a, c, g, or t
ccccagctccccttgtttttntggggccttnaacagatcccccactgtcccccccctnttcccntgttnttttggttnaanaccccccccccnanacccctttggtgccctatttgcncagcccgtngtcttcccnccagtttttngagggataggggncattccatcccaagnttcccccttacccccccctacccttttnaggggctttggggtggggctgggccaaccaaagggactgggtnttcccttcttgggctaataaaattgtttctttgtggccta

SEQ ID NO: 722405 - DNA, 612 bp, Homo sapiens
  misc_feature (521)..(521): n is a, c, g, or t
  misc_feature (567)..(567): n is a, c, g, or t
  misc_feature (583)..(583): n is a, c, g, or t
  misc_feature (607)..(607): n is a, c, g, or t
gaaaaatacacattcagaggagacaaaaaataaaaaacaatgatgcatgcccacaggatctagaaaataacttcttaagggcaaatctaggagttattggccttaaagaagagatagagaaagagataggaatagaaagtttgttgaaagggataataacatagaacttcctaaacctacagaaagatatttatatccaagtacaagaaggttatagaacaccaggccaatttaacccaaagattacctcaaggcatttaataatcaaactcccacaggacaagggtaaagaaaggatcctaaaagcagcaagagaaaagaaacagataacatacaatggagctccaatacatctggcagtatatttttcagtggaaaccttacaagccaggagagagtgacatgacatatgttaaagtgctgaagggaaaaaaccttttaccctagaatagtatatccagcaaaaatatccttcaaacatgaagaataaacaaagacttcccagacaaaccaaagctganggatttcatcacactagactgggccataagaaacgcttaaggagtnctttggcagaagaacngacattatgagcaccaagatcttntaagg

SEQ ID NO: 722406 - DNA, 661 bp, Homo sapiens
tgtttcacttgcttctctcattctctcatatctgctgccaagtaagatgtgccttttgccttctgacatgattgagaggcctccccagcaatgtggaatgtgagtccattaaacatctttttctttatgcattaccctgtcttgggtatctctttactagcagtgtaaaaatggactaatacactaaattggtacaggtagagtcaagtgctcctgtaaagatacccaaaaatgtggaagcaactttggaactgggtaacaggcagaggttggaacagtttggagggcttggaagaagacaggaaaatgtgggaaagtttggaacttcctagagactagttgaatggccttgagcaaaatgctgatgatgatatgaacaatgaaatccagactgaggtggtctcggacagagatgaggaacttgttgagaactggagtaaaggtgactcttgttatgttttagcaaagagactggtgagttttggggccctgtcctagagattgtgaaactttgaacttgagggagatgatttagggtatcttgtggaagaaatttttaagcaccaagcattcaaaatgtgacttgggtgctgttaaaagcatttagttaaaaaaaaagacagagaactaaaagttcaaaaaattgcgctgacatgtgatg

SEQ ID NO: 722407 - DNA, 765 bp, Homo sapiens
ccgccgccgcgccatcatgagggaaatctgtgcacttgcaggccgggcagtgcggcaagcaaatcggcgccaagttttgggaggtgatcatgcgatgatgcacggcatcgaccccacgggcacctaccacggggacatgcgacctgcagcttggaactgcatcaactgtgtactacaattgatggccacctggctggcaagtactgtagcccctgctgccgtgctctgtggatcttggagccctgtgcaccagtggactcctgtgctgctctgtgtggcccttctgggcatgatcttcctggcctggacaacttcgttttctgtgtcagatgtggttgcttggtgaacaacttgtgtgccaatggtgtgcactaacacatgaatgtgctgctggatgcttggttgtgactccggttgctggattgttgtagagaacacggatggcttgagacgcttgttgaccttgcctgcatgtggtttcccatgctagacccactccctgggtggcggggacttgggtctagggattgggtaccctcctcatcagcaagatcctgggagggagtacccacgacaggatcattgaacacgtttagtgtggttgccttcgccccaagagtgtcagaacacagtgtgtggagcccctacaatgccaccctctcagtccaccagctcgtagagaaccagacgagacctagtggcattggtaacgaagctcctagacatttggtcagaacctatagtgaccagccacttgtgactgac

SEQ ID NO: 722408 - DNA, 128 bp, Homo sapiens
  misc_feature (45)..(45): n is a, c, g, or t
ttttttttttagggggtcatttttactttatttaagggaaaaaanggggggggggacaacagtaattttcataatacacagtagacaagttagcacggcaaaaaaaggggcggccggggtaccgagct

SEQ ID NO: 722409 - DNA, 465 bp, Homo sapiens
aaaatagtaaatactagaaccagaatctactcattcaaaacatatttattttgtgcttattaacttaagacattgtcttttcacacacacacacacacacacacacacactcccacaaactcttacactaatttagagaagtgtacaattaatataagtactatgacagtggaagtatagggcactttgaaattataaagggacccctatcctggtctatagtatactcaaggataaagaaaagtaaactagataagaggatgagggtagagtaaattgaagtactccaggcaatggaaaagcacgacccacaaacctaaggaaggaactgggactgcctagaggcctattacagaagcttactggtagtacagcctataggaagtagggatgagagcagcaagacctgaaattggagaaacgaaggccattaagagtttcagaaggagtttgccattcttaatt

SEQ ID NO: 722410 - DNA, 189 bp, Homo sapiens
gtctagcctcgccatgcactggctggcttggggtgccatgggtgacgaccccagggatctgcttccctggcaagacttctagatacagaaatcattttgcccttcaccagcccaagactcagtcttttgacccttcccttccccacattcccacacttgctccctgggtgatctcatcccacttcacag

SEQ ID NO: 722411 - DNA, 110 bp, Homo sapiens
gccatgggtctaaatctaattggggtcaggcactttttcggcgggttcatggtcatcatcgcccgatttcgcacagttttcaattcgccgcacgaacttcccaatttctg

SEQ ID NO: 722412 - DNA, 1270 bp, Homo sapiens
gttagccaagattacaatgaaggactactccaaattaggagtccatgacatgaacgaccgcaaacgtctcttccaacttatcaaaattattaagattatgcaagaagaagataaagcagtcagtatcccagagcgtcatcttcagacaagcagcctgcgcatcaaatctcaggaattaagatctggccctcgcagacagctgaattttgattctcctgctgacaataaagacagaaatgccagcaatgatgggtttgaaatgtgcagtttatcagatttctctgcaaatgaacagaagtccacttacctaaaagtgctagaacacatgctaccagatgattcccagtaccatacaaaaacaggaattctgaatgccacagctggtgattcctatgtgcaaacagaaatcagcacttcactcttttcaccaaattacctttctgcaatactgggggattgtgatattcccattattcaaagaatctctcatgtttcagggtataactatggaatcccccattcttgtatcaggtaataaattttatctttctttcttttgagggaaagtagcctcaggcaagggcaggcctctccttcatgtccagcagacagcatctactccttatttatagtaaatgaatataacagaaattatcatgaacagcatttgcatcaataataggaatacctggatgtgggaaaattaatgagaaattgggactttctaggtgggagaaagatgatattgttcatgtacatcagaacagctgctacttgccaggatctgtagcagatctgtttctattgtttattatagcgtaacatgatacatctagtacatctgtgaaagtgaaatagttaacccttctacagtggagaaaaaaattacacaatccacaggacttttttaaggttatcaaattcacttaacccaaccaggagacttaaagatgctttgttaaaaaacaagggcatgtagtttaattaagtaggtctttggggcagttagttcacctacacacattgaaatatgatcctaattttgagtgctttctacaatttcaaccccggaaaaaacagataattttggtgattacaaacagtaagacattgttggtggagatgagagtttgagagtcagggtgacaataagttatttttacctagtgtttcgagttagaatttgaaataaggtccctaagaggtgaaataacaagtaatccctagtactaacaatggtataataggaaatatgttcttttaatcttgt

SEQ ID NO: 722413 - DNA, 306 bp, Homo sapiens
tgagtggcatgtgaaggagtctgtggattagattctaacaatgagtaaatgataacttttctgacctggatagttgtactgtggttatgcagtaagagtgtcctaatatttaggaaatataagtaacagggcatcacgtgtgcaactttcaaatggttcaaaaatgtcaacaactggagtactgggtaaaggtatacaggagctctatgtactatttctgaaaattttatgtaaatttgcatgtccaaggtttttttaaaaggatagtgttttgttacatgaaacggtattgagtggccatgtgag

SEQ ID NO: 722414 - DNA, 472 bp, Homo sapiens
cagttttacatgcactcatgtgtgtgtgtgtgcgtgtgtgttcgttctatgcagtttttatcacaagtggagatttgtgtgaccaccactataaccaaaatacagaaatctgtttcatcaccacaaggctcccttatgctatcccttgacagctagatccacccttattattacattttaaatttttataggtttgatttttgaatagtcacatagttcaaaaatgttttaaggttcatagagaaacctcagtgaaaagtcttcttttctgtcctcttcttcacagccatctgtttctctccttcacagaccatcagtatcacccctctcgggcgtgtctgtaaaacttataatgtatttgtaatagtccacacatatttgtctaatttccttcctcttatgtactcacatgtagaaatctgtacgccctgtaagcaaaaagaataatccatttaagtttatcaaaaagatc

SEQ ID NO: 722415 - DNA, 584 bp, Homo sapiens
  misc_feature (584)..(584): n is a, c, g, or t
taactaggcaaagaactttattaatcttggttccaaactgtgattcccaggcttcttcggcttaattagctgcaaaaaatgaatggggtataagcaaaaactgaaaagagctgcaggtgtccagggggctggggcttaaaaatattagagatctagattttatcagatccataaacaaaaatttcttaaaaagcgagtcataatataaaatagcagctcccagtaacttcttcaggtttatatctctcgagaagtggactcaattcagttggcctcattctgggaagcctcatcaaaattctccacaagatcggggaacttcatcatcatcatcctctccagtagcaagtgtggggcttttccatccacagatggttggggcagagcttcggccagtctccttaaactagtcagactatccgcaccaagcgggttaaagatgctggggtacgcatttctggtcagctggcttcgtctcagctagggcctgtaagggtgaaaagtgtccgctgccagagatgcctgaacttcagggttggtcacaaggggatcactggtccctgggttggtaaacttattcaccn

SEQ ID NO: 722416 - DNA, 1818 bp, Homo sapiens
gactgctgctggtagtaggacgctctgagactggtcttggagcctggctctgcagccggtgacgccttctccgtcgtcgatcatacgctctccgtgggaggccgatgagtactaatgccagaaagaatgtccacccagacaagagggaaggttggctcgcattccgtatccgtggtactcattgactgagaaaatcatctgtccctgtccatactctgagtagtcagcatgccgttccggctgcatacttcttgcgcatgcctattgaagaagaagagcaatatacaccacgagagagccagggctgcaacggtgacaccgatgtggcgaacgagcgatagagatgcgagagagagcgcatgtaagatcatacctagtggtcctaggaggtaagtcgatgaatgacccatacagatcgtatatagagtagtagggtccgaacatagccaggggacaagtcgtggagagaggcacttggaataacagtgggggcaagcttagcgatgtgagtcgccggactaaacgtaactagaagctaccctttgcaacaatagcacgagtcctacacaatagtgatctactgggatccatcacatgaggtagactcaaatgattgcgactaattgtaccacacaatgtggttgaggggcaaattcaaatgattttacgcgtgaggctgaggaccatgcagacataaatgccaattccaccatgagagaaagcaaattgaggaaaggagtagatgaatagagcaggacttacataaacctaccattatagtgatactcagccgaaaaccatgtgcagtaccaaacaaggaataatccaagatactatcctatgtgatgggccgttaggacaaagttcgcgcgttgaggcagatccattagcaagacaacatacttcgccaaattggggtagaacgttcaccacttggtgggatgaaccttgggccaccgcctacataactaaggtacatataagacttctccgcgatacaattttacgatgtacaccaggacgaaaggaaagaacgccaccttatagaccatgggcaataatcgcctattgggttgggagaagcaccatttccggccaggaacaaatgcccccaggattctggtgcacccacaacccagatagagcaccaataaatgaaggagagagcagaaggcgaatcaccatcaacccccaagaggcgatgcccggaaacccaacagggaacatgagcgccaggacacggaactggacagatgagcaaacacgatcggcagaaagcgggcaatgcgcacgcacaaatatcaaacaagaagacagatggagaaccaaaacgcgataccaatctaaagtcgcgagaacaacacagaacccacaggcacacaaaacgagagcagacacaaccgacgaacaagagaaacagatgcgcaccaagagaagaccaggacacaccacatatcaagacatgcccacgagaccacgcgaactaagaacaacaatgcaggaaaaagatacaacaacaacgacaagcacacaatggagaacaaccagcacaacaaaaaaaaacaaacaaacaaatcacaaacacaaagggaaccaaaacaagagaacaaacgcagacgcagaaaaagcgagacaatcacagaaagagaaggaagtaccaacaacacaagacacacaaacaagactaaccaacaaaaaccctcacgaaaaaccaacaaaacagacgtacaaacacaaagaaaagacaaaaaaacacgaacagtagacaaacaagaaaaacgagacacacaacgacagaaccacaaccaagacaaacag

SEQ ID NO: 722417 - DNA, 399 bp, Homo sapiens
aaaaaaaaaaaaaaaaaaaaaaaaaacaattgtgtgcgcgcgcgcgcgcctggggcccttggaaaaggtttttaaaacacacattgggtgtggggcgcgcgggggccccagagaggcgatgaaaggagaacattgggggccaaaaaaggggtaccaataaggagagaactcccggggcaaaagagaaaaggggggtgggaattttatcacaaaataaaaaaaccgcccggggggggaacacacagagaagtgtgtctttagaagaacaaatatcccaagagagggagagagatctcaagaggggagggcaacaataaagggggagctctatatacacaacggaggggcccacaaggagaagcacaggaaatccaaaattaacgccccagcctcggggtg

SEQ ID NO: 722418 - DNA, 1120 bp, Homo sapiens
attatgaatgagggagccctttggtggcaacatacaggtgcccccattgcctacagtgctgcgccctgcgctcccagagtaggcagcggatgatagaggggtacagggcttctcaagcctgatagttttcttctctgggcttaatttttctctttgtgggtacgtgcctgacagtgtttaacggtgtccgtctgaactggagttgcagacgttttaaactagatgagccccttcagatcatctgtgcctacctcctgcccatcaggcgtctacactgtcactcagacacctgtggcatggtggagcgacgactgccctgtcctgacgcctggcaaaagtgtgaaagctgtctcctgcaatactgctgggcatgtgggcctgagctgtgttccatttgcacacgaatcaattcgtgagtgacgatgcgattaatagctatggtcttctgtaactaaagacactacacattaataacgaagagcggagggccgggtccagaagagatgtcccctctgaaagtggggccccacggactctaaccgtcttaacccacggttttttccgttcgtcacgaaccggtggtcccctgttagattagaaagcttcgcttattcaattaggatgccttcagcgcccactttcgagtcccagtaccgggtattgcacacaagcgctacagttggaaacgtgaggataaacacccgtgcacataagacctcgggggagacccctcccggagtacataggggcacatccctctcacccagtccattgaaagagctagaggcatcaacttgactttctgtgaacatacattttaaacgcctcaccgtactacttttctaaaagccttcggcaacgggcaataccattggccttacacaagtttggaaagagacccgggtccatcaaacgggattgctcaagaactctgtaagccttgggcataatcggctttccgcttgacgtcaggagacagattagggtccccaacggcagggtaagtgcacttctcgtgacagaaccctttttactatcctcaggactacgggcgcaaaaaaaacgggtcatccccccgtctacactttaacgggaccacacaactatcacgcacacaaca

SEQ ID NO: 722419 - DNA, 348 bp, Homo sapiens
  misc_feature (2)..(2): n is a, c, g, or t
  misc_feature (131)..(131): n is a, c, g, or t
  misc_feature (151)..(151): n is a, c, g, or t
  misc_feature (154)..(154): n is a, c, g, or t
  misc_feature (176)..(176): n is a, c, g, or t
  misc_feature (187)..(187): n is a, c, g, or t
  misc_feature (191)..(191): n is a, c, g, or t
  misc_feature (213)..(213): n is a, c, g, or t
  misc_feature (246)..(246): n is a, c, g, or t
  misc_feature (265)..(265): n is a, c, g, or t
  misc_feature (276)..(276): n is a, c, g, or t
  misc_feature (283)..(283): n is a, c, g, or t
  misc_feature (301)..(301): n is a, c, g, or t
  misc_feature (303)..(303): n is a, c, g, or t
  misc_feature (305)..(305): n is a, c, g, or t
  misc_feature (309)..(309): n is a, c, g, or t
  misc_feature (329)..(329): n is a, c, g, or t
  misc_feature (338)..(338): n is a, c, g, or t
  misc_feature (344)..(344): n is a, c, g, or t
cntttttctgggaacaaaagattaacatttgtcccttcataatctcagtgattactatatacgataaattccaagggtttcatatttaactagcattctttaggttgttggtactaactctataatttacntttgatttagctgttcaatntcntttagatgaacacaaacaagantagtatatgcnaggntcttctttttttttctcttttnttctcttggttgttttactttttctcctttttntgtggctgtttcttttttnctgtttccacnaactggnataaacaggcatatattntncngagngatatttggctaatattttnttatcccantgttgnttct

SEQ ID NO: 722420 - DNA, 451 bp, Homo sapiens
acacagcagttatggatgtggcgattaaagtgattattagggctcaggcgttgatgttacacgtgttgatggcttcgatgatgagatcttttgaatagaatcctgtgaggaaaggtattccggtaagggctaggcttccgataatgagacaagatgatgtgaatggtattgcttttattatattgcctatttttcgaatgtcttgttcatcgttgaggctatggatgattgatccggagcatatgaataatatggctttgaagaatgcatgggtgcaaatgtggaggaaagcaaggtagggttggttaatccctaatgtgactattataaggcctagttggctggatgttgagaaagctacgatttttttgatgtcgttttgggtgagagcacagattgctgtgaataatgtggtgattgcaccaagacatagtatggctgttataatagt

SEQ ID NO: 722421 - DNA, 80 bp, Homo sapiens
ccttggcatcaaccatttctccaaaggagctccaatttcattgtcagtaaaaattggtatataaggccaagtgctgatgt

SEQ ID NO: 722422 - DNA, 446 bp, Homo sapiens
  misc_feature (194)..(194): n is a, c, g, or t
  misc_feature (239)..(239): n is a, c, g, or t
  misc_feature (241)..(241): n is a, c, g, or t
  misc_feature (249)..(249): n is a, c, g, or t
  misc_feature (273)..(273): n is a, c, g, or t
  misc_feature (286)..(286): n is a, c, g, or t
  misc_feature (329)..(329): n is a, c, g, or t
  misc_feature (389)..(389): n is a, c, g, or t
  misc_feature (446)..(446): n is a, c, g, or t
tcttgaaatggagaaatgtgttttccaaaatccaaacatctcacaaatatatgctatgaagaccctaaaaagagttctcagcgccctcacacagacacaaggacagaacatgagaacatagtcccagcctttaaagagagaaaacggacattccaacaagcagattcaaagtcacttggggtcgggcacggtgngctcatgcctgtatcccagcactttgggaggccaaggcgggtggntncacctgangtcgggattcgagaccagcctggncaacatgggcaangccccatctctactaatacatggccgggtgtgatggtgcacanctgtaatcccagctacccaggaggctgagggaagaagattgctgtaacctgggaggcaangctgtagtgagctgagatcgcgccacaacactctgggctgggtgacaagaggcgagn

SEQ ID NO: 722423 - DNA, 84 bp, Homo sapiens
cccagccccaaccagacctctctgtacttctgtgccagcagcccaggactagcgggggacatcacagatacgcagtattttggc

SEQ ID NO: 722424 - DNA, 118 bp, Homo sapiens
tccgtgtgcacagattctgagaatacggtggcatcgaactgcgtgagttgatgagtgcaatagctgatgtgcatgtcgactcccagctaccattgcccgaattcccccaagttgcgtg

SEQ ID NO: 722425 - DNA, 129 bp, Homo sapiens
cttccaaaggaagatacgtattcatatgctgtatgtactcgatctatgcatggcgtaaattaaatgcacccagctattgctctttgaagaatcttagtcggagtaaagataaattcttgatccgctcta

SEQ ID NO: 722426 - DNA, 380 bp, Homo sapiens
tgtatactactggtatagcttcacacagatacagtatccttgcgaagatttatgcacaagacagtgcatatcggagtttatacactgtattccctaggatgtgacttcactgggaataaatgttggactaggcactgttcagtgaaggagccaggaagttatataatacacggtaaacatccacctggctcaatgggtaaatgcagtacgtacagcattgtgcagtggtgctgtccgaggtggttgctgtatgtcacactaaccagttgaagactacacaagattaataccatccagcatcaggatatagctgtggattttacaaaccattcttatttctaacttcaggagttgatgtttttcccagtccatcttaaaat

SEQ ID NO: 722427 - DNA, 893 bp, Homo sapiens
gtattattttgggtacggcgagcactttaattttccttacacaaggacgtgtggcgggggcctaaggtctcacataacagtagaaaaccaaaattggtggtcatctcttcaaagaatcgagaatggcgtacaaagaaaaccgcttacataatttaaggattggaattacatttacagggcgtaaattgcaaacccggcttccaactcaaagcaagtaacagcccagggggttctgggccaaggacatcagctaagaagggaaatcggggtcctagggtctgggactttccaacccggacagacccgcaagacaaacacacggggttctggccagcctctagagaaatcccagaaactcagcccggacacgttaagtaccagggggaacagttaacttcaatacaggtcaaaatcagcaacaagttctacaatccagtgctgatatcagatacaagcttcagggacaatttcttttcgaaggcttatcccagtttcgtgaggctagcatgaggggtgtgcatttggccaggggcaaaatttctattctcaataaacccaggcagaaaggctacgcatcggcggagtccgtaagaagcatggcgggggacgatggaggggcccgatcgtcgaactcctgggtggtaaatccacatctgctgcagggtggacaggtgaggcaggatggagcaccgatccacaccgagtactggggctcggggggggcgaagatcttggacccccaggggggcggcgctggggggaaaccttaggatctgggggaaagccggaacggggggggcgcgaaagaccggggggggacaggctggcggaggcccgtccctcgaaggggagggctcgggggcggcaaaccaccggagagagggaaggtccca

SEQ ID NO: 722428 - DNA, 465 bp, Homo sapiens
gcggccaacatggcaaaacccgtctctactaaaagtacaaaaattagctgggtgtggtggtgggcacctgtaatcccagctactcaggaggctgaggcatgagaattgcttgaacctgggaggcggaggttgcagtgagccaagatcatgccaatgcactccagcctgggtgacagagtgagaccttgtctcaaaacaaacaaacaaagatgtctaaaggaatggggaggtttgacataaaagatatgtgaaatattttcatgactggctacataatttgtggggcccagtgcaaactgaaaaagtgggtccccttcttcaaaaaagtattaagaatttcaaaatggaatggctgggcatggtggctcacgcctgtaattttagcacttttgggaggcccgaagcgggccatatcaccctgagggtcggggagttttcagaaccaggccttgacccaacatgggg

SEQ ID NO: 722429 - DNA, 363 bp, Homo sapiens
tttgtatagcacaatctcaggaatagcccaatgtttaacgcaaaaaaaaagacaaaaaaaaaccaaaaaaaaaacctacaaaaaaaacttggtggctaggattaaggtaattctattggctttactctcaggaaagtgtaataacgcttgggaattctgtacgttatcactgtaatggaatatccaattaacagatagtatgatttacttttcatcatttaaatgtaagggtatcgaaaacttttcaatttggctctatctggggctgatagacttttctgtctatttaatgtaagggtatcgaagacttttccaatttggcttatctcccatctggggctggatcccaaaattctggagatg

SEQ ID NO: 722430 - DNA, 3822 bp, Homo sapiens
catcagtccaagtggcacagagctgtcttccttggagcaaacccggagctacctcctcagcgatgggacctgcaagtgcggtctggagtgtccacttaatgtccccaaggttttcaactttgaccctttggccccggtgaccccgggtggggctggggtggggccagcatcagaggaggacatgaccaagctgtgcaaccaccggcggaaagctgttgctatggcaactctgtaccgcagcatggagaccacctgctcacactcttctcctggagagggagcgagcccccaaatgttccacactgtgtccccagggcccccctctgcccgccctccctgtcgagttcctcctacaactccacttaatgggggtcctggctcccttcccccagaaccaccctcagtttcccaggcctttcccactctagcaggccctggggggcttttccccccaaggcttgctgacccagtcccttctgggggcagtagcagcccccgtttcctcccaaggggcaatgccccctctccagccccacctcctccacctgctatcagcctcaatgctccctcatacaactggggagctgccctcagatccagcctggtgccctctgacctgggctctcctccggcccctcatgcctcctcctcaccaccttcagaccctcctctcttccactgtagtgatgccttaacaccccctcccctgcccccgagcaataatctccccgcccaccctggtcctgcctctcagccaccagtgtcttcagccactatgcacctgcccctggtcctggggcccctgggaggggcccccacggtggaggggcctggggcaccccccttccttgctagcagcctactctctgcagcggccaaggcacagcatcccccactaccccctcccagcactttacagggccgaaggccccgtgcccaggcaccctcagcttcccactcctcatcacttcgtccctctcagcgtcgtccccgcagaccccctactgtatttcgattgctagaagggagaggccctcaaacccctagacggagccgtcctcgggcccctgctcctgtcccccaacccttttctctcccggagccatcccaaccaattctcccttctgtgctgtccctgctgggactccccacccctggcccttcccactctgatggaagctttaaccttttggggtcagatgcacaccttcctcctcccccaaccctctcctcagggagccctccccagcccaggcaccccatccagccctccctgcctgggaccaccagtggcagcctcagcagtgtgccaggtgcccctgccccaccagctgcctccaaagccccagtagtccccagccctgtgcttcaaagcccatccgaaggactggggatgggggcaggcccggcctgccctctgcctcccctggctggtggagaggctttccctttccccagccctgagcagggcctggcactgagtggagctggcttccctgggatgcttggggccttgcctctccctctgagtctggggcagcctccaccttctccattgctcaaccacagtttatttggtgtgctgactgggggaggaggacaacctccccctgagcccctgctacccccaccaggaggacctggtcctcccctagccccaggagagcctgaagggccttcgcttttggtggcttccttgcttcctccaccaccctcagaccttcttccacctccttcagcacctcccagcaacctccttgcctctttcctgcccctgttggctctgggccccacagctggggatggggagggatctgcagagggagccgggggtccaagtggggagccattttcaggcttgggagacctgtcccccctacttttccccccactttcagccccccctaccctcatagctttaaattctgcgctgctggctgccaccctggatcccccctcggggacacccccccagccctgtgtcctgagtgccccccaacctggaccacctacctccagtgtcaccacggcaactactgacccgggggcctcctctctgggcaaggccccctccaactcagggagacccccccaactccttagccctctgctgggtgccagcctgctgggtgacctgtcttcactgaccagcagccctggagccctccccagcctgttgcagcctcctggccctcttctctctggccagttggggctgcagctcctccctggggggggagctcctccacccctctcagaggcttctagtcccctagcctgcctgctacagagtctccagatccctccagagcagccagaagccccctgtctaccccccgagagccctgcctcagccctcgaaccagagcctgccaggcctcccctcagtgccttagccccaccccatggttctcccgaccccccagtccctgagctgctcactgggagggggtcagggaaacggggccggaggggaggagggggacttaggggcattaatggtgaggccaggccagcccggggccgaaagcctggcagccggcgggagcctggccgactggccctcaaatgggggacacgtggtggcttcaatggacaaatggaaaggtccccaagaagaacccaccattggcagcataatggggagctggctgaagggggtgctgagcccaaggatccaccccctcccgggccccattctgaggaccttaaggtgcccccgggagtagtcagaaagtctcgtcgtggccgtaggagaaaatacaaccctacccggaacagcaatagctcccgccaggacattaccttggaacccagccctacagcccgagcagctgtccctctgcctccccgggcccgccctggccgtcctgccaaaaacaagaggaggaaactggccccatagcagccatacctggagctggatctgaccctgattggggagagctgagtgctgagccttgggagcccctgccagccacctgcacctgtggacagtgggtgggggcactactccccactcagagcacaaatgcaactccttcccctacaatcccatcctgagccattgcagggggcagggaagttcacccccccccaccacccccccgcccccccgaagccatgtcactgaaaaggcctgggggggatggtatatggccctttccccaccaggcgctaaggggaacacccccttccccaggtcttttatttgtttaagttatttttgcacaaatgactcttttatatttaattcgatttcattgcctcccttcttaaagccaacaggctcagtttacaaacctgtgagctactgttggctgctgccctccttcccagtgaaaggtacaaagcaataagcatcatgcatcctccccttacccctccaacacccctctgcctctggctcaggttgctcaaagcacagatcctctcttaccccgtccccaggtttgaaacacatagcctcatttcaaggtgtagccaggttcccccgactttcctctgggatataaaaaagggggtaagggggcaaagagagccctctgggcctctcctcccatacacactacactgccccttctccccccatcaaaacgctcagagacgttgtgatgatgcgactgaggattatgcaacgtggtccaaccggagcggccagcatgaccagctgtccaggggctgcctcctgccttttctttggtaaagacaagacccttgggagttttaattctgttttgtacttgccctgtggggcctccactgcttttctatgggagacactcttaatttaacagatgagaatattttgaaactctgaaa

SEQ ID NO: 722431 - DNA, 214 bp, Homo sapiens
  misc_feature (4)..(4): n is a, c, g, or t
  misc_feature (170)..(170): n is a, c, g, or t
  misc_feature (185)..(185): n is a, c, g, or t
ggangatgagcgggatggcagagttatggagcagcttggaagccttgcaactgacaagggtaccgcgagacatgcgtcgttgctgtttctgtcatgaggagggtgacggggccactgattgggcctgccctgtctgctgaaccttggacctgtgaccctgtgggtgcacnctcaacgtgtgcccntttggtccacggagggttgtatgagaccc

SEQ ID NO: 722432 - DNA, 495 bp, Homo sapiens
tccttaacaggctgatacaggagaatggcgtaacctgggaggcagagcttgcagtgagccgagattgtgccgctgcactccagcctgggcaacagagcgagataccgcctcaaaaaaaaaaaattccagcaaacgaaaaaggaatggccctatagtaaggatggtaggcttaagtagctgggatcaggattcataccctcttcaacctctgctgccttctgatgttcctttggccgaccagcacgccggcccagcctttcttgtatactctaagggtactaggtcacaactctttctccttcaccttggtcttggtattaaacctcccccctacaatgtttaccttgaggctttttaatctaaatctgcttcacatcatgatagggtgagtgtaaattttcttgccgaggccaggcacagtggtctcttgcttgtaaccccagcactttgagatatcctaaaggaaggaggactggcttgaggctgggagtccgc

SEQ ID NO: 722433 - DNA, 3228 bp, Homo sapiens
catcagtccaagtggcacagagctgtcttccttggagcaaacccggagctacctcctcagcgatgggacctgcaagtgcggtctggagtgtccacttaatgtccccaaggttttcaactttgaccctttggccccggtgaccccgggtggggctggggtggggccagcatcagaggaggacatgaccaagctgtgcaaccaccggcggaaagctgttgctatggcaactctgtaccgcagcatggagaccacctgctcacactcttctcctggagagggagcgagcccccaaatgttccacactgtgtccccagggcccccctctgcccgccctccctgtcgagttcctcctacaactccacttaatgggggtcctggctcccttcccccagaaccaccctcagtttcccaggcctttcccactctagcaggccctggggggcttttccccccaaggcttgctgacccagtcccttctgggggcagtagcagcccccgtttcctcccaaggggcaatgccccctctccagccccacctcctccacctgctatcagcctcaatgctccctcatacaactggggagctgccctcagatccagcctggtgccctctgacctgggctctcctccggcccctcatgcctcctcctcaccaccttcagaccctcctctcttccactgtagtgatgccttaacaccccctcccctgcccccgagcaataatctccccgcccaccctggtcctgcctctcagccaccagtgtcttcagccactatgcacctgcccctggtcctggggcccctgggaggggcccccacggtggaggggcctggggcaccccccttccttgctagcagcctactctctgcagcggccaaggcacagcatcccccactaccccctcccagcactttacagggccgaaggccccgtgcccaggcaccctcagcttcccactcctcatcacttcgtccctctcagcgtcgtccccgcagaccccctactgtatttcgattgctagaagggagaggccctcaaacccctagacggagccgtcctcgggcccctgctcctgtcccccaacccttttctctcccggagccatcccaaccaattctcccttctgtgctgtccctgctgggactccccacccctggcccttcccactctgatggaagctttaaccttttggggtcagatgcacaccttcctcctcccccaaccctctcctcagggagccctccccagcccaggcaccccatccagccctccctgcctgggaccaccagtggcagcctcagcagtgtgccaggtgcccctgccccaccagctgcctccaaagccccagtagtccccagccctgtgcttcaaagcccatccgaaggactggggatgggggcaggcccggcctgccctctgcctcccctggctggtggagaggctttccctttccccagccctgagcagggcctggcactgagtggagctggcttccctgggatgcttggggccttgcctctccctctgagtctggggcagcctccaccttctccattgctcaaccacagtttatttggtgtgctgactgggggaggaggacaacctccccctgagcccctgctacccccaccaggaggacctggtcctcccctagccccaggagagcctgaagggccttcgcttttggtggcttccttgcttcctccaccaccctcagaccttcttccacctccttcagcacctcccagcaacctccttgcctctttcctgcccctgttggctctgggccccacagctggggatggggagggatctgcagagggagccgggggtccaagtggggagccattttcaggcttgggagacctgtcccccctacttttccccccactttcagccccccctaccctcatagctttaaattctgcgctgctggctgccaccctggatcccccctcggggacacccccccagccctgtgtcctgagtgccccccaacctggaccacctacctccagtgtcaccacggcaactactgacccgggggcctcctctctgggcaaggccccctccaactcagggagacccccccaactccttagccctctgctgggtgccagcctgctgggtgacctgtcttcactgaccagcagccctggagccctccccagcctgttgcagcctcctggccctcttctctctggccagttggggctgcagctcctccctggggggggagctcctccacccctctcagaggcttctagtcccctagcctgcctgctacagagtctccagatccctccagagcagccagaagccccctgtctaccccccgagagccctgcctcagccctcgaaccagagcctgccaggcctcccctcagtgccttagccccaccccatggttctcccgaccccccagtccctgagctgctcactgggagggggtcagggaaacggggccggaggggaggagggggacttaggggcattaatggtgaggccaggccagcccggggccgaaagcctggcagccggcgggagcctggccgactggccctcaaatgggggacacgtggtggcttcaatggacaaatggaaaggtccccaagaagaacccaccattggcagcataatggggagctggctgaagggggtgctgagcccaaggatccaccccctcccgggccccattctgaggaccttaaggtgcccccgggagtagtcagaaagtctcgtcgtggccgtaggagaaaatacaaccctacccggaacagcaatagctcccgccaggacattaccttggaacccagccctacagcccgagcagctgtccctctgcctccccgggcccgccctggccgtcctgccaccctgattggggagagctgagtgctgagccttgggagcccctgccagccacctgcacctgtggacagtggccaacaggctcagtttacaaacctgtgagctactgttggctgctgccctccttcccagtgaaagagacgttgtgatgatgcgactgaggattatgcaacgtggtccaaccggagcggccagcatgaccagctgtccaggggctgcctcctgccttttctttggtaaagacaagacccttgggagttttaattctgttttgtacttgccctgtggggcctccactgcttttctatgggagacactcttaatttaacagatgagaatattttgaaactctgaaa

SEQ ID NO: 722434 - DNA, 717 bp, Homo sapiens
  misc_feature (378)..(379): n is a, c, g, or t
  misc_feature (384)..(384): n is a, c, g, or t
  misc_feature (386)..(386): n is a, c, g, or t
  misc_feature (410)..(410): n is a, c, g, or t
  misc_feature (412)..(412): n is a, c, g, or t
ctcttaaagttatcttgaaatatatactacattgttacttgctgtagtcaccctactgtatagtggaacccagaacttactcttccagtctaactgtaactgtgtacccactgaccaacctttcctgtccttcctccccatgctggcatattatttaaatccacagacacatatcgaatagccactttgtgccagaaactcttgacactggggtaccagacaaatccaaaatctgtgccctggaagaactcatagtctcagggggcagatggtctgttcctagggttgctgtgagactggagcaggccggatgtgggctgtccgtgggagtggggttcaggtgggatggtatggtacctgtgaggccagggtacaagnnacctnantgagtgctttgtggaaatagaaangngaccatttcagaaaaaaaagatgaagtccaagaatttaattattcattcaatcaattaacaaatatttatggaacacctactatgtgcaagtactattccaggtgctcagaacaaagcccattgcatatggaacttgagttctgctaggggagacaaataggcagatgcatgaatatttaatatgttcttaggtaatgaaagcactatgaagagaaataaagcagagaaaggaaacttgggaataatgaatcctgctggtttctgtagatacagtagggagagggatcctctagaacgcttcacc

SEQ ID NO: 722435 - DNA, 364 bp, Homo sapiens
ggtggctcacgcctgtaatcccagctctcagggaggctaagaggcgggaggatagcttgagcccaggagttcgagacctgcctgggcaatatagcgagaccccgttctccagaaaaaggaaaaaaaaaaaaaaaaaaaaaacaaaagacaaaaaaaaaaaaaaaaaaaaaaaaaaaaaaaaaaaataaaaaaaaaaaaaaaaaaaaaaaaaaaaaaaaaaaaaaaaaaaaaaaaataaaaaaaaaaaaaaaaaaaaaaacctcgaaagaaagagaaagagaaaaatataatataaatatctacttctttattacatcgaatcatattttaaccttggggggtcttccatctccaatttcccccg

SEQ ID NO: 722436 - DNA, 159 bp, Homo sapiens
  misc_feature (56)..(56): n is a, c, g, or t
gctgttacctcctatgttttttgattcatccaccctcggtttcacttgccccaggntagacggccacgatttaccccgttgggaatacaacaatggacgaaaaattttgcacgcggtaccggcagcggccaggccatgtcagtttttttagacggctaa

SEQ ID NO: 722437 - DNA, 472 bp, Homo sapiens
atagaactgttttgcttgatactgttaatagatgaccttttagagaaattggtagctataataaatctgaacggaagaagtagtacagtagaattcagtatcataattcacaaattggaggctgttgattaatgattcatttaaggtttaaaatctttcttaatcgcacacagtgcaattatttatacttacacagtgccttcccagacctatccaccttaggttctgctgcaaaaagcaccaggtaagcacaacctaaggacatatataaataaatatttcaatacattaatgttgtccctgtgaggttttagtggttagtgtattcaaaggcaatctgctactgcttccccaacatgtatatagttatattatgctaccatcttagtggaaagtctgtaagttgttcaagcaactgtatacatatctgggtaatgtttaatattttaccttagtatgtgattaagagaag

SEQ ID NO: 722438 - DNA, 942 bp, Homo sapiens
tcggatctgatcaggactttcctttatcccatttgattgtgctgaatacactgcctgtcgcttgtcttctattcaccatggattcttctgatatccgaggtgaaagaacttggagaagctgtgccgtcatggcctacgcgcattgtctcgatgcgtgatatctcatcccttcgtgtccaaagaaagatatcttgtatccattgcaattcccccgttatctcaccctccaataggagatgaaaggatcttcccctggcagggaagttcagatgaattattagaagctggcgaagacacagtcgcccgtcccatgaagctagaggtctattgaagcagtcctggcgtagatgatacgagagcacgtaagaaagaagtgcgttcagacaggcattagaagagaacgataacttcattatagagattggcagaagagaacactagacccgagcaaaatggaggctaataatgagaaccgagttaggcacaaatgggctgccttgaactggatacgtgttgcgaatagaagtataacgcacattgaagaagtgcggaagaacaaaggaatccgggagaccctgctgcactgagactgaagctgactaatttgttctgggaactgactttctccccatccccttcttaatatccgaagactgtactggccagtgccattttatttgttccctcctgacaatttttgaagctatgtgactgttttggtgatccgatccgcctgtaccatgtggttccgggcctaaggggcacgtgacggtttcccctttctacgggggcttcaagtcgcgttcctgtgggcttcactcccctggggcggggggggggcccatttggcccgacatttgcacgactttgcctcccggggggtgttttttcccggcccccccgcggggtgtccgcgtcggaaaaacggcgcttctcgcgggt

SEQ ID NO: 722439 - DNA, 112 bp, Homo sapiens
ccggctcttatgagctttacaaggctgttatagcgcttgacaagacgctgatccaggccagagatgttaaattgaagagcatgctcttcaatttaacgcaaagttcaggaat

SEQ ID NO: 722440 - DNA, 951 bp, Homo sapiens
agcggagtccgcagccgccgccggcaccgacgcgcctcggcctcggtgcaggcagcggccgccgccggcgagacagctgcgcgggcgagcatccccgacgcagcacctaggaagtggttgacgaccatatccagctctttgccgaatacatcctatctggcactacatccagcgtgaggtccctccagtcatactacggtgggcgacctatggcggagaagtttgacgtgccacgtacatgcatgggatcccttgcaggggaagaagtatgtgcaataaggatggccaccactgtctgcctgaaatgctttgacaagttctgtgccaacacctgtgtggaaggccgcgaaggccgcaatcgtgtgcaggagcgtacctaatggtagggtgcatctcataaggaacccgcattcgtggcgtgacacactgacttaccgcatgatgccaatgtgcctgtcaaccccttggaccaattgagacctattgtgggcaaggacaacaagatcctgtgcaagcaagtgctaccacatcgggaggatctcccactcaagtgcaaggggtgctgtcaaggccgttgtggcaggagatcgaaacgtggagtacaaggggacctgtctggcacaacagtactgcattcacgctgtgagtaactgctagcgagtcatcgggactggaagcttcttcccctaaaggggaggacttctagtgcgtgacttgccatgagaccaagttgccaagcatgcgtgaagtgcaacaaggcatcacatctggaggaatccacttaccagggatcagcccgggcatgccggatggagagtgtggtacctggctctaagaagctggctgggagccggtcaccgctgtggaggaaccgcgtgacggggggatgcgccagacaacctgggccacaaacgggcgcgaggcaaaaccccaccagggctgcgaagggcc

SEQ ID NO: 722441 - DNA, 141 bp, Homo sapiens
cctttacatatagatcagtggaacaggagagaaagccagaattcaaccacgcacctacagcctactcatctacgacaaaggagacaagactatacaatggagaaaggacagctgttcaataagtggtgctggggaaaccgg

SEQ ID NO: 722442 - DNA, 190 bp, Homo sapiens
ccgcggcagtatctcgtagtctgaccactggagaaccttcagagcataatccactcccaccgtgacttgtagtgtttgctgaagctgtcctgggaatatcgccgcaccgcgggtgcaaagtgctggtggtgggggacgccgcagtgggcaagacgtcgctggtgcatgaatattcccaggacagcttaca

SEQ ID NO: 722443 - DNA, 855 bp, Homo sapiens
taggtctagacagtgtcatatttggtcatagttgcaacatgttgaacatgtgaattatagggttcatgctggtttccagattttattgttggctacgtacaatggaactttatagtcatatatacatacatatatatatatatatatatataatatctaggggggggaagtgttatatgttctctgtctctataagagagatagaatagagtagggatactttgatctagggggtcagtcgagcggagtccacctcttacagaaagacctgctctttctctgtcgtgagtctatgtgaaataataatcgggggcccttgtggaacaccctgggaaactctaggagtcgtgtgagaaataccgggttaaagcacatctccagagagatcgtgtccaaactcactattaattgtgtatacttgtggggtgccagagaaagagagttaaattatgtgtgagaaatatatgctattgatcttgggaaagggtgtaccgcgctgctgactttactaattgggagtacgaagtgagtgtgatctgaacgcttgattgtgacgaccactctcaagaagccacccagacggtgcggctccctcagacacccgacggctccgcccccccccgcaccagcggtgccattcaccacaccatggtcctccctacaaccctgccgaggcgtacgccacccgtcgaggcgcacgcaacccaccagcgggcgggcaaaaaaaacatcactcccgctcagaggctgccccagaccacaagccgcagcccccccggggaggccagacacaccagcagcagaacccaacggcgacacaccagcgacggcccccacaacacaccccaccaccac

SEQ ID NO: 722444 - DNA, 321 bp, Homo sapiens
gaatcgagctcggtaccagcaggggtggcgtgatatgggaaggctacattgtcgtcctgcgcctcgagggccatgattggacacaatccgactcggatgaggctgccccagtgaaccataagggggtgacttcacctgttcacatcagcaggaatgtcatccacgccagcgactccgtgtagtgggcccatatgagagatccaactgtggttcctaggagcagtgcgtctggtgagctgggctgactggggctcagctcgaggagcgtccacccatcctgaggcctcaagctgtcctttgcacgggtggcccctgctgcgt

SEQ ID NO: 722445 - DNA, 360 bp, Homo sapiens
tatggcttggaacagatgaatctacactagtggccttcgggaaaaatcttaccttaaaataaatttctggtagtaaaacctattcatcaccatcataagactggatatctagttcagctgtctctgctggaggagtggaagcctccaaagatttaagaagaaagctgtcggccgggtgcagtcgctcacgcctgtaatcccagaacttggggagtgcagggagggtggatcagggggtcaagagatcaagaccatccgggccaatatgtggtgaaaccccgtctctgctaaaaatacaaaaactagccgggcgtggtggcgcatgccttgtaatcccagctactcaggaggctgaggcag

SEQ ID NO: 722446 - DNA, 710 bp, Homo sapiens
agcggaagagccgggctcgggccgcaagcggggcgaggggttcggggagcggcgcggcctgggagacacagagccttcaggcgccggggcggggtgcacaggcgaagactaggcggcgccgggccccacagcagcagccgcagcccaagcgagcgcagcagcgcggtggctagccgcgggagcccccgggcagccgctcgcccgcgcaagccgccgtccgccgcgggggaagcccgttgcccgggagcaggagcgggcggaagacaacggaggggccgagcgtccgagcccactccgcgggggaccgaacgagcagcccgaaagcggcgggggccgaggacggggacaagcgacgaacgcggaggccagagaaggggaacgcccgggcccaagcccggagcacaggcggagtgcagcggaggccccttgccgttggccggtcatgccgttcccgtttgggaaaagtcttcaaaatctccaggcagaacttggtgaacgaatctgaaggagagcaatgggtggtctggaaaagcaagacattttctgattcaacaagcgggaaaagggtaacagaaggaaagtttccaaaagatctggttggccattgacctaaattccggtatgggcacaacttgacaacgcagcctcagacagaagccgtaccctcaagttggcccaggaactctatactagtgggctccttagccccg

SEQ ID NO: 722447 - DNA, 712 bp, Homo sapiens
atatgattaaaaaaaaaaaaaaaagatgggtttgggcctgccagcaccatgagtgcaggtgacccaattatagtacttggagtcctgtggctatatgtggcagattatttttttactgtgatgacttgactcttacttcaggttgaagggcatttggaacacagatttaaagtggctagattgaagttttctgtggacattgtgtcaaaagtcttaaacttaggcataggtttttcgtgaaactaccggttgtttgtgaagggtattagcattcctgtgtgtgccttgtgtgataacgtgcacacccatatagactactttattatatttattatttgtgcacgggtgtgaagtctcactcgacactctgtgttgagcacgaggctgtggagagtgtgccaagggtggatgtgcactccactagtggccaaacccattgctgtggcacctctgttggggggtttatcacaaaggacatagtctctctcacgtgagcccctcaaaccccttctcgccccagagatgaaattagcgcatgtgggggcatatataacgggtgggtatcacccccattatcaaacacaaacgcggcccgccggggcttataatataaatagtgggaatatatttaacccaatttaataaggctctctgtttggaagagatatatataactctataaggatatgtgagaatcagtgtggatatatat

SEQ ID NO: 722448 - DNA, 123 bp, Homo sapiens
ccagaacacaggtgtcgtgaaactacccctaaaagccaaattgggaaagggaaggcttcatatcaccattgttcgtcattggccacgtggatttcggccagagtccaccactactggccatct

SEQ ID NO: 722449 - DNA, 222 bp, Homo sapiens
cccttcccccccaaacaaagccctttttttggcagtcccggttttttcccccccccaaaatggtttttcccccccccccccctttttttttttggtttttacccaaaaaccccggtttttttttttttttttttccaaaatgaattgttttttttttagggcccacccatttttttttttttttttttttttaaataaaaatttttttttggttttttttta

SEQ ID NO: 722450 - DNA, 683 bp, Homo sapiens
  misc_feature (49)..(49): n is a, c, g, or t
  misc_feature (77)..(77): n is a, c, g, or t
  misc_feature (86)..(86): n is a, c, g, or t
  misc_feature (99)..(99): n is a, c, g, or t
  misc_feature (110)..(110): n is a, c, g, or t
  misc_feature (114)..(114): n is a, c, g, or t
  misc_feature (145)..(145): n is a, c, g, or t
  misc_feature (148)..(148): n is a, c, g, or t
  misc_feature (184)..(184): n is a, c, g, or t
  misc_feature (192)..(192): n is a, c, g, or t
  misc_feature (220)..(220): n is a, c, g, or t
  misc_feature (266)..(266): n is a, c, g, or t
  misc_feature (284)..(284): n is a, c, g, or t
  misc_feature (371)..(371): n is a, c, g, or t
  misc_feature (405)..(405): n is a, c, g, or t
  misc_feature (454)..(454): n is a, c, g, or t
  misc_feature (471)..(471): n is a, c, g, or t
  misc_feature (536)..(536): n is a, c, g, or t
  misc_feature (543)..(543): n is a, c, g, or t
  misc_feature (545)..(545): n is a, c, g, or t
  misc_feature (547)..(547): n is a, c, g, or t
  misc_feature (550)..(551): n is a, c, g, or t
  misc_feature (559)..(559): n is a, c, g, or t
  misc_feature (583)..(583): n is a, c, g, or t
  misc_feature (594)..(594): n is a, c, g, or t
gcttcgtttgtatacatcgtatgggcgcagcctaatgcacatcataacnttatcttttccaaagaagtgtgctaagnttctgctcncataattggtgtnattttttttgntttnttcccatttagataaatcttgtcttcagttnttnttttttgccttttcttcctcccagctttttgtactnactggtcnacatttaggaataataaattcatgaganaagaacaaattttttatggaataaataacttccaggaacaacagtntataagtattcagttgtntaaataaacacaactattttccttcctaaaatgtatacatccagtatatgacacatacatgatattccaggtatagatatcttagtnactcacttatgaaagaggtgcattttggtatgtntggtggtaaggtttttgtttatcttatgtataaaagtacattgcacaanaaaaacaagcagtaatnactatataaaattctattccttcacccagttttctcactcaagtagaaactcatgaatatctgtngattttngntntannttttattntcggaaagggctgaaatatctctnaaagtgagggnaaagtgttttcttgagactggaggcagtaatcatcacttgtgcttgaaggcattctcagcaactctctcgagtttcagagtaagcacag

SEQ ID NO: 722451 - DNA, 1123 bp, Homo sapiens
  misc_feature (743)..(743): n is a, c, g, or t
ggtggcaaaaaggatatgggtcatgaacagaaccaaggagctgcgctggctactagatgtaaccagttctgtaggcatgttatcgccacatccatgtgagccgctcccgtgtaagtctcctaactcacaatgtggccgaggatgaccttgcaaagatcatcgacattcactgcaacacgaagtgtactggccgagtgatgacgaggtccccaagttgtggagacatctcctgagcgcacgtacgattgatgcggactagactgtttctgtcttgggactttttccacagacacactcggggtggcctcagccctgtgccctgaaatttgtgctggacgtggggcatcacggaacacaggcgcgagatcgcgtcactgcccgattgtaaatttgcgaccacaagaagtcactcgcagagttgggaatgactccaggcacaattaggcgcccaaacactttgaatggcgacaaattccctggtcgtccacgaaggcgtttccatatacgactgaagctggttcaacgcctgacagcacccttggcagttttgggcaatgccccaaccaactcttgcgctcgtgtcttcggtcacgctcaatcgtacttaccacaaacgcaatggctagcacaagctgggaactgtgggcgacgcattccatatcccagtcacccatgtgcgaacagcgatcttcggaggccataactatttgtgctccagactgatcgaatgggacctccagctntcacagcgccattgtcctttaccttcaaacttgcaacaccaagaaaaccattctggaccattttttcttcactggcatttgtggaactcacggaaaattgggacaggctacaacagcaaattggcctaatagtcgtaaccacgggaacgcaatggccttcagatttggttgggaacatgtgcttgtgtgagcgttgtgccttttgagacctgggatgtttctggagcctcaatcgtggacattggacatcacaatataactttcacggaagccttgtcaacacggattattcaaaaccaacaatttggagacacaagattcgggacatcaaaaaaagattacacgacttaaaatatcgcaagaataactaggggaaaagt

SEQ ID NO: 722452 - DNA, 184 bp, Homo sapiens
  misc_feature (170)..(171): n is a, c, g, or t
ctccccttatggcgctttctttcggctgcgtgcctgaccacaaaagctggctgagttcaccttatttatctgctagcactaggcgtgcggctcccgttgctgagcggtttgctgccttcgcgttcttcgtcctcgtcatcgctgtccctggtcatagctgttcccagggnngagcgggtcggcg

SEQ ID NO: 722453 - DNA, 915 bp, Homo sapiens
gcatttaccatctcacttctaggaatactagtatatcgcgtcacacctcatatcctccctactatgcctagaaggaatagtacgtatcgctgttcatgtatagctactctcatagacccgtcaacgacccactccctcttaagccaatattgtgccgtattgcgcatactagtcctttgccgcctgcgaagacagtcggtgggcctagccctagtagatctcaagtctccgaaccacaataatggcctagactacgtacataacctagaaccgtactccaatgctaaaagctaagtcggtcccgaacaagttatattacgtagcactgagatgactttccaaagaacacacataatttgaatcaacagaaccacccacacgcctaatgtattgagcaatctattcccgcctactattttagtttaagcccaatagtcaaactaagcaacgctgatttaggctgttcgcccaaagcctttgtcgctcgcggacaccctcgtaatcgaaagcccccgcatccgtaaaggacttgaacttagctggaacttccgtacccctcgtcaaaagatcactggcaacaagccgaggggccacactttatcccaggtgaagcccatgtattgacgcaatcaacaacttctaaccatctactattacataagttcatccccatacagagagtctccctataaacttagtacggattcaggcagcgccactaggaacgctcacatcacgagttattagtaatcctatcttccgaaaaagcagacgaaataagtaacccaattttggggttagtaagtcacacccggaaggagggcaaagcacagtgccatgaaacacgctgtggagacggcacgaggagcacttaggtcctgtattcaaacacccttagatagggttccctgttcc

SEQ ID NO: 722454 - DNA, 848 bp, Homo sapiens
  misc_feature (131)..(131): n is a, c, g, or t
gaatttaaaaacctttgcagaagctttgactgtttgtgacacagcgatattctcacatggaggccaatgtccgcttgaaggatgcgcctcgcaatcacggtactagaaacataactagtatggccacaagntgttaacgtcttttgacagtcacgggcaggacttcatggttatggcaacgcgaaggtcatggttcataattcacggagtgaaccgccctggagataatggcatggtcccctcaatggaggatgacccacatgatagtgggaatgatcgatgtgaggctagtatgaacatcatgtgagggaagagaatctctgatggaatcggacataggttattgttgtcaagaataatcttttcaaatgcctgatacgctgtggtacgccaaagatagaagggtggtacttggtgattgtaagaacagaagggatatggtaacgaagagctagcatgtatctattgaaatgcgaatggtagattaatggcaagagattggctcagaaaagtagatgagctgtctatggatggtaggatgggttttagagtagaaagaagggagaaaatcataacggttgtacaaggaggaaggggagtggaacactgccgagtgtatcctgagtatatttgttatactggtggagtcttgggagccatagtaatgtttctcattgccccccaaaataaattaaaagtcaaagcagggatatgaggcaggagttcaaaattgaatttaggaaactgtaggcaaatgacagttaaactggtatttcagatgcataattagaagcacattgaatgatgtgcgaaaaaaataaaaatttatagatttggaggggaacata

SEQ ID NO: 722455 - DNA, 492 bp, Homo sapiens
  misc_feature (17)..(17): n is a, c, g, or t
  misc_feature (46)..(46): n is a, c, g, or t
  misc_feature (60)..(60): n is a, c, g, or t
  misc_feature (63)..(63): n is a, c, g, or t
  misc_feature (71)..(71): n is a, c, g, or t
  misc_feature (82)..(82): n is a, c, g, or t
  misc_feature (87)..(87): n is a, c, g, or t
  misc_feature (90)..(90): n is a, c, g, or t
  misc_feature (92)..(92): n is a, c, g, or t
  misc_feature (103)..(103): n is a, c, g, or t
  misc_feature (129)..(129): n is a, c, g, or t
  misc_feature (133)..(133): n is a, c, g, or t
  misc_feature (138)..(138): n is a, c, g, or t
  misc_feature (142)..(142): n is a, c, g, or t
  misc_feature (144)..(144): n is a, c, g, or t
  misc_feature (151)..(151): n is a, c, g, or t
  misc_feature (162)..(163): n is a, c, g, or t
  misc_feature (167)..(168): n is a, c, g, or t
  misc_feature (189)..(189): n is a, c, g, or t
  misc_feature (194)..(197): n is a, c, g, or t
  misc_feature (207)..(207): n is a, c, g, or t
  misc_feature (209)..(209): n is a, c, g, or t
  misc_feature (223)..(224): n is a, c, g, or t
  misc_feature (235)..(235): n is a, c, g, or t
  misc_feature (245)..(246): n is a, c, g, or t
  misc_feature (269)..(270): n is a, c, g, or t
  misc_feature (329)..(329): n is a, c, g, or t
  misc_feature (359)..(360): n is a, c, g, or t
  misc_feature (370)..(370): n is a, c, g, or t
  misc_feature (372)..(372): n is a, c, g, or t
  misc_feature (375)..(375): n is a, c, g, or t
  misc_feature (377)..(377): n is a, c, g, or t
  misc_feature (380)..(380): n is a, c, g, or t
  misc_feature (383)..(383): n is a, c, g, or t
  misc_feature (389)..(389): n is a, c, g, or t
  misc_feature (392)..(392): n is a, c, g, or t
  misc_feature (481)..(481): n is a, c, g, or t
atctgtgggtacccggngcacggagatctcgccggctttacgttcncctcggtgtctgcngcnccctccgnttcctctcctnggcgncgngnccccgtggctngacgttccccctgtatcttctcccgntccntgccngggngntctttgnctctcgcgggnntccnnctgttgaggttgatctcttcncctcnnnnggtctcttcngngctgactagtgccnngtggtgcttcncctggtctcnntacggccctagcgctccgggccnntgatcacgcctcgctctcatggggccgggtgtatccccggctgttgcgaccctccctcnccctcttgcgcctgccctggttcgcccgcnnctgcccgtcncngcncncgngcngcttgnccncctgctagctcgcacaggcatggccccgcccatccatctacgtttggtgcgcccgcccttctgggggtgtcccttgccgtctgcccacnggtgccgttgc

SEQ ID NO: 722456 - DNA, 216 bp, Homo sapiens
tgactcgtctctgtatttgtattaagccttaacacttttcttaagtgcattcggtgccaacattttttagagctgtaccaaaacaaaacgctcctatcaaaatgacattgtgatgtgagtacaggctttttgataggagcgttttgttatttttacaaggcagaatggggtgtaacagttgaattaaacttagcaatcacgtgctcaaaaaaaaaa

SEQ ID NO: 722457 - DNA, 101 bp, Homo sapiens
  misc_feature (5)..(5): n is a, c, g, or t
gctgnctagagttcccagtggcatgaatccacccagactataaccgaagtccgagccagacaggtgaatgacgctgatgagcgacttcagcaaggcgatgg

SEQ ID NO: 722458 - DNA, 415 bp, Homo sapiens
  misc_feature (134)..(134): n is a, c, g, or t
taattaaataagggcgggtattggcgtctggcggccatttgggcgcggttgggcagcgggttcaaccagggcagcaaggtaacagcagaacggtaagtattgtatattaccaacatatagggcatagggttaangcaacggtatacacaggcggtgcgcaagcacaggcggcggcaagcaaagccaacacgtggagtgcgtggggcgaaggcagataaagcgcaacgtacgggttgttgcacactcctacgcttttctgttgtggttttactaccccgtatgcgtttcagctatcctggcttcgcacctgggctagcatacttggcaactttacccttatctactatattcgctccacctttctttagtctgacgcttgggatctcccacacacacgctctgcgagtagtatgct

SEQ ID NO: 722459 - DNA, 275 bp, Homo sapiens
gtgcgacgttgtggctcatggttggccctcaagggattttagctgttagtattataatataaatggattggaagggcagcctattgtggaaggatatacgtcctttaaaagcctaataggtctggcacctggattttaaggatgaaggccggttgggcgcggtggctcacgcctgtattcccaggacttttggaggccagggcaggtggttcacgagttcaagagttcgagaccatcctggccaccatggtgaaccctttctctactaaatttcc

SEQ ID NO: 722460 - DNA, 283 bp, Homo sapiens
cttagactctgtaacgacaaaattaaccaagttcttaagaacagggtttcagtatttattacttcacggttagaacatgaagttctaacgaactgtttctcccaaggttttaaaagcgtcaagttattctgtttgataaaaaaataagaagcctgtttaagcaatagattttgcttgtgttttcttatttaaaaacataatactgtgcagacaaggcactgtaaaagttttaattccttccagaggaaccatgtgaagaatttaaatttgacgcttcgatcaa

SEQ ID NO: 722461 - DNA, 143 bp, Homo sapiens
tggcaggcatgttagcgcactaaaatgaggttgggggtaatgctaacgtcacctcacaggatggcacggggactgttattcgcaagctggttttctagaactgttagctggaaccatggtgagcaccatttctggacgccccc

SEQ ID NO: 722462 - DNA, 245 bp, Homo sapiens
tccccggaatagccgacaggctcatgcaacaatgagtagacatggaggtggcactggaaacgtggcttggtgcccttggcgggggcgggaggactaaatggggccatgctgtggacacagcgggtccaaatggaagtatctgcagtgtacatacatggagggttggagagaggcatacttttcccctaggttgtgcctggtgacaagagagaggggaagtacatgttggcactgtctgttgccag

SEQ ID NO: 722463 - DNA, 308 bp, Homo sapiens
  misc_feature (20)..(20): n is a, c, g, or t
  misc_feature (171)..(171): n is a, c, g, or t
cctgggcaacagcagcaagnacttcgtctcaaaaaaaaaaaaagaaaaaaaaatattgtagtcctatcactcatgcacacagaggtgacaattaagcatcttgttgcttctcccttgtgagtacacaaccaactatcaccaggcttttggagaaaacttcttaacaagaanaagatcaaaagaagcaaaaggacctcaacagaagcagaaaattcaaccattgacaaaactatgatataatattcttggtgagatgagaggagattttgcacctgtggaaacagtgctatttaaaagacattttagcc

SEQ ID NO: 722464 - DNA, 161 bp, Homo sapiens
agctcatgaccaggtgcagacagacacagaacacatcaacagaattgtttgatggttcccaggagagagctgctgctctttctgctgaagctctgggagctggcacggctgtaggacttccttttcttagctgtgccagctcccagagcttcagcagaaag

SEQ ID NO: 722465 - DNA, 195 bp, Homo sapiens
aggcgctcgtgggggcagtataagcttccttaggcttttcttaggaatgaaattcctcctatccccccatctcttagtggacggtaagcccaccaatctgccctttgcagtgtgctgggtggaaggtaagaggttggtgtggagttggggctgccatagggtctgcagcctgctgggtgtcactgtggggcaagg

SEQ ID NO: 722466 - DNA, 148 bp, Homo sapiens
gagatgagacgagatgtacaagagaagagacgagatggagctttaatttattaatgcaaacagtacctaacaaacccacaggtctaaactaccaaacctgcattaataaattaaagctccatagggtcatctcgtctcttctcttgta

SEQ ID NO: 722467 - DNA, 166 bp, Homo sapiens
gcgaggtcccggctgtgctttggcttgtgctgccgttcagggcaaggtcgagacacaagggcttggatgagatgtcgggtactggcggtcctcttcctgtaagccctgaggcgcatcggcgcgtggctttccccagcttggcctgggccacacaagttccaccatt

SEQ ID NO: 722468 - DNA, 771 bp, Homo sapiens
gccctaacaggcacagagagcagggcaactcctggcacacatcatgggcttggaggcacacaagcctggattcgaatctgggctctttcacatactagctgtgaccctggacaaagagctttaacctgctgagtccccattttctcatctgtgaaatggagatgataacactgtgtcttaggttggcattctaggtcacatgaaaggtgtgtggaaagtggccagcattctgcctgcagaccctgagcactgagtcaacaaggttgtgatgatgtctgtactagttagctattgttattaacaagatctccatgggcagaccagctaaagacgttctgtgctatagtcgtgagatctgtgggtggggtcagcgtgtagactgcatgcatggttgggtggtggttggcaagaatctcctaataggaattatcggatcaaagtcatattcgtttacttcttcggctggtgggctacccaagagcgagcacgctttctctccgtggtcatgccaagaaccacaggagggtgagtctaacaagcacacctcaagcctcctgcttgggtcacattgccaaatgtcctctcagccatacaagtggcaggaccaggcccatattaaggaggtggaaaaagggtaaggctgccttggtgaagctgtgaccagggagtgacatcatccctccacaggaggtgaggattgggacagcgtatccagcaatactggtccataattttcaaatgggagtttgatcggggataaaacgtccaaac

SEQ ID NO: 722469 - DNA, 203 bp, Homo sapiens
tatgaccatactgataaccgagatagtcttcaaagacatctgcataggctggcatgaacccggccatgtcccgagaaagcatggagtcaaaggtaggtcgaggagggacatctgtagagtgaaatggaatggctgtgtcagcagatttcgcttcctctgcttgtttcaggttcagcagggaagatgtaaacagagttctattg

SEQ ID NO: 722470 - DNA, 166 bp, Homo sapiens
  misc_feature (60)..(60): n is a, c, g, or t
acgcctttgctttgtgacggcggtattgcttccactactacttcattgaggcattgcacnccactgctgcaggagtcatgaaggatcactgggacaacctggagttcttactggctggatctggaggctgcacctactcaggcattgacgccgtcccacagcacag

SEQ ID NO: 722471 - DNA, 805 bp, Homo sapiens
gaggatgtcgagttgcgctggtgtggggggcgggtgcgagggccggctgatgcttgtgcagatggtgaggcgaccagtggcttgcgtctgcttcacgactccttccttcttccttctccctgcgaggcgcgtgaaggttgtgcaaacccggattggggtctgtccagcagcgctgggtccgaggatcatgcaatgcatgctcgtcaccataattggaccgacttggtcaaagacatgaagatcaagtctcctggtagttgagatctatctcttcttccctgcccgattaaggaatcagcagatcattgatttcttcctgggtggcctctctcaaggatgaaggtgtgaagattatgccagtgcataaagcagacccgtgccggtcagctgcaccaggttcaacggcgatattgtatgcatatcgaggactacaatggccagcggtccggactagggtgttaatgtggctccaatggaaggtgggccaaccgcatccgtgggggccatctatcctgggccaagcctctccatcgtccccgtgcgcagaggctaactggggggaacaaagatcggcaagcccccacactggtccccttgcaaggtgacaggccgttgcggctctgtgcttggtacgcctcatccctgcacccagggcactggcatcgtctccgcacctgttgcctaagaagctgctcatgatggcttggaatcgatgacttgtacacctcagcccggggctgcactgcaaccctgggcaacttcgccaagccacctttgatgccatttctagaacctacaggtaccg

SEQ ID NO: 722472 - DNA, 1016 bp, Homo sapiens
  misc_feature (9)..(9): n is a, c, g, or t
  misc_feature (485)..(485): n is a, c, g, or t
  misc_feature (499)..(499): n is a, c, g, or t
  misc_feature (503)..(504): n is a, c, g, or t
  misc_feature (512)..(512): n is a, c, g, or t
  misc_feature (515)..(515): n is a, c, g, or t
  misc_feature (517)..(517): n is a, c, g, or t
  misc_feature (519)..(519): n is a, c, g, or t
  misc_feature (528)..(528): n is a, c, g, or t
  misc_feature (548)..(548): n is a, c, g, or t
  misc_feature (552)..(552): n is a, c, g, or t
  misc_feature (555)..(555): n is a, c, g, or t
  misc_feature (578)..(578): n is a, c, g, or t
  misc_feature (611)..(611): n is a, c, g, or t
  misc_feature (650)..(650): n is a, c, g, or t
  misc_feature (657)..(657): n is a, c, g, or t
  misc_feature (774)..(774): n is a, c, g, or t
  misc_feature (794)..(794): n is a, c, g, or t
  misc_feature (799)..(799): n is a, c, g, or t
  misc_feature (814)..(814): n is a, c, g, or t
  misc_feature (818)..(818): n is a, c, g, or t
  misc_feature (873)..(873): n is a, c, g, or t
  misc_feature (885)..(885): n is a, c, g, or t
  misc_feature (891)..(891): n is a, c, g, or t
  misc_feature (933)..(933): n is a, c, g, or t
  misc_feature (997)..(997): n is a, c, g, or t
tgcctaatnatttcaagatactttattttaaaaacaggtcacaacactaagcttttggcccattctgccattgtacaagctacaaatgcttgttcagcagctgaggggcactcttgagtagcgtgtctgaagagtgaataaaaatccatataaaacaaatattcaaatagtttccataggaacacagataagtgtgacccatatcctagtcttccatatggctgcatcatggcgaccctactcttacaaagacatttcaaaactagcagtaattaagttacatggtccccccaaatcccttaattcaagctaaacttgcagttaacagctaccagagtgctatctacacattaatactagccgaagcacaggctgctctgtggcgtttcatcccactctcccaggcacaagaaacagggggggtgctggcatcctgttcctctacttggggtgggtaagtgggggttttggaattgctgcatganttgccacgcaggcnctgnnatcacatngtngntngtgggcctntggaagccattgaacgtagnggcngcngcgacagtgtgagcgcccatgtnttcaaagagcatccaataacccaaatgcatttnagggaggtaaaagcgctgaaaaattcgatggagggcatnaaatgtnggtccccatatgctggatgaataatacttctgatctggtttaggtctcttttgcagaaggggctttacatgtccgttgtcatagagtatgccattaaatgatccatagacgccatcnttcacataatacataaaggnctgcncactcgactcacctncgtnatcagagcccgtttgtccctttaatacaattttcttggcaatgatattaactgcnagcgtgaaagcngatgcnacacagtatctgccgggctcagctatgattctcactccagantctgaaggaaagtatttgtccaccgctgggttgattacgccggtgatctcttcaaatttaagtntcacatcctcagatccagg

SEQ ID NO: 722473 - DNA, 1022 bp, Homo sapiens
  misc_feature (9)..(9): n is a, c, g, or t
tgcctaatnatttcaagatactttattttaaaaacaggtcacaacactaagcttttggcccattctgccattgtacaagctacaaatgcttgttcagcagctgaggggcactcttgagtagcgtgtctgaagagtgaataaaaatccatataaaacaaatattcaaatagtttccataggaaacacgagtatataaggtgtgtgacccatatattcctatagatctcttctccaaatagtgggcgtgccattcccgtggcgcgaaccctatacctctttacaaagaacatttctcaaaaaactatagccgagagtaattataaagtctttacaccatggtgtgtcgtctcccctcacccaagagaatctcctcgccttttttaaaacttctcaaaagggccataagaaaacctcgttgtggcgcagaagaagttataaacccagaggcgctataaccccccaagagaagatgtggcctcttatcatctcataagcgcagccccatttattaagaagatgcatccgtattaagcggccccggagaagaggcgccacacaggaaggagggagcctgttggagcactaccggatggaggggacgaggcaggatgtttttcctccgaattccttccccgcccgcaacttcttcctactttccgcgcaccgaaggaagtgcgcacccaaccggaacaaaggaagcaaacccacagacagaagggaagatgcctaacagaaggaggacaggctggcacgcagagtggatgggcgcctatatgttttccaccctggatgaggtagattaataccacccctgctttcctcatttcaatgcctagtttcatttaggaaggggaggtggatacggattggtagagatagaaaaaaagaaaaggtgatattacggtatgggagggtatggtagtgtcgattttgattccctatatagttgaaggggaaggtaaaaacagatagattggtagggctggatgccgacgaatctatagagaacagtttacgttggc

SEQ ID NO: 722474 - DNA, 232 bp, Homo sapiens
cggctttctctacgactgactcaccctaggtggacacgctaccgtccagactcacgtcccacggacacgacactgggcgacggactggacttcttgggttgacgtaccgttctgacttacgaactacggaccgtctccccaccccacgccctggccaagaacgtgcactcacattggaacgtttgccccggggcatgcacgactttactgctgccacttgaaaacgcacggt

SEQ ID NO: 722475 - DNA, 517 bp, Homo sapiens
  misc_feature (9)..(9): n is a, c, g, or t
  misc_feature (409)..(409): n is a, c, g, or t
  misc_feature (420)..(420): n is a, c, g, or t
  misc_feature (422)..(422): n is a, c, g, or t
  misc_feature (464)..(464): n is a, c, g, or t
  misc_feature (471)..(471): n is a, c, g, or t
  misc_feature (478)..(478): n is a, c, g, or t
  misc_feature (492)..(492): n is a, c, g, or t
  misc_feature (495)..(496): n is a, c, g, or t
  misc_feature (501)..(501): n is a, c, g, or t
  misc_feature (512)..(512): n is a, c, g, or t
  misc_feature (517)..(517): n is a, c, g, or t
tgcctaatnatttcaagatactttattttaaaaacaggtcacaacactaagcttttggcccattctgccattgtacaagctacaaatgcttgttcagcagctgaggggcactcttgagtagcgtgtctgaagagtgaataaaaatccatataaaacaaatattcaaatagtttccataggaacacagataagtgtgacccatatcctagtcttccatatggctgcatcatggcgaccctactcttacaaagacatttcaaaactagcagtaattaagttacatggtccccccaaatcccttaattcaagctaaacttgcagttaacagctaccagagtgctatctacacattaatactagccgaagcacaggctgctctgtggcgtttcatcccactctcccacccacnacacacacgcncnctcctcccatcctcttcctctacttcccctcccaactcaccnttctccnattcctncctcacttcccacncannccctnacatcacatantacan

SEQ ID NO: 722476 - DNA, 103 bp, Homo sapiens
ttgtgcgtcccagcgatctggtgaggaggctgttgggtctccccgcagcagagagaatggtctttaagggcattttggccaggttgctggtccaggttgtgct

SEQ ID NO: 722477 - DNA, 680 bp, Homo sapiens
tgtttccttctcagtatagtccgcataataggggttaattacgatcacagatcaggttggtcttcaaggtcccaaggcataccttttcctcataaaggaagaatcactgtggtccatggactcatgagctcgttggtgacgtgagtcaaagggttctttttaatcacctagataatcgtgagatacaccatgaggtcctcggtctcttcagacagtgagcgctccacagactcaggtatctttgacctctccagtgtcgggttctcattagtgtgttcattccagagttagataacaggtcgtgtaaggctcagctccccacgttcgtgcacgtgctggtcacagtatccgtagaacacttctgggaccttgagcttctacagcaagctgtcccaggtcacaggttcagggtgcacctgggcaatgtggtagaagcgcgtattaggagcctgcgaattcctatgggtcaggtgcaacataggccactttgactttgtaatccaacaaagtctgggcaaacatagccagggacaggtgtgtcttcagtagtagtgggaccggtgtgtctctcagagtctccatccatgagggaatcactggggctttgatctcgcgcaagctctcccgcatacagatgtgagctcggtcatatctctacaggtcgccacaggggtagctct

SEQ ID NO: 722478 - DNA, 984 bp, Homo sapiens
  misc_feature (29)..(29): n is a, c, g, or t
ccagaatcgacgaacgatctagagagganagtaagacgacgaaggtgttacactggtcacaacgattgttgcagccgtttcatggacactccggcgccttccacaattttccgcggcacagtgcgggttatacccagcggttcctccctggcggtttcggaacctctgggcctcgcccggatactttttttggaggcaccccacaggaatacttgtggtcttcgataaccacggagcctacttcccaagagcgccccacctggaaaactggcgccgacaaccacaaggtttttttctgagagcgacacccattgtctgattgctcccccccggcgtttaatccgcgggtgttgccggcccccagttccctgccgggtatctactatcccctgtccacaaggcagttgttcgccacaagaccacccgcgaacccccccgggaatgactgacaaatctctagttccccggaactttttaaaacgcgttctcttctaaggccacaccctggctttgcacacccccataaaacaaaggttctctccttgagaggtcgggctaggcccccgacaactatcaccacgtgggagacaacagacgctgtaatcacacaagaatacgcgtgcaaataaatcagcgcggtaaaaatatatgcaaagcgctctgagactcttggtacactctcttactgcatattcgtggagcagtgacccccaccccgcttacaccattacatcaggaataaatatagtattttcatcgagaaaaaaatcttgtaaaagtacaatattctcccagtcatgacaaacatgcgccagcagaaagtaacatacaggagcaacataaagaagacgcgtatatcacccacctgcgggtaaatctggaaaaaggacattttgttcccgaaacacctggtggtgatgaaaaacccccccttccaaggttccaaaaaaccaagtaaaaaaaatttccaacctttaacaaaaa

SEQ ID NO: 722479 - DNA, 826 bp, Homo sapiens
ggtcactgctcaacaatgccataaagggaggagtagaagatgaagtgagcctctccgcctatatcaccatcgcgcttctggagattccgtctcacagtcactcaccctgtcgtccgcaaaggcgctgtcattgcctggagtcagcctggaagacagtcgacaagaaggggtaccagtggcagccatgtatataccaaagcgctgctggcctatgcttttgcccatggccaggtacaccaggacgaacgaggacacggaagtatctcaagtcaccttaatgaggaagctgtgaagatagacaacgctgtccatgtgggagcgccctcatgaaacccagggcacctagtgcggcatatttacggaaccccaggactccctctgctgaggtggagatgacatcctagtgctccgtcgcttatctcacggcctgccagaccacaagctcggaggacctgacctctgcaaccgacatcgtgaagtgatcacgaagcatcagaatgcccagggcggtttctcctccatccagtgcacagtgggtggctctccatgctctgtcccagtctggggcagcacgtttagccggactgtgacgctgccaggtgcttcccggctcagggcttgtccagtacttccagtgggagaggaccgctgttctgcgcagtcatggcagctgctgggaacaccgccgtagacgagcgggttcccgcaccttggattcccgggagctgctgggcccgcgtggggcacccacctcttctgcgcctttcgctttcttcactctgggggttattttttccttccttgcggcagcccactacgcgcgcgg

SEQ ID NO: 722480 - DNA, 202 bp, Homo sapiens
gcacgagctctctctctctctctctctccttatctctacaaaacattgataaaaattaactgggtgtgggggcacatgcctattgacccagctatttggaaggctaaagagggaggattgcttgggcctgggagggcgaggctacagtgagccgtgattgtgccactgcactgcaacctgggcgacagagagatcctgcctc

SEQ ID NO: 722481 - DNA, 466 bp, Homo sapiens
  misc_feature (147)..(147): n is a, c, g, or t
agtgtgctagcatgacatgcgtctggcgcgctggtgcccaagagtagcgtctacagcctgtagacagtgaggtcagtaggcatggtgtgtcccatgaagcgaaaggcaaatctcaatgggattccaatttggcacacttcagcctgncgtctgtgcaaattccgtcgaaccgagagttaacaaaaagacgtcgcccggtccgttgtcaaacccccggcacgaccgattctagacacgaagaatcgcaggaacttggacagtctactaggaacagaggttcaatattctaacttcgggacactatcccttcaaatttcacaaacaccccaacgggaggcaacggtttcccccaaaacacggggccctggaacggacccttccccgggaaacttcaacttttgcgagaaaaaaactttttaaaacccagggccccaccagacacacgggaacagcccacccattgggc

SEQ ID NO: 722482 - DNA, 708 bp, Homo sapiens
  misc_feature (587)..(587): n is a, c, g, or t
cggggtgaccgtcactgacacctggacagtcctcgttgtgttcggggtgggaagcccacggtgagtctggggacccaagatcttattttcctttctgtcacccccgcttggttttggattccatgacagctggacccggcttctgcgtgatcttcagagggaaggcaccaggagtggactgcgggacacccagagtggactgcaggaggacacagaagctaggctgaagcgggaggaagctgggaaccctgcacggggccactgcgcactgggactcgttactggtccccaagactcagggagaatgggtgagttgaactggcaaggaggagcccactgtcattacgggcctctggaatcccggcaggaggagattaaccacatggacattcgaggtggcagagagagctgcctagagaaggtgcgggggcagcagccagctgaggcagagcccggagggttggtgcaggagcgtctgtagtggagggccatcccccaggctcaaattcctcccataggagattttagccctagtggagctgttgtatgtgatctttgtggggtggtcttgcccatcagatggggcnagtctgaccgagcatgcttggtctgtggctctccaggcccggctggcacgctgttgcggcagtccggttgcctgggggctgcgctagcttggctgcaacctgctgatgtggaccccggcgc

SEQ ID NO: 722483 - DNA, 120 bp, Homo sapiens
  misc_feature (59)..(59): n is a, c, g, or t
taaccagcaggtggccttaggggctgtgaggcagtggggaccttatagatgaaagaaancgtctttgcgttacacccgagtctgactctcggatcagggagctcaccttctgcgacgtgt

SEQ ID NO: 722484 - DNA, 179 bp, Homo sapiens
tatcccgcattgccccataggctatttttgtgtgtattttagatagagacagtgtcttaccatgcttagccaggatggtctcgatctcctgacctcgtgatcctgcccgcctcagcctcccaagtagctgggattacaggtgcagtagagcctgggcaacaagagtgaaactgcctctc

SEQ ID NO: 722485 - DNA, 391 bp, Homo sapiens
cgtatctcatggaatgactaactctgggagatcccgccttacggctcttatgaggaaaagcctggtttttcggtacttgtggcaaggcctttggtacagaagctccccaagtccccagagtggtagcctcaaactcctgggctcaatgcaatcctcctggctcagcctcctgagtagctgggactactggcgtgcacaatcagacctggctcatatatttgatttgatctaatattggtagagacagcatcttgctatgtagcccaggctgatctcgaactcctgtcctcaagtgatcctcccacctcggcctcccaaaaggctgggattacgggtgtgagccactgcacctggcctctggcaattcttatggtaaccaggtcatgtggtt

SEQ ID NO: 722486 - DNA, 200 bp, Homo sapiens
catccccccttctgcccgctccttctgccagctctcgcactctgttcttccgccgtctccggccgctcgtcgtctctctgcccgggcgcaatgcaagaagagattgccgcgctgggtcattagacgactgagctccggacactgtgcaaagctcggttttggctagaggacgacgactccccgcatccgtgtttcctgga

SEQ ID NO: 722487 - DNA, 134 bp, Homo sapiens
  misc_feature (89)..(89): n is a, c, g, or t
agccatcttttgcatttgttcctcattccgcctcctttgctcggcgcaggccggccttccgccgcggggccttccttccggccggccgnggaaccttccggcaggctttattcggccaagagtcccttaaacct

SEQ ID NO: 722488 - DNA, 620 bp, Homo sapiens
gagcggggtgccagccgccagtggtcgcacttgagagggtctcgccggcagctggaaggagccaccgcgccccggccgatcatggccgagggagctggtcttagagaggtgtgatctggagcgtggagaccaaatgggcgagaccaccacacggacaaccagtgccgggagaagctgcgtggtgcgacgggggccgagcccatgtcgtggcatgagcccgtggcaacttggagggccgtcaactacggaggactcagtgtgaggacaggtgctgcaccattcaggtggtcgatgaccggtgccagacgcctatgccaggaggccgaggatcaaggagcgcaagatttgaccagctaccggagagtgactgatgagacggagagggtgaactggaacaggccaccgaaggttggaacctagggcagagatctgacatgcctctcggctgggcaggctgcgaagcacgcccggccagagcggtcgctcccatgcggagcctgtatgcgggctgcagacgctgggagggtgctgccgactggtgacttagcgcagggacattccttgcctgtttggtgctgggggcccacttccaattgtgtggctacttgcaaacggcctgg

SEQ ID NO: 722489 - DNA, 1222 bp, Homo sapiens
cttgtacaggtaggcttgccttagacatgtccacagctgcctaggtaagaaagactacacaggagactatgcccagaagatgcccacaatggaaaattaccattacccatgagacatgcgcagtaaggggaacaaagccatatggagtaatctcaagctaagggcctgcatgcacactggtgaggataagggtagaactaccagaaattcatgctattatgcaaagtgagatgccctagcaactacatcaatattcttgacaagagagcctctgatatatcaactgtgaaatggcgacactactatatagggccccctctatggcagaggggagctttctatgtatcactataaaaaaatataagagctccaaggctacagcgttaggggtaccatgctccttaatgaatctacggtctatgagacaaagaactctcaggtgataacctcgggcaatgcagagactagctacattgtggtcgcatatggtgagactgtaaaatatcagagtgatagctgaatagccccaacataagaaaagatgcttatggagaaagaagaacaaacccttgatgatcagactggatccttataatagtaagcaaagatgactcaaatactacaactatccagaactccatgatacattggctgtgtcaactaatgaagtagcatctagactgtgtggagcactaatcaggcaacattaagaagaaagaaagtgaaggcgtgccacgtaccaagagtaagaccaagagggcaagagaggacacatatgtacacgaggagctccaaatggagcaggacaaagaacagcaaaaacaaaaccggcggcgaatcaccaatatagaaaacaaaacatgaaacccagagaaggcaagcaacaataaataagaacaggacgcgcaccgaacgcacagcacgaaacacaacaccagaaggcacgccaaagacagacaaaaccgaaaaagaggacaaaggagaaaaagaaaaaaaaaagaaacaaagagagtacacaacagagcgaggaaagacaaaaggaaggagaacaaaagagagaccagcgaaggcgacgaggcgacgaaagcgagaaaagagagcaggacgacaaggagacaagagaacaggaagacgacaacagaaacaaaaagaagacaacccaagacacaacagagaagagaaaaagaaaagaggacaacgaaaccaaagacaggcaaaacaa

SEQ ID NO: 722490 - DNA, 201 bp, Homo sapiens
aaaggggggttattagcacggaagccccaccctgccaccaggttggctggggacagggatcaatccaccaggctcgggaggcttggggtggggcagggaagtcttcctccatccctcaaatttagggaaccactgggagccccagactcaggctgaaaatgtctttctgcaaatataaaactctttttaatgaataaaaaa

SEQ ID NO: 722491 - DNA, 108 bp, Homo sapiens
gccggtccgggttgactggaatgacatgctcggagctcccctgtggtcatcgacgcctccactgccattggtgcaccatccaacctgcgtttcctggccaccacaccc

SEQ ID NO: 722492 - DNA, 100 bp, Homo sapiens
tgctgggattacaggtgtgagccactgcagccagccagttaggacaatttccggtgacaccaatcagcgacagtgaggctgggggtacccgagctcgaat

SEQ ID NO: 722493 - DNA, 253 bp, Homo sapiens
ttgcacgagatctgagtcacatactctgaacatcaatgtcactgatagggaggagacctgtgatatatactagagaatatacaccgctggtgttccattagagtgcgagagaccaaaccaagctttgggctaaccttaaatatgaaaggtggttctcaaggttcgcttaggtctttgttgctgccatatgatgagagtggggcctgagtgataaggagaacgtggatgtggttcacaagttcttggcatgttg

SEQ ID NO: 722494 - DNA, 374 bp, Homo sapiens
  misc_feature (45)..(45): n is a, c, g, or t
  misc_feature (58)..(58): n is a, c, g, or t
  misc_feature (80)..(80): n is a, c, g, or t
  misc_feature (91)..(91): n is a, c, g, or t
  misc_feature (126)..(126): n is a, c, g, or t
  misc_feature (167)..(167): n is a, c, g, or t
  misc_feature (267)..(267): n is a, c, g, or t
  misc_feature (272)..(272): n is a, c, g, or t
  misc_feature (300)..(300): n is a, c, g, or t
  misc_feature (320)..(320): n is a, c, g, or t
ggatgtgactgtgcccctgcccagcttcccccacctcccccatgnctgccacccccgnactgtgcgctgcaccgaccggncccttcgaggnacctgctcttaggttcagaagcgaacctcacgtgncacactgaccggcctgaggagatgcctctggtgccaccttncacctgggacggccctcaagtgggaagaggcgctgttcaaggaccacctgaggcgtgacctctgtgggctgctacagcgtgtccagtgtcctgcctgggntgtgnccagccatggaaccatggggagaccttnacctgcactgctgcccaccncgagttgaagaccccactaaccgccaacattacaaaatccggaaacacatttcg

SEQ ID NO: 722495 - DNA, 186 bp, Homo sapiens
ctcatagagtctgtaacagagcaatggactcttctagcttaagcacccctacgccacaggaaggaaagccacgaagacggcagaagtcacaccctcatgacaaagtaggcacaagtctacacataagctaaatcagaatttacaaatcacaagtgtcccgaggtagccattgcactcccggtcatt

SEQ ID NO: 722496 - DNA, 229 bp, Homo sapiens
tggcctccccaacactctttacaaacaaaatgatgttctatgggcaggttttttgggctccctctcttcccgtcagagtccccgggctgtttgaattcaggactgggaccactggcccttgggaagcttgtggacgccatctcctgtggctgggcatcttcccccttcatctggtgtcgggtcgcggaggtgctttcagagtacttagcaggatcagtgttgggcgata

SEQ ID NO: 722497 - DNA, 895 bp, Homo sapiens
gtcttggcacttccatcctctcccacttccatctggcatcccacgcgtggtccccgtgcacttctggagggcacagggtgctgtgcatcccgtgtcttgtgccttgtgctgcgccttctggtgcaaggacgctcagcctcagggctcacgaaggtgcccagtcgcggtccccaggtccccttgtccctttccacagagggcttcctagaagattgcatctagaagtgtccaggcctttatcacggtgttcagcgatttctccttcccactctctcccactttttcgggagacaggaagtcttccagcgtcttctccgcccaggggccttggagggttgcacgcgggaagcggactctgtggcatccagtgcaaacctttcggccttccgtgggttcacaaaaggcgatctcttcgttgccctacaggcccttcgggagatcagccttggggcatttggcaagggcaccccggacaaacaccaagcggcctggctcaatttcctcccgtcatttccaaaggtcagaagcacggggcgattcacaccccacggtcggcccacgcgccgtcgctcctcagcaactccctcgaacctcaaggtggtggcataccaaacctgtgccatcaggcaaagtggctagcgaattaccacggcgcgtcggcagcacacaacgcacaaggcccaaagatagatcgttctaaaacaggtacagctttcctggccggcatttgaaactaccgcggccggcgtccagggccggcccaaacgtcacacatacaagggctctggatacaattcccccgagggccaacattagctttgtggcaccacgcgacacgcccataggaactcggtggctgcaccactcgggggatgagcgtggcctatcacatggg

SEQ ID NO: 722498 - DNA, 350 bp, Homo sapiens
gtctcgatctcttgaccttgtgatccgcccacctcagcctcccaaagtgctgggattacaggcatgagccaccaggcccggccgataattctatttttatgtttatttttagagacagagtttcacactgtcactcaggctggagtgcagtggtatgatcatttgagcccccgcagtcgaggctgcagtaggctgtgattgcaccactgcacactaccctgagcaacagagtagacctgtctcaaaagaaaaagaaatatattctatagccatcatgcctaaacatactagtggattagggtttagttgggttcagatgatgtccccactcacttctgtagtgtaggcca

SEQ ID NO: 722499 - DNA, 205 bp, Homo sapiens
aggggggggggggggtttgccccttttttaaaacccccccttttttttccttggggcccccggtccttttttccgagggttgccccccgaattgtggccctttgggaagtttttttttggggtttcccccttacccccccccggggaattttttggtggggttttcaaaggttttttgaaaaaaaccctttttttcccccccgga

SEQ ID NO: 722500 - DNA, 446 bp, Homo sapiens
cgtgtgcttacggggcctctctgcttcgttctttcgctttgggctgtgcgctcttgcggtccttcggttgcgcggtcaccctggcgttttatggttcgttctgtggctatcggttaggtgttgtgcccgtttcatgtctcctcgatggtgttcacacctgtgctatttccctgtgttccgtgtgcgttaacattgtgtttgcgggtctgcatcaattgtccacccaatgtggaactgttccggttgtgggtctacttggtgcaaacaaatggtgttcctcccatgggagtgcacaccccgggggtctcagggtttatttggccccccttgtagcatgtccattagttgtatgcctggcatcttcactggcttgtagttggccctgttctcgacgttgtaaccctcgcagttcttggccacacccttttttcaccgatttcctatcc

SEQ ID NO: 722501 - DNA, 1087 bp, Homo sapiens
  misc_feature (112)..(112): n is a, c, g, or t
  misc_feature (512)..(512): n is a, c, g, or t
  misc_feature (523)..(523): n is a, c, g, or t
  misc_feature (527)..(527): n is a, c, g, or t
  misc_feature (561)..(561): n is a, c, g, or t
  misc_feature (617)..(618): n is a, c, g, or t
  misc_feature (673)..(673): n is a, c, g, or t
  misc_feature (693)..(693): n is a, c, g, or t
  misc_feature (703)..(703): n is a, c, g, or t
ctatcacactgaaggacatttactgttttttacttagcacagagaatcatccaaagttccctatgaaaaatgtgttccattgccatagctgactacaaattaaagttgaggnggtttctgcatagagtctttatgtccataagctacgggtaggtctattttcagagcatgatacaaattccacagccttctgttcgctggaggatactccagccaccagttcggagggcagacagctgtatcctaaaagcaaccactgagaggccagcagtgaggctgcccatctccaaaacgaaacaacagatcaactggtatcagtctagaaggaccagctttggggtgctttgatcactatgaaaatgttcactggtttctgtcaatcacttggtcaaagttagttcctgtgatttttttttttttttttttggaaatggagtttggctcttgtcaccaggctgaattgcaggggcgtgacctgggctcactgtgcaaccttctgtgcctccgtgagntagctggaatntacngggtgcccgccaccattacccagcatagtttttnggtattttaagtagagacggggttttcaccatgtttggccaggcgtggtctcgaanntcctgtgaccactgtgttccacccacctcggcctcccaaaggtgcggggattacnaggcttgagccaatgtgccnggccatccgnggtgatttttcaaaattttccactttccatataaagtggcatttatatcatgaggcaaaagtgttctgggctgaaaaaattatgccccaaaaaaaacaaaacacacactccggtttccacacatattttcccacgtgttgccctaaggggaaacgctgtcccccctgtgaagccacgcgtgggtatgccgacgtgggcccatatatgcggaaattaacgcgggcctatcaagggggacgttatcaatgtccgcgtcacgacaaacaactgtttggctgtgaacccggatataaacccgtgcgctaatgaattctggtcctcaactttgtgcccccagggtaacccttagaaacctcccctttttgggccccttttaattcccca

SEQ ID NO: 722502 - DNA, 503 bp, Homo sapiens
atgaaatctctgatgccttacattcttcgatttcgaagatcctaaagaagatccatagatgactatatgttgatgggcgaagctgatgatgagaagctcgccttatttcactacgctgtaacgccagagttcacagtcaggtgacttcagtactacagttattcctacaatgtcaactaaggcgcacagtgaagattcgagcgaaggaacacgataatgtatacagcgtgttacgtttgcccacgctattctgaagcattaccaatgatacggaactagagccagttactgaactgactcgggttccagcccagtaggtgggggaacagtttgagcttaaacttccacggagcgaattaatgccaaaagcagtggcaactaactggtggaacttaggcttctctgacagaacttctgtttcgtgaactttggaatgaccggcttcttacagataaaccgaacaggtcgttgtaaatgcccattgacccatgtcatcatttccc

SEQ ID NO: 722503 - DNA, 614 bp, Homo sapiens
  misc_feature (198)..(198): n is a, c, g, or t
  misc_feature (367)..(367): n is a, c, g, or t
cccgtccccgcgcccccgcccccatattttttagccggccccggccgccctttggtgccccgtctttgttgtccccccctggcccttttttggggagggtgggggggggccccggcctcccccgggccttttttttttctgttttccccccaagttccccaacatttgggggggtgtgttttccaaattggggggagnttgtttttcccccctcccctgccctccttttgggaaggggggtttgggcccccgcccccccccccgggggggggggggggccgggggggaggggccccttttttttttttttttttttccccccgggggggaccccaaaatttggtccctcccttttttttgccccccngcctttggggcccccccccccccggggggtttttttccccccgcccccggggttcctgttttttttccccccccccaggggggggttgggggggttccccccaggggggtttttttttttttggggccggggggccttttttggggggggggggggttttttccccccccgggtccccctttttcccgtttttttttttggggccccctttcccctttcccccccccgttgggggggggttttttta

SEQ ID NO: 722504 - DNA, 186 bp, Homo sapiens
  misc_feature (146)..(146): n is a, c, g, or t
gctctcgacgactccccctacggtggacccgcgacggtggttcctttgggacgcacgcacctacgtcaccacgactcttgggaacggggtcgacgactacttacgcgtcgtggtttccacctttgggacgccgcactacgtcacanacgtacttcttgggacacggggtacccgacgtctcgacac

SEQ ID NO: 722505 - DNA, 637 bp, Homo sapiens
  misc_feature (278)..(279): n is a, c, g, or t
  misc_feature (282)..(282): n is a, c, g, or t
tttttgaagttggatggccgctttactcatggccttgacctctcttggccgaaattttcttggtgggtcaaaaggtaggggggtttcccttttattttacccccaaatatgggccaggaggtttctggttaatttaattttaattccctgaccttgtgggttttcttaactggatgaaaaacggcctgtgtccatttgtctacctgtgtacacatatgtacatgtgtggctgcaaatgttctcagtgatttcagagttcatggacccttttcaaaggnntcncagtggtaactatccaaaaatggatgagtatgtaggctacagtttattcacagttggcttcagtttataaaaacaggctgggcgtggtggctcatgcctgtaatcccagcacttcaggaagctgaggcgggtgatcacctgaggtcaggagttcgagaccagcctgcccaacatggtgaaaccccatctctactaaaaatacaaacattagctgggcgtggtggtgggtgcctgtaatcccagatacgttggaggctgaggcaggagaatcacttgaacatgggaggtggaggttgcagtgagctgagattgcaccactgcactgcagcctgggcgacaaagtgagactctgtcc

SEQ ID NO: 722506 - DNA, 249 bp, Homo sapiens
  misc_feature (79)..(79): n is a, c, g, or t
  misc_feature (86)..(86): n is a, c, g, or t
  misc_feature (116)..(116): n is a, c, g, or t
  misc_feature (133)..(133): n is a, c, g, or t
  misc_feature (140)..(140): n is a, c, g, or t
atagggtatttgttctcttggattgaaatttatgcccacagatttttcttttcatttgaaaatgaatgtgaaaatactntggggancggggggggataacacttttcatcactctnatcaatttcttataaantgctatnggaattatttttcctgtgaatattaatgattttactactggctccgaagttttaaaaaagggtctgtagacagaaaacagttggtgcaaccaaaaacaggggggggggg

SEQ ID NO: 722507 - DNA, 891 bp, Homo sapiens
ataaagaaacagagaaacatggacattgttgacagtatcactctctacatattatgaccctcccaatttcacagacataccgtggtgcaaaaagcaccgtgtactagtccactcacaaacccatacctaatacatggtggaactatacggcttatattccctttcgcccgccaatttcgcatattattccttgtcttaacccctgtcacccttcctttcttagttcccaaattactaactttcgcacccgttttcatcaagccgccttccccttgcaaattcaggggcccccatatgtatccaccttaagggctaattggggccaatcacaaccaccggtggtttctgccgaaaacacttttgccctcgttgagtgtaaatacataaaccgtgagttatttttggggcccataacactgccacctgtgctaatatatgactgctccccctctccaagtatattactgggacacagatttcccccttgcacaccacagggcacatattcttcctttttttcacccgtatcaacataagcgtctctatatttctgagacccacactaaagggttacaaattttatctctttaacaaaattcccaaaattgttaatgcactccacccccttttgtcaacttgtatcccccacccttattacaatttgcactcttcctgttctaatgcaatacattattgtccacccaaccccctgcaaacaaccactgctgcttaatactcatcccgtaaaatctgttcctcgccgcacagattacgtattatcccgaccgcatcaggcgcggaggaacccctaaacacaccctcaaccgagacattgccccgctcccccccaaggggggccccccccgtaaatcaaacaataccacacaaaag

SEQ ID NO: 722508 - DNA, 320 bp, Homo sapiens
cctatgtatgcagtgtgctttttgttgccagcttggccagttctgccttagacagtcagcatttgtctcctcctttagcggaggcatcgtctggctccaagtaatgcagtcggtagcaatgcgtagataggagaagccgagcgggagccaggatgggactggtcgtgtttgtgcttttctccaggtcagcacccaaaggtcaatggacagagaccccgggggggtgagcgctggcttctggagacggccgaagttgcctgttttaggaatctctttggaatggggagcgcggtgactctgagtttgggctattaaagtac

SEQ ID NO: 722509 - DNA, 317 bp, Homo sapiens
  misc_feature (131)..(131): n is a, c, g, or t
  misc_feature (145)..(145): n is a, c, g, or t
  misc_feature (286)..(286): n is a, c, g, or t
  misc_feature (293)..(293): n is a, c, g, or t
taaattaaaaaaatatatagacaggggtctcactctgttgatcattctggttttaaactcctggcttcaagtgatcctcccatctcagcctcccaaagtgctgggattacaggcatgagccactgcacccnggccacaattaatntatatttattttactttattttatttatttttgagagggggtcttgctctgtcgccaagctggagtacagttgctcaatctcagctcactgcaacctacacttgccaggttcaagaagattctcctgcctcaagcctcccngaagtangctgggactacaagttgccgcacc

SEQ ID NO: 722510 - DNA, 1380 bp, Homo sapiens
gttactctcgggttctgctcgtgctcctttttgtggtggtggccacaacgctctgtactcaatacacggcggtcgctctgtgcgagtgcacacaagtggtgattggactgtctcgtggccgcgagagtcccgtgttttgctcaaccccggtgttgggcacacccgtgcgcccatcagcggtacaccggaagttaattctcgtcgcgaaatgccccccatgaccttttgatgtgaagctctttccctggggcacacaaatggggctttccaaaggtcacagaaaatgtggttgcggtcacaagatgtgttcctgctggggcccaacactttgcgtgggtggcccaaccaaagaatggaccccccccaactggggaaaccaagcctgggcattcacatggctaccaaaggtggaattaatcccgtggggaccccatctccagcgcgcccaaatatgagcgcgccccggcgttaatggcgccccgtgtgatttggaatatgcccaccccccgggcgtctcacccaattggccaaagccaaagattttgcctgggaagcgtgggacagagaaataagagatttgggattcccccccgtttctctgtgttatcaaaacagaccttggggaaagcataggcccccctcagaagatatctcttggaaaaatctttcggtgggattgcctcgcgcccaatttggtttggagatatagggtttcccctggggccaaagaccccacacagtgtggtggtttgggaggagaccttttctcccaggacactgatgccccaccctttgtggggttccgccgtgtttggcctgtgtttctggtgaataaatgtgagcacccaggcaccgagatttctccgggtttggggtggtgtcactccccaaaaggcacgtggggacccacaagaagagggctcgtctttggaagctcggcgcacaaggtgcacaccacaagtgctttgcccacagagaaagcctccacagagaaggcgttaaaattgaatatatttatagccctcaatataccctcgccacccccaccttcttaaatccacagtgcgtgggaaagagacccggttctccacgagaactcgttttgtgtgtcacacttgggccacatcttaaagtgttatagtaagtataaaagagctcggtgtaaatagagtgaaccacaatgcactcgttaaaccctctcacgaaaggaaaaggagaaatgttttgtggacccacctcttggttttcttttttgcgctgtggcacgttttaaagttaattatgtttttaaaaatcacgtaactttttaaatggaaaccacaacttgacccaaaatttgtcacaagaattttgagacccccttaaaaaagttaaatgaga

SEQ ID NO: 722511 - DNA, 151 bp, Homo sapiens
caacgtatgtgcggctccgacccgaccgtgctgatagacttatttcagcgtccgatagtaccctaactggagaggagccggatgaagacctacaccatcgcctgtgatggatcctgtcacaacaaccccggcggccccatgggttggggct

SEQ ID NO: 722512 - DNA, 365 bp, Homo sapiens
caacgatggtcctcagccttctatttctcagaaaaacagaagctgaatttcaaaatatccggggagctgtcttggagatggtttggagaagaagccagcatcacgagaagtggaggtggtttcatgcctccgggagacagggcttaacttcatacagttgggtttggtggcagtaaaatgtcacggggatcctgtaaagacaagaaggagaaagggtgtgtggcctttctttcatttcctttttttttttccaaagacggggtctcgcctaggcgggaggtaggggtacaatcataactcacggcagccttgacctctggggctcaagcaaccctttcacctcagtttaccaagtagctgaggac

SEQ ID NO: 722513 - DNA, 387 bp, Homo sapiens
  misc_feature (78)..(78): n is a, c, g, or t
gggcaaattccctttttcaagttttgctaccagtgtggccgctccatcggggtccccctcttgccctgccctcgttgntacgggatccttaccttcagcaagtattgcaaaaccaaggcctgggccgagttccccaaaaaggacttcggggacctggtggccattgtgacccaactggagcaagtttccaggaggaaaaaaaaattccagttaaacaccacctgcccgtcccaggcttggggaggacccaggactgtgtgggttttttacctgcctgagcccccccagggaattttccagcctaatgcaggcatttttgcccctttggggtcatgctttgtaacagtgtttcccttgcgccctcccaataaattggccccccgggga

SEQ ID NO: 722514 - DNA, 311 bp, Homo sapiens
acctatgtgctatgggctcgatagggtagtacatagggcatgttgcttttgatatatggattgattttaaattatggcaaattcttgtgctgacaaaagtggtttagaaaataagagaaattcgcagcctgggcaacatggcgaaacccatctctacaaaaattagcgggacatggtagtgagtgcctgtaattccagctactctgaaggctgaggtgagagaatcccttgggcccaggaggtcgaggctgcagtgagcgatagtcatgccactgcactccagccttggtgatagagcaagaccctgtctc

SEQ ID NO: 722515 - DNA, 323 bp, Homo sapiens
tctcgggagtagccctggggagcctgtgtctgaatctgcacaggagcagtatgctcgagtggagatcgggcgcttcgtgctgggcctgctcttccttggggccgggctgttcatctacttcaggaatcagaaaggacactctggacttcagccaagaggattcctgagctgaagtgcagatgacacattcaaagaagaactttctgccccagctttgcaggatgaaaagctttccctcctggctgttattcttccacaagagagggctttctcaggacctggttgctactggttcagcaactgcagaaaatgtcctcccttgt

SEQ ID NO: 722516 - DNA, 584 bp, Homo sapiens
gataccagaggatcccgcaggaaacagctaaccattagtgacaggattaacatcagtaatactgagagcttcttatatcaataattatggcaaaatgtcattttgtaatatagtatatgctttccaggtgtgggggtggtaaagtaatgaggccaaaatcatcctgccccaagactaatatcttctaatggtgcattagcaaggaaggcagaaatcaatatttagatatcagtagagtacataatactgtagaaagaagaagagcacacatgagacagagaaggaggtggatgctcctgggttgagagcaaggggtgggggtgtggaagggactaggccagaatccccagcagttctctggtttacagctccaagggacagaacagctggtgtcaagacctgggttagaggtttgtcaaacagaggcagggcccagtcacctctttggaggggagtgatgagaaggggattatggtcacctgagagggttgagtaaacttggatcagggcacaggcttctctcaccatactcagctttttgcactcactccctagttgagcctactggcatcaagctctagatg

SEQ ID NO: 722517 - DNA, 798 bp, Homo sapiens
attttccacattttctatccactgtaattttatgtgtcactgaagtgcctgcccaggactgtatattacagtctctcacaaacactgggaaaagggactgtcatcatcttgagtactctgtgtgtgtatatatatatatagatagatagattttttctttttcttcttgagacagagatctctaagtggtcacccagggcgtggagatacaggggcacaagtctgggcatcacgtgcaacctccacctccgtgggtacaagtgattttcctgccgtcagcctcccaagtagcgtggggtatagaggcacatgccaccattgccgggctaatttaggggagtctttagctagagagggggttacaccagtgtgggaccaggcgtggtctcaaagcctccgtgaccatcaaggtgattccacccaccgtgcggcctccccaaagggcggggactaacaggacgttgagcccaagtgacgccgggctgagatacaagtatcactggtagacaaccccattgaagttttaattaccttcagtatataagacacataacgggttggtgttttctctgtgcatgctcgtgtccaccataagggtcacaagatacgtctcgggtaagcctatcttcctagttccttatactccatattgggactccccagtttcgggagagtacctttaattaaaccacgtgcatgtctggggataagtataaaccttaatgcataaatttataccgagactcatgagtttactctccataagagtattgaacactaactgtatagcgatgaccc

SEQ ID NO: 722518 - DNA, 592 bp, Homo sapiens
  misc_feature (31)..(31): n is a, c, g, or t
  misc_feature (505)..(505): n is a, c, g, or t
  misc_feature (529)..(529): n is a, c, g, or t
aattcgcggccgcgtcgacgtcgacgcgcgngggagagcacaaatgtgtagtttagcaatatgctttaaaaaaaacatattaaataaaaagatctggaggtaaatctaatgctataactctgagggagggatgaatgtaaatggtagtttgaaatatctgcaataactctaacttgatttgacaatacctgtgatttctatttgggacagagtcacaggtcctggtaatattactgtagtctgtttcctacattccataattgaatagatgttaaatttcagtgtgaagttagtgaaaactgcaatcatttccttatccggttcacagatcagcaagaggacatagactccaggttaagaacacctgtcctatgggaagtgagtggtagggactgagttaatgaccctaagggaggctgtgatggacagagggaaggaggatggcaggctcagcctaggacagcaggagggtgagcaggtgtttctgaaggcatataagaagacntagaacgtggttgactcattcacntcaattctaccactcaggactgacaaggagccacctttaaggcctggcggtttagaggttttt

SEQ ID NO: 722519 - DNA, 898 bp, Homo sapiens
ggcagcgcccagcaacaagacatgagctggcctggagtccgcggctggccgcgtgagtaggtgattgtctgacaagcagaggcatgagctgggtccagtgccaccctactggcccgaggcctctgtagggcctgggtgaggcacctgcggggccgccctcacaggaacctccatctctcagtgtccctcgccggctccctcggggcctccactgcagcgcagactgcccatagctctgaacacgtccctggttcccagcccacctggaaccccggcagaggcccaccaatggctctggtgccctttgagggacctgttatgggcagagcgcactggtggggaacgggacaatggcgagcttcctgcagacggtgctggaaattggcgcgagcgcatgcgtgctgtaatagcggggccagcattgatcttcactcttaccctggcccgtgaggcagagactgccgggatgtatggtgatcagagcgggaccatggctatgtgttaacaagcctaggctgacgtcaatagaatcttcacaccaaagggaaggttcatatcctggtcacatcgcaaaccattcaattccaggcagacaatcgttcggatccaactaacccatcgggagacgacacagcgcacggtgctcggcgactgtggctatggtacccgtgtggcagaccaagtaactgcgcaggaaaaacccaccggtactgctgcagttggcaccacaaaacacaacgcggcaggaaccgtcgaaggatatcccatgggcttgggaatttcgaggtcacttgccctttgtggaggaaccgggccagagaacaatgtctgtaaacgcccctagtgtgggcgttccaaagtatatcaggggatggccgtcgctttgaaaaaggcatgg

SEQ ID NO: 722520 - DNA, 109 bp, Homo sapiens
tcccgaaaaccccccggaaggggccccccatccctggtaccccccccggcaaggtgggggcgggtttttcccccgggttgacaagggaaaaaaaaccaacctggtttga

SEQ ID NO: 722521 - DNA, 233 bp, Homo sapiens
gaatcggcatcctgagctgccgagggttctcccaccgacataccggcgggcacggctttgcgcagggaggccatgacggacttctcgtcggaggcggacgatgccccctggaagaactgcagcagatttcctgagtactccgggacgaggttgaccgaaccgtcttgaagggccttgacgtagacgtctcgggcaccgatctgcatgcgacgtttgatcgtgatcccgaccgt

SEQ ID NO: 722522 - DNA, 582 bp, Homo sapiens
taggtttgtgtttaagaagacaccttctgagtattctcataggagactgcgtcaagcaatcgagatttgggagctgaaccaaagcctcttcaaaaagcagagtggactgcatttaaatttgatttccatcttaatgttactcagatataagagaagtctcattcgcctttgtcttgtacttctgtgttcatttttttttttttttttgggctagagttctccactattcccaattcaaagaattacagatacacattccccagaaatccataaagggtgttccgggcccattctgtaatagttcagtagaattaccattaattacatacagattgaacctatccacaatagtcagaaaacaactgggcatttctatactttacgggaaaaaaaatccggtggtcccattttatgcagaagcatattggcgggttggaacagattatgattgcatacagttttctagcaatttccttggttccttttaacagcatggtcttggcgggtactctggctgattggctggctagatttaaattacattggtgtccctactggataatatcagggatccggattacg

SEQ ID NO: 722523 - DNA, 106 bp, Homo sapiens
ttccctattccctgcactctcctcatgctcgggtcctcatcactatcccagtcagtcccacatatcatgcccggtctggcaaccccgttctgctcggcccgacgtt

SEQ ID NO: 722524 - DNA, 883 bp, Homo sapiens
  misc_feature (244)..(244): n is a, c, g, or t
  misc_feature (275)..(275): n is a, c, g, or t
  misc_feature (291)..(291): n is a, c, g, or t
  misc_feature (510)..(510): n is a, c, g, or t
  misc_feature (763)..(763): n is a, c, g, or t
  misc_feature (832)..(833): n is a, c, g, or t
cttcctccatctctcccccgggggaggcaatttgtcaaagattgttgttggattttacacacagggaaatctaaggaaggtgtggaaaccagaccaggactccagactctggtctccctgtttacagggtcttaaatggcggagccactttgggttctatccacaagattgctttgtaaaaaaaccaagaaacaaacaaacaaaaaactcaaaaaaacagccctgacctaaatattcacaaggnaccttaggcaatatctgcaaacaaaagtgantgatgagtggaatctntcatctttacaactaagacagctccagagttgaagcaagtggaaatatctctagacagagatttgggcaggttttgccagttacaaactatgagaacctgggcaggtttacctctctgagcttctgtgaccttgtaaaataggctgcattgcactaaacgtgcaggaggaatcccaggatcctcctgtgcacagggctggtttcttcccatccttttcnttgttctgcctctctcctcctctccaagagatgaatacatttggacccagtaggggcctatgtttgcaaaagctcgcaggtgattctaatgcagccagcctggctctggcagtgagttcttggacacttctagaggcacatttactagtgaggaaggtcactgtgtgctgaaggcatgactcatcttccattcctttcttccatgaagcaaggcgcatgggtcgactgagctgggagagtccacagtgtcagnctcccccacgcttccctccctccttattccttgtgtgctgtactttgtcttgatttcctgtactctgcnncaagccaggagatggtaagatctcaaaacaatcatttttgtgggaaatgg

SEQ ID NO: 722525 - DNA, 454 bp, Homo sapiens
agaatgtctggtgctataaatatcttaaacctgagggataacttcctagtggtgggagagtgggatcccttgctggtgcagagtggggatggaatgaaaggatttgggagagagttggacggctataaaaggaagaattttattcccgctggggatgactctggattcacaaaacagacttttccagtacaaacagaatattttggatttgcttggtagtttctccctgactgctaatacatctaatgcttcacctttgccctttctagctacctagatcccattctatagaatcccacctagttcttgctcattcataggacagagttgtacaatccgagtccagtgaattttgaaaccctcccctgctctgtttatactttccactttcccaggtatactccagagaacctgacctcagggaaatggtcttccaaaattctcgtgccgaatt

SEQ ID NO: 722526 - DNA, 917 bp, Homo sapiens
aaataagtaagctgagggttgcctctccatgaggggcttctgttatattgtggaggcatcaactcgagctgtaatgttcacaggataagggccaccactaaatgttaatgatgcaccatgcagaagtcaatattttgcactcctccacggctgtacagaagtagagtcatatcgggtgtaatgcgcgcacagcctggcagtgcaaaaggtattttcgagggtctcgatcttctgacacagcagctgcgcatcgggatgcacaatacggtggattcgactcgcttgacccggccagttggcattctagagcccactaatggagtgcactcggatgctatgtgtcacccgtgagggtgggcccaggatctggccagtctgatatgttagcataaacggcagtccaccatagagccactccgtagcgtagcacagagcaacggtacatacgtgtggaagcttctacatgtgctcactatggtcccctatgcaataggagcctgtatttcgccagtcatagggaggcttcattcagctgagttgtcccctattctcaggctgacaaccgtagagccaatacctacgccaaaatccaggttcgactatcatacttgcatcggcgtaaatctaactgttgcttgcccacaacactttgctgcggcctactccggaatgccccgacgttagctcggactaccccgatgcatacaccacatgaaacatcctatcatctgtaggctctattcatttctctaacagcagtaatattaataattttcatgatgtgagaagccttcgcttcgaagcgaaaagtcctaatagtcagaagaacccttcgatatacctggagtgactatatggatgccccccaccctaccacacattcgaagaaccgaatacataatctaatacacacgatg

SEQ ID NO: 722527 - DNA, 597 bp, Homo sapiens
atgtccctagcgggatgaatagatctgtttcttatcagtgcacaatgatttgtgtcatagacgtaatatgatcaatttgcacttgttttcttgacaggtcgttccaggtgtagaggaggcatgaaggatgaccgtcgggacagatactctgcgggcaaaaggggtggatttaatacctttagggacagggaaaattatgacagaggttactctagcctgcttaaaagagattttggggcaaaaactcagaatggtgtttacagtgctgcaaattacaccaatgggagctttggaagtaattttgtgtctgctggtatacagaccagttttaggactggtaatccaacagggacttaccagaatggttatgatagcactcagcaatacggaagtaatgttccaaatatgcacaatggtatgaaccaacaggcatatgcatatcctgctactgcagctgcacctatgattggttatccaatgccaacaggatattcccaataagactttacaagtatatgtaaatgtctgtttttcataattgctctttatattgtgtgttatctgacaagatagttatttaagaaacatgggaattgc

SEQ ID NO: 722528 - DNA, 459 bp, Homo sapiens
taggtacagctcacacacctctgccaactgtccatcggctgagagggcgtcagaattatatccttcttgctcatcagttgatgatacgcccgcacagatgacaacacagcagccattcaagcaattctctacaacacctgtatcggcgctatcggtatcatccatcgccttagcatgatttatcctacactccaactcatgagcaccacaaaaacatagcccttctaaacgctcaatccaagcctcaccccactactaggcctcctcctagcagcagcagtgcaaatcagcccaattaggtctccacccctgactcccctcagccatagcacggcccaccccagtctcagccctactccactcaagcactatagttgtcgcaggaatcttcttactcatccgcttccaccccctagcagaaaatagcccactaatccaaactctaacacaatgcttagg

SEQ ID NO: 722529 - DNA, 428 bp, Homo sapiens
  misc_feature (139)..(139): n is a, c, g, or t
  misc_feature (158)..(158): n is a, c, g, or t
  misc_feature (177)..(178): n is a, c, g, or t
  misc_feature (196)..(197): n is a, c, g, or t
  misc_feature (215)..(215): n is a, c, g, or t
  misc_feature (235)..(235): n is a, c, g, or t
  misc_feature (392)..(392): n is a, c, g, or t
  misc_feature (412)..(412): n is a, c, g, or t
  misc_feature (425)..(425): n is a, c, g, or t
aggagcctgaatcataaacagtatccaatttataggaaccttgccctctggttatagtagaccgtgtgccctcctccagtgcctggcattattagacatgccggtcatttaccctcagaccgactctcttattagaatnctgagtgcttcagttatancatgtttgaatttttaaannattctgttttagaaatgnntcttatgctctcatgacnatgcagtttctaaacatacncatagaagctgagtctctcgatccaatatgtttttattagttccatttaatttatcacatagattgggaaggcaagctaaaagccttaaaaatgccctttatattttggagtgatttcagcgttgaacactagtatactatctaaatttgctggctncacttcttttaaactgtggncaatttaaagggnatg

SEQ ID NO: 722530 - DNA, 500 bp, Homo sapiens
cggaaggagacgcatctctgcacccttctctaaaggctgcaatgccaagacgccgaatggctttaaaggccaatgaaggcagtgttgaaaggtgtacacagccgacaataaatgatatgaagatccgcactgtcacccaccttccggcggccgaagacactgcgaactccggagacagcccaaatatccctcggaagagcgctcccaggagaaatcaagcgttgacgcactatgcgatcatacaagtttccgctgaccactgagtctgcacatgaagaatgatagaagactatacaacacacttgtgttcattgtggatgtttatagccgaacaagcaccagattaaaacaggctgtgaagaagctgtatgacattgatgtggccaaggtcaacaacctgagttcggcctgatggagagaaaaaaggcatatgttcgacatggctcctgattacgatgctttcggatgttgcccaaataccttcgggaggatctaaactg

SEQ ID NO: 722531 - DNA, 106 bp, Homo sapiens
gagctggggtagcttccaatgatgattatgatgccatgatgatatcaccataagaatggttgatatttatggagtgcttgctaattgccagatagcactcgaagca

SEQ ID NO: 722532 - DNA, 173 bp, Homo sapiens
  misc_feature (80)..(80): n is a, c, g, or t
  misc_feature (117)..(117): n is a, c, g, or t
tgcacgtggacggaccccctcccagcctcagctccgggcgacgtggagtggggcggtctggcggccgagatgccgtcctngctgcgaggacccatccccgacgtcaccttcgagctntgcgcgagggcgagacgaaggccgtgaagttggtcgcacccccggggccgcggcga

SEQ ID NO: 722533 - DNA, 310 bp, Homo sapiens
aggtcgtatactgctatagcgcagtgcggtcgcagaggcgtatacttatactctttgtctgtacccgtcagctgtgccgaggcgcacaacgcgccgacgcggacagaggactggacgacagcctatactcgcttaggacccaagtacagaggtgcacttacatggttcaccattaatactgacttaacacccttccatagaagggatgtattgaagcttggcaaggcaccaatgatataagggtatagctggatattctgaagaatatgatatatgcattcgcgccaagagtgcctttcgtggcggatgc

SEQ ID NO: 722534 - DNA, 506 bp, Homo sapiens
acggtagcccgcgagtttcgttctccgtgggcggcccggttgtcgaattgtgcattttaggcatattttatacacatccctcagcattatatgcttcagccttaacactgtcatagcagatagtcgagaatgaagtttcttattaataattaaattgttggttttaaaccaaactcagacgtgttttaattgaggagtacaaactttctaatattgtaggtttggtagattaggttcttttcacccttaggccaaagtttgacatttaaggttttagctaccacttagattacaattaatttgcttaagttaaattgctgaagtgtatttcttgtttaaggttgccaatttccaattaaatgccacctgaggtgtatactacttggggatccgtgcacgttaacgattactaggactatgcagaaaccagagagtttaagaatacccgcatggccccccttccttccccccccctccccctcccccacctcctcccccccccctcc

SEQ ID NO: 722535 - DNA, 108 bp, Homo sapiens
gatgtgattctatgaggatccccatcaaaacctggggcataagcatgatgcagccgtttgcgcagtatcatgaagcatccgattttgcgagtgacagatagcaggaag

SEQ ID NO: 722536 - DNA, 470 bp, Homo sapiens
tagacgatcgcttatgttgtgttcatgcagtgtgacaaagaagtaaaagtgaggctgcttcagagccctggccatgtgtccatccagactccaagtggagtgtagggctcccaggcagagaggggtgggaggggcagaccctgcccagggagtccttcaaattgggacagggcatcagacggcatcccaagggctcgccttccctttcccccccaacccaactcaggtggagggggagcagctgtcaccagagccgatgttggtgacaggttcggcttcaagcacggaaggaaccatcagcggtgaaccctgaggggcatccagcattggggagcaggttggagaagggctgtgtcgctggggtcactgaaccaggatttgatggggatggcatggtctggatggctcctgtaagcccctggggaagttatccagtgatcacaaatgctggagaggtcactgtggaccac

SEQ ID NO: 722537 - DNA, 87 bp, Homo sapiens
cttttaattacaaaagatgtaaaatgatgcattataaaacttggaagcaactttatacatcttttgtaattaaaagcatcacaatga

SEQ ID NO: 722538 - DNA, 333 bp, Homo sapiens
gcacgagaagctcctaaaaaatcaaaaaaaaaaaaaaaaaaaaaaaaaaaaaaaaaaaaaaaaaaaaaaaaaaaaaaaaaaaaaaaaaaaaaaaaaaaaaaaaaaaaaaaaaccctggggggggggccgggaaccaaatccgccctaaagggagggattttaaaattaacgggccgggttttaacaacgtcgggacgggaaaaacccgggggtaaccaaattaaaaggcctggaaaaaaatccccttttcacaagggggggaaaaagaaaaaaggcccccaccgaccgcccttccaaaaagtggcccacccggaagggcaaagggaaaatgga

SEQ ID NO: 722539 - DNA, 337 bp, Homo sapiens
cacgaggagtcgcggtcaggagaatgtgcataacaagctgccggcgtggcatgtgtaatccttgcagtagttacaagcccggtagatttccctgcttcttcggcatatgccaaaatgcttttttcttcatttcctccggctgatttgtaatcgccgcgaatcgccttattgttcaggctgataataccttcatttgtcttgactccggtcactattgcgctcatgggcggggccgagtcagaggtttgctgattggtactgtaagtccgcgaaaaagcggtaaaaggaaaattctcgaatgcaagacgattttcctcgccgctttcgccgcggagct

SEQ ID NO: 722540 - DNA, 314 bp, Homo sapiens
atcagtttctaaaaaaaaaaaaagttaactgtaaaacaacctcaggcaggtccttcaggagggattccagaagaaggcagtgttatcataggagatgacagctctatgcgcgtattgcccctggagaccgtccagtgggacaagatgtagaggtggaagacagtgatattgatgatcccgaccctgtgtacacctaggctaatgtgtatttgtgtcctggtttttgccaagaaaaaattaaaaagtaaataaatttttaaaaattttaataggaaaaaagcttacagaatgacactataaagaaaatattttta

SEQ ID NO: 722541 - DNA, 465 bp, Homo sapiens
accctatgtagatatggactctagcaatatgattgcgctgtactcctagggtaacttgtacgttgatacaacgttacttgatcatagagtctagtagttcgctttgactggtgaagtcttagcatgtactgctcggaggttgggttctgctccgaggtcgccccaaccgaaatttttaatgcaggtttggtagtttaggacctgtgggtttgttaggtactgtttgcattaataaattaaagctccatagggtcttctcgtcttgctgtgttatgcccgcctcttcacgggcaggtcaatttcactggttaaaagtaagagacagctgaaccctcgtggagccattcatacaggtccctatttaaggaacaagtgattatgctacctttgcacggttagggtaccgcggccgttaaacatgtgtcactgggcaggcggtgcctctaatactggtgatgctagagg

SEQ ID NO: 722542 - DNA, 938 bp, Homo sapiens
  misc_feature (1)..(1): n is a, c, g, or t
  misc_feature (201)..(201): n is a, c, g, or t
  misc_feature (792)..(792): n is a, c, g, or t
ngccttgtctatggttgactgcgtcacgtctacaatgtgtcgttcgtgtgttcgctgcaccggagctatgactgcctccccccgctttggcgccccctcttatcctaagtcccgctcctattccgtcctctccccctctaccctctttgtgcctctctcaccaggccttttccccccccggtgtattctctcccgtcggcncccaggtggcccctctccctttatcgtgggccaaacgttccccaagaccccgaaccgcccagtggtgtatccccggaactctttgggctcagactcagcttcctccatggtgaagcatggcgtcaaatgacatataattgcggggcgccataatacacatgggccccacaccacaccccctgggtctaaacacgaccccacgataaaatcgcccccacccccctctcccgcaaaatcatgacccccctggcccttcccttttaccaatgacacgtgtctcacctgatgcccccaagaccctttgtaatcacggattgcgctccacaccccggattatctccacaatttattactccaggttcaaattagtaccaccccccccgttctattatacacccaacgagggtccctcaatcgtcccccgcacgcgaaagtgtcttaattaaagcacgacaccacctctattaaagaaatggtgagaagttaatgatccatcttaataattccgtacagatcaaccaacagtgggtgaaatatttaacgtcctctatattataccggcatttagcaaatggacaaataaaatacatngtaagttgtccacatccttcataaagatttaaccccccgaggggtggttttaaaaaaacatcaagcccgcggaatccccaccccaccccaggtgccccccccccatccggaaataaaaaaaaaaaatggaaaattcggacaaaaca

SEQ ID NO: 722543 - DNA, 292 bp, Homo sapiens
gatgtatggctgcgacctggggcccgacggctgcctcctccgcgggcatgaccagttcgcctacgagggcaaggattacatcgccctgaacgaggacctgagctcctggaccgcggcggacaccgcggatcagatcacccagcgcaagtgggaggcggcccgtgtggcggagcagttgagagcctaccgggagggcctgtgcgtggagtggctccgaagatacctggagaacgggaaggagacgctgcagcgcgcggacccccaaaagatatatgtgaccaaccagccggtc

SEQ ID NO: 722544 - DNA, 145 bp, Homo sapiens
attgcaggcagtcatgctaagtcattttgcgtagctgggttttggtttaatccacctcaactgcctgctatgactggactaacgacttgacgacgacgtgacggacgaacggcttaccgtattacgtgacgggacgacgactttg

SEQ ID NO: 722545 - DNA, 146 bp, Homo sapiens
tggagaaggcatgatgcacctagggaaaaggcccaaccccgtggaagacctggcctggcgttcacagatgctctctgaaagatcagtgtcacactcaggaatcactgactgctggcacagccgctaaaatatcctgcttatctcct

SEQ ID NO: 722546 - DNA, 1782 bp, Homo sapiens
taattatatggcagggttttggttagccaaaaaaaacttctttttaaataatccagtgaaggattttttaagcttttaaaatgttaaattctgatagtcttaaattgaagtcaaagcatttctttttttctttttcccttagacttctttatgatctaagacacttatgaaggtaccaggtgccctaattgaccttaaaaggttagaaatgaatctttgccttgatgcaaagcatcagacttgatgcaaatcaacatataaataactgcaagcaaatatagagtcaactctggactatttaattttggtttatctgtggctaatcttgttttcaaatgcatggacagaacctattcaactacaatgagtatgggctcaatcctaccttgttggtatctcaaatccccctgtttacttttaggcagtaactgcctttgaaaacagaacatttcccttttccagagcagaccttacctcagtctctgaaatgggttgactttcagggaagactcaacaggcttccaggtgtgaaaacaggaaggtcatcttaaattagattttaatattatggcctcattgcttcatcattttgctagaaggaaattccctgaatatcagatacacccctattcaaataaaatcacaaaaccatctactaaagctaaacagtttttcaaaaccattctgaattatgcagtaatatttccttctgtaagaatatgctctgttctgtaaaccgagtattgagagaatagagaataaaaccacttcgcagatagcatgaagaggaaatgaggtaatgaaagtattttggaagttagagaagtcattaatgcaaaatatttttacctcaaatttcagttttgaagcacaaataattttacatgttgtatcagtgagaacagaaaatagaaaacaaaagatgtgggttgagtgaagtttccctgaataaaaggaatgcgttgttcattttaattattgtatagattagaataaggagcgagaaaaaaaaagctattcattattgtgattctagagtagctaataggtctactaactatccaatgaactcagtaaatataaagacaaaattgcaacatagtatggcatttttagctattcctgcccctgacccctccccgatatggaattttgtatattctccatggaggtaaaagtataaaatcatgctttttttggtgtacaaggatgttcattatagcatttttttttgttacagaaaaattttctacagcttaaatgtctgacagtccctagagttgaaaagatttccatgatataatattaaagcaattttccaaaagcatgtcttaaaaaataatacatatacatttatattcacaaaaatgcctagaaagaaacatcaaattgttaatggttctgcttcagtggcgtgggattgaaaaactgtcttgtatttgatcattttataatttatgtgtataatttttgtaataaaacaaaaaaaattaagatctggttttaaaactcaaatccattaagacgtttgagcactttaaaaagaagcttcatatggtttttagggatctgaatagtatgttttttgccttgctaataattcaaatcatagtattggcagaataattcttcatttctctctgttattatttattttcaattctgtaaattctcattcatctttatacctaatttacacatttgtccaaaaagtatacacatttattttaaaacttttttggtaggatcactaatgactgagttttagaagttaaaaaaaaa

SEQ ID NO: 722547 - DNA, 772 bp, Homo sapiens
  misc_feature (308)..(308): n is a, c, g, or t
  misc_feature (364)..(364): n is a, c, g, or t
  misc_feature (411)..(411): n is a, c, g, or t
agaaaatctggaggcagctatcacctatcgacccaaacctggaccagccagaagaagccgtaagtaccgccattcaagatccaatcagtcggcttatgcagtatgtgcgtagtcacatgctgcgtcatagaaaaggccattaatggacgacggaaatgttccagcaaaagaggaagtgtatgcacgccgtcttccagttactctccagctcagtcggtgtctacgtaatgatcgacacacaggtatgagagagtattcgatggaggagtaggaagagaaacgagcacgtagaaagctaagacaagatncagacataggttcacatcagaagacaacaagattgcgtggcttcatcgcgcgaagnatgccgacttcgcgataggcgttactcttgagttatacaagagagcnaggccaaatagtgagatacacgcccacaaccagatggaatataaaggggcgaggagcactgcgcgcatcgcatggtacagagacacactaggggttgtgtccctcagagcactaaattaataggtaaatagctatcaaaaaatagaacagcgataagaatccagagtaatttagaaaaaccttgcgagtagtagcgacgcgagcgtacagggcgtgactgtaccaatcagatgagaccgtgggaaggtcaccgatttgtacccgagaggcgcacccgacaaaacccataatcttccttgtacatctctgcggcctgttcttctattacaccctgattgaaacgacctttgcttatggccca

SEQ ID NO: 722548 - DNA, 1950 bp, Homo sapiens
  misc_feature (539)..(539): n is a, c, g, or t
ttagtcggaattcgcctctcagagtatactctaccagtatgagggacctacagtctctatcgcagctatcccacgactccccattcgctacatacgttcggtcactcgtaataaatagcagtctcggtatacatccgtctgtagcgcaactgggcctggatcgctccaacataccgcccagtaggacatgtgagtaccatacatgcctaaagctactgtgacactcatctagcaggacacgcaaccctgtcacttctgatgcgatggtggaccactacaattcgagcatccgaagcacagctaataactatggatgagagtctttgacattccatcctcagcgtgatcacatatccatccagacacaatattaggcaagcgcttgcttataaaattagcttgttatatacatgacacgtccttgtcccttaatcgccttattgcgtttggcccttgtaggaggacgttaattaatggcatctgacgattgcaagtttattcgtaatttaaccattcggaagaaaaaatcactttagatnaacgcactatcggggaacaccttaagtttcggcattcacttgggccattatagaccgaaaccctagataaaaggcaagaacgagaggacgcttttgcgaaataacgcgacataaattagatgccacctaacacgacagagtagacagggtgcggcacacgacattaattacgaattgtgaccataggaaagtggggggacaccgagaccacggagtaagctgttggacaagagaagcgtatcagcacgtatagatacacctgaacccaaaattcccgcacgagttaagcaatgttattggagggaggcagaccaagggaaacgcccataaagggttatccacaagtagtgaacacatgtgcgttggaaagatggaagggtgctataagccgttacacaggtttaaaggcaaacagagggtgtaccacaagcgacgcatacacaccgaacaggaaaagtatacctgatataaacaccgtgtagacagcaatgtgcagattcagtaataagccacaccgattacaaaatagacagataacgagcagacgcaccgcagtaacaagacgaaagaccaagcgaagcacgcaagaccgaatccagcatataagtatcaccgtatatggaccagccaggaaagacagcaaggcagtgcatagtaccaagagagcaaagaggcacgacacgccatacagagacagagtacaacagccagtacgcagaagattcgcgaggagtggaacaagccagccgttgtgcgcaaccgcaagagagcggaccacgacaagtccaaaagaggaacagcacacatacacgaggacgtatgaacgagacagccgtagtacgcgaggtaagctcgacccgtatacaggtggtgaagtataagcgaaggagaagtagcgatccgaaagccaagaagagcgtccagaaagggcggagcagccacagaaacaaagaacagcacggcagaaagggcacagaccactagaaaaagaagccgctgagccaagacgagtccagagccaggaatgggaacaatagcagaagtaaagcgccacaggaagtagcgagcgagcccacgaacgacaataaacagagtaggagagagacgacacgggcagcacaaaaggagaaaacaacgagacgagcagacgagacagcgcgcgcagccgcacgatagcgaccagcacacggagacaaaaaggcgcacagagagaaagcaagagatgacacacagagggcgaagccacaataacgcgcaccgagcaaagcgagcacacgacaagaaagacgaggcagacgaacgagcagccagacaaccagcgggagaacgggtgaacacacaagaggagtgagacggaagcacagggcgacgcgaattatccaacaagaaacgacagcacaccgagcaagat

SEQ ID NO: 722549 - DNA, 455 bp, Homo sapiens
  misc_feature (76)..(76): n is a, c, g, or t
  misc_feature (212)..(212): n is a, c, g, or t
  misc_feature (222)..(222): n is a, c, g, or t
  misc_feature (279)..(279): n is a, c, g, or t
  misc_feature (285)..(285): n is a, c, g, or t
  misc_feature (346)..(346): n is a, c, g, or t
  misc_feature (403)..(403): n is a, c, g, or t
  misc_feature (408)..(408): n is a, c, g, or t
tgacttcatgtggcccgcccaagcagcagtacactacagtgaagctctgtctttaggtagagcccatgcctgaagnctgtgttatttaaaagcagagatgatgaacgagaagcaggaagtcagtggtaggcatgggtggcgtgctcttagaggcaggcagtgtctgaagagcatgaagcagacagggtactgagagttccaggcccctgcangctgaggctnaaaaaggctgggactgtcccctcagctaccaagcctaggactgcccaaccaccccanagcctncagagaaacttcagcaagggcagtttgtcccaggacagtgaaaagagcttgttgagaagtngggagtaggctacaaggggccgttccaggggggagcctgaatgtaatccccagcttncaagnaaggcggggaaacttggggaaagtttaaaacggaatcgtcacctaac

SEQ ID NO: 722550 - DNA, 101 bp, Homo sapiens
gcggccgcctactactactactactgctcgaattcaagcttctaacgatgtacggggacatggcataataggtgttaaaaaaaaataaaggacctctgggc

SEQ ID NO: 722551 - DNA, 80 bp, Homo sapiens
acagcagcttctgaggaaaccttgttcaacgcgtcccagccatcagcgagttagagaggaatgtggaagaacttaagcgg

SEQ ID NO: 722552 - DNA, 262 bp, Homo sapiens
aagcgcttcagctggggtgctgatttcaggcagacccccaaagcaaagtgagacagatgcccacgttcaacgtgattagtgatactgtggcagggctgacagagaaataatcctggaggtctccacagctgctgggactggcactggcgatgaaaagcgcaggagtgggcacgggtgtggtgggtgatggtggcctcactcagagtggaccaaggccccagctccttgccaaaaccaaagcccttgggctcgaagttataag

SEQ ID NO: 722553 - DNA, 325 bp, Homo sapiens
agattggaatcaacctgtgtctatcagcaaatgaacagataaaatgtggtatatataccccgtggaatactatttggccattaaaaaaacaaaattctgttattctcagcaacatgtatgatcttagaagacattatgttaagtaagccaggcacagaaagataaatactccatgtactgtacttatgtggaaggtaaaaaagatctcatagaagtagagagtggctcatgcctctagtctcggtgctttgggagtctgaggtgggaggatcacttgaggcctggagtttgagaccagcctgagcaacatctctcaaaattaaaa

SEQ ID NO: 722554 - DNA, 266 bp, Homo sapiens
ttgttctccccacgcgccttctgctttcttctcctcctcttcagcttctttggtttcctctccttcttcacgcttcacctccttcttcttcttcttgcgctctcttcagactcttccttgagaagtttcttcctcgctcagctcgcctcctcctgcctcgcgcctctctccttgtgccttctcctcactcctcggtcttctcctatcagacagggggctcatcctttgtgcttcctacagccttggccagccctcaactggtttcc

SEQ ID NO: 722555 - DNA, 767 bp, Homo sapiens
aaaaaggctaggacaggctgtgttgggctacagattaacctttgccatgtacccgccatccatgatcgccacgggcagcattggggctgcagtgcaaggcctgggtgcctgctccatgtcctggggatgagctcacagagctgctggcagggatcactggcactgaagtggactgcctgcgggcctgtcaggagcagatcgaagctgcactcagggagagcctcagggaatgcctgctcagaccagctccatgcccagcgcccaaatgccccccgtgtggctccagcagccaatgggcccagccagaccagcactcctacatgattgtcacagccatacacctgtagccctggagatggccctctggagtggccactaagcagagtgagggtgcacgacttgccagcgcactccgctgcctccagtgaaccacaccacatctaagcctgaaggggcgtctgttcccccttcacaaagcccaagggatctggtcctacccatccccgcagtgttgcactaggggcccggcgaggcatgtctgcatttcgggtggctagtcaagctcctcctcgctgcatctgaccagcgggcgcctttcccaactctagctaggtgtgggccaggctgatgggacggagttgggatcctcagcagcatcgctttgaacgccccgcgcaccctggggggtctcatgtttccgctgccaatgctcagtgctctacggtttggccctcagggtatggctaggctgggcctctaactaggtg

SEQ ID NO: 722556 - DNA, 304 bp, Homo sapiens
ttacaggatctcacactggtcgagtctataagcctccatccttcatttacaatgagatcaaactagagcgcggtatgacttactaagacaaatgggttgttgaaattgggcttcactagaatccaggcttgctggctaacaccaatgctccctccatcatttcatgttatgttttcatttcccctctgtctgagagatcgctctgatgtctttccttccataagtcctacggagatcgagcttacctcatttttctcccaggcctaggagctcaattaccaggatcactttcttccccagtgtg

SEQ ID NO: 722557 - DNA, 100 bp, Homo sapiens
  misc_feature (57)..(57): n is a, c, g, or t
gcctacaatctccgcactttgggagggtaagtacggctggatcacgagtcagagttntacaccgcggaccaacgtatgacatgtctgttgttgtgggcga

SEQ ID NO: 722558 - DNA, 181 bp, Homo sapiens
gtctgctgacagtgaccaggattttagcctaggcgggctataatctcccagcccatggatgccccctgattttaacaaaagggataaagattaccccactgtaccactactcttcatatccttcagaccttaaagaaaattcatacaaagagagagaggagtttcaaaagaggagctagct

SEQ ID NO: 722559 - DNA, 477 bp, Homo sapiens
cctcactagtggcttatcaattttgtttaacttttcaaaaaaccaacttttatcttgttgattctttgcattttttttgtctctgttgcatttggctctgctatgttatttatattttttctttctactaattgtgtgtttgatttgttcttgctttttgagttccttgaggtgcatcattaggttgtttatttgaaatctttctacttttttggcgtaggcatttattgctataaactttcctcctagtactgcttttgctgtatcccataggttttgcatgatgtgtttccattttctgcttaaaaaatttttttgatgtccatcttaatttcttcattgacccaatgattattcaatagcatgtttaatgtccatatatttgtacagtttccaaatttctttttcttattgatttcaagttttattccattgtggtctgagaagatacttgatatgattctaactttaaaaatt

SEQ ID NO: 722560 - DNA, 180 bp, Homo sapiens
ctttaacatgaattcatgggatcccgggtattttttttaagtcctctgggggaaaacctgtttatccctcccgtgattttgagtttgcagtttccccatcagtttttcctttcatgatttttgtagttgccctgaagtcctctatgtggaaaaaaataaaaataaaagtgatttcccgga

SEQ ID NO: 722561 - DNA, 337 bp, Homo sapiens
tatctcaagaatatgcgttatataacatctgtgtcaaggagttgatgatgctcctggagaagatgatcagaaaaaaagattgggagtgtgtgatctgttatggactttgttatggggaccaattcgatttcttggcgtgcatgcacatctatcaactggactgtatagatgactggttgatgagatccttcacgtagccctcctgcatggagccagttgatgcagcactgctttcatcctatgagactaattgagccagggtctcttatctgacttcaagtgaaccaaccattttggtggttttgatcttttgtcactgagcccaaagagccaggga

SEQ ID NO: 722562 - DNA, 366 bp, Homo sapiens
tataccagatccttatatgtactcgatcgttaaactcgtacttacttgcggaggattacaccatgagatatcaatagtcacttgctgcttctatgcttacgcctacaatatagtaaagcagaccctatattaataaaatctcacattagaatataactaacactagagcaaaataattttaaacagtcttattcctgccctataataagattaaaatcttaccagctcaaaatatagggtattaatactaagattagctctttcacacctcacatatcctgtatcttagtcataatgagaacttaataactctccagaaatacacatgttggagctaagtatcagaaaatatctatacaggctgaa

SEQ ID NO: 722563 - DNA, 117 bp, Homo sapiens
  misc_feature (10)..(10): n is a, c, g, or t
acaggtcatnccctagtgacttctgagcacaccagaaggagacacatccaggtagcaaaccatgtgatttcttctgactctatttcctcttctgccagtagtttcctgagctcaaac

SEQ ID NO: 722564 - DNA, 766 bp, Homo sapiens
  misc_feature (766)..(766): n is a, c, g, or t
tgccaagggatttccttggatcgtggagacccctagagaaacagaagatgctaatcaccaaatcagtgctgactgggccagcaagatatcaacggagccctaagccgtccgtggagatgtacatctcagcaggagagcacgtcaaggtccatcgagatctgtggtgaccatgtgctgggttgatcatgttagatcgacatcgcccgcaaactggacaaggctgagtcgcgagcccctgctgctgtgcgctacctactctcaagaagctgggaacaggccgctgagctaatgcttgcctgagatcctaccatgaagaggtgactcatccctgtcagtgccgtgagaccagcgtggatgaggctgcttgttgagaagatccgagttaggtgagttactgccgatgctcaggctacagaaacatcgttgaggagccataagcgtcccaggctgggacagaagagcggtccaggtgcgagcatccaacatgccggggagagcaggttatgatgtgctatatactgatgtgtcatcaggcctgaatgtcagatcgcagagccatgtgcagtctacatcaggtgagatggcatgtactgctcacgcaaggagtcgagcatgctgacttaattcggcgggagtgccagaccccggttaagaactcctgaaaaaagccgcaaggcggcttaagggaccccacacggggcgacccacacggggtgccacagcatgagaggtctccgtggagaatctggcgacgttcctttctggn

SEQ ID NO: 722565 - DNA, 254 bp, Homo sapiens
  misc_feature (80)..(80): n is a, c, g, or t
agaacccataaaacagtggtgttctcctctgatgtgattttactaagtattccttcactcttcagtttaaaaagagcctnaggggcgtgagggagataaacaacaaaacattctgtacttcatcaggtccaggagctcaaatgttggaaaggagccagaattgttattgccccctgtgaatcaagcaggatgtgcacagtcaaaagaagctgctcactagaagtttatctatattaaataacttatagaaggtt

SEQ ID NO: 722566 - DNA, 124 bp, Homo sapiens
tgactctacaggagttagggaattctcctgctgcttcagaacgtgaataagacgtaccaaaatatgtaactaatgtggtactgtaagtagcactctgagtataggatggcaccacagtagccgc

SEQ ID NO: 722567 - DNA, 793 bp, Homo sapiens
ggacagtatctgtgggtacccggagcacggagatctctgcctggctttacgttcacctcggatatctgcagcacgcctccgcattccatctcctagcgcgaccgagacccagtgcgcctagcaacgttcacccatgtctattctcaacgatccatgccagggcagatctcttggactctcgccgggacatccccacattggttgacggattgatcatcattcaccctcaacaaacgggtctccttcacagagactggctggtgccccagacggctggcctgtcaacaccttgggctcatcttacttgcacgggccacctcagacgctcccggggacacccaacgtgactacacgaaacttcgcctcattcttgcgcgcgcacacggacgcggatggtcccatcacaagccaagggccttgggtctggcagacccaaacaagttacaacttacaccaacactcaatctgggcgccccctggaccgcattggggcttctacagggcccaacggcaaagaagcgctggcgacaagccgcgtcccgcccagcggaaacccgcacagcgacaggacaccgagaaccccggaacagcacatagattgtgattgtgacaatttggacatttactggagaagaggaaattaggaggagaagtttgtgagtaagaaggacatagtggaaagtaagaaaagctttataacctaaattctatttaagccaagcagaattatacctatggtggaattggtgcatagatggcaacagtggttcggtcaaagtatttcccgttgggg

SEQ ID NO: 722568 - DNA, 228 bp, Homo sapiens
tggagggtcgagtcatataaggatcccccgaggaacaacagtattgatattgtaaatgcgatatatggaattaacaagtgtgaccatatggaagcgaagttattttggtgtctcgaaaggagttatgcgtgcagacttgtgtttgaacatttgttactgttttctactcataatataaaggtgatgcgcttctgggttgtgacttacgacgccggggctgccgaggct

SEQ ID NO: 722569 - DNA, 514 bp, Homo sapiens
  misc_feature (4)..(4): n is a, c, g, or t
ctgnagatcgctttgagttaaaccaggctattaggaggggaccttttgtcttccagagactgccaggagcttttaccagtggtatatacatgcttaacgctgaggacgaataatctatgcgcagtgaaaacccaggccccagagagatgcgagtgtgctgttcgagagctctgcttccagtggagaatggccgtgaatggttgcgacactgttttgcagcagtcaagcattcctgggtgcttaccagctgtcttgagacccaaggaacccctgcctattcctagctacctgaggctgctaagatgccctctagataacgtaccactgacccattgaaacaccgatgcctgcagtctaaaggacaattccactttccttatccccgccaacttccgaaacacccctttttatctcatctgcccatgacattaccccgccttaccctattaccatctagctactctcttcttaccactaccccctctctttgttcacacaccctcgcccttctccg

SEQ ID NO: 722570 - DNA, 157 bp, Homo sapiens
tatttgcatcataggacgcttcattcactgagtttccccatattctcattgctacacccttaaaactaaactctacgccaggaatttcagtttcactatcatattcatcggcgtacatctaactttcttcccacaacactttcttggccttatcgag

SEQ ID NO: 722571 - DNA, 143 bp, Homo sapiens
tttaaaaaaaaaaaaaaaaaaaaacttgatgttaattcctccctttcctctgggttaatgaaaatcctttattcaggataaaatctttatatgttccccctgttaagaataaatggcccttaaatcttgtttagccctgtgga

SEQ ID NO: 722572 - DNA, 430 bp, Homo sapiens
gaagaagaagagaaagaaaaaaagggagggaaagaaaaagaaaaaaaagaatgagggggaaggagaaggggaaaggaaaaaaagagaaaaaaaaaaaggaaggaaaaaagaaagaaaaaagagaaaaaaaaggaagagaaaaagggaaaaaaggaaataggaaaaaagaaaaaaggggaatatagagagaagagagaaagagaagaggagggaaggggaaagggaaagggagagaaaaaaaaagaagggagataagagagaaaaaaagaaagaaaagaaaaagaagagagggagagaaaaaaaaaaaagacaaaaaacgaaagaaagaaagaaagagaaaaagaggaggggggggggactgacaaaatctaaaactctcactctctctctctctctcactcacaaacacaaaacgtgccgaattcctgca

SEQ ID NO: 722573 - DNA, 434 bp, Homo sapiens
ccaccttggactcccacagtgctgggattataggtgtgatccaccatgcctggccttttcatgcaattaacaaaatttttaggatataaaattcttaagcacatcttcctggttactaaataattaatatgattgttaacacacagttgcttcctatgtaatgacatgtacattccgtttgttgatactgaagcagctttttcaaagctttgcttgttttatttggagtgtatctccagacatctcacacatcgttttaagaacattgtattaagttttgggattgaaataaataaatgtaaaaattttactttataaaatcattagccaaaaaatatgttgagagagatgaacattctctgtagcttgtgtagtaaaactgaggcattattgtgaaatatttacatggtacattctgtgggcctacaggagtt

SEQ ID NO: 722574 - DNA, 533 bp, Homo sapiens
  misc_feature (332)..(332): n is a, c, g, or t
  misc_feature (380)..(380): n is a, c, g, or t
  misc_feature (396)..(396): n is a, c, g, or t
taagctacgatcctattcccgtttccgtggatagcgtgattaatccgctgttgccggattcccggactgaccagggcaggcgcagcgcctcggcgtgaaatatttcccggccatgatgctggttgacccgaaacagggcagtgttcgcccgttatcatacggctttatttcgcaggacgacctggcaaaacagttcctgaacgtttctgaagattttaaacccaatttttaatcgcggatttgatttatgagtgaagattatttgaaaatgtttacaggtgttgttctgttaatatttgtcattattgccggttatttcttttctgagcgtnatgacaggaaaatgtttctcctgagctcactggttttccttgttgttnatatcgcgtgtttatntgtgcttaccgccagtctctggtttctgtgtggtgcaattatgagtcagggcgcagcactggttgtttcaatagttgcggccgcattaccggacgttacgagcttcgacaggttcagaagagtggctctactctaga

SEQ ID NO: 722575 - DNA, 154 bp, Homo sapiens
gctgagtaggaggattgcttgagaccagaaggtcggagctgcggtgagccacgatcatgccactgtactacagcctgggtgacagagtgagaccctgtctcaaaaataataacaagtaataatttaaaaaccacttaatattgatttaccaaga

SEQ ID NO: 722576 - DNA, 225 bp, Homo sapiens
tggctattttttgtatttttagtagcgatggggtttcatcatgttggccaggctggtctcaaacaactgacctcaggtgatccacctgcctcggctcccaaagggctgggattacaggcgtgagccaccgcgcctggcctccatttatttgtaaatagataattctcagcagtatgtttactctggataaacatactgctgagaattatctatttacaaataaat

SEQ ID NO: 722577 - DNA, 759 bp, Homo sapiens
cggctcgggctgcggggcggctggcgcgcgcgcgccgcggggcggagaagcgggcccggcggcggcgagcatggaggagaagtacctgccggagctgatggcggagaaggactctctggacccctccttcacgcacgccctgcgcttggtgaaccgagaaatagaaaagtttcaaaagggagaaggcaaggaggaagagaagtacattgacgtggtgataaacaagaacatgaagctgggacagaaggtgctgattcccgtgaagcagtttcccaagttcaactttgtggggaagcttttgggtccgcgtggcaattccctgaagcgcttacaagaagaaacgttgacaaaaatgtccatccttggcaaaggttccatgagagacaaggcaaaggaggaagagctgaggaaaagtggagaagcgaagtactttcacctcaatgacgacctgcacgtgctcattgaagtgttcgcacccccagcagaagcatatgcccggatggggcacgccttggaagagatcaagaaattcctgatccctgactataatgatgaaatcaggcaagcacaactccaggagttaacatattttgaatggcggttcagaaaatgcagatgtcccagtggttcgagggaaatctactttgcgtacgagaggtgtactacaccagcaataccagggaagaggaggagtcccagccagggcctgttgcgttggggtaccccgtgggaaccggatcccgaggagtctttcacccg

SEQ ID NO: 722578 - DNA, 161 bp, Homo sapiens
ccgtgcacgggacacggtcaaacttgtcttcctcagaaccgttcatccatacccaggatgccacatgatatcctggagggatttgtagtcctgcaggatcttttgcaccccacgggcaaacatcgtaaatgctcacatgcacaacaagtgttgaggatcca

SEQ ID NO: 722579 - DNA, 874 bp, Homo sapiens
cccgctcggacgttgctttgtgtttggtcctggaacttgttcgcctcgccgactttgctccctccccgttcggtgttgtctttttgtgaccccctctgtgtggaccaccctctggtgtgttgtcgtcgcggcgcggttttttacagaagcggggtggttggtgataccgcgaccagaagatgttcgttctttgggatgagagccccccctttggtcgtcgcctcgtcacttcagatccgtcaccctcacccctcgtcttcgtcggaagagatggttgggcgagccgcccccctgcgaggacccgcccactctcgtcgacaaaaagatgtgtcataggcgctccccaccggattctcctctcactaggattaattaaggagatgcgcttctctctccccccgccggctgacccgcccccggcctgcatgaggaggggcctcctactatagttcttctcctcgtccatcagcgggcgcatagcttcaacgagcctttgtggagaatgattatgtcgcgcgcgacacaccaagctgcttgtctatgtgcgcactctcacacgacactctcccgcgggacagggtttggcgcccctcgtcacgctccctgtggctctcgtgcgcgcatcgatggggtgcttgcgcgcgtgataaaatttggacatgtttactgtggcactgttgcacgcgggtggcccacactcgagatgaggcactcgcatcttggaacccatgatattacgccgctatgtgcccccaactccatatggcttatgccaacttacccacggttgtcacgctaaaaatggctaggagcccgtcttcgcacaaattgtcttaaaaaagggcttcttgctgccaaggggggcccaaataac

SEQ ID NO: 722580 - DNA, 399 bp, Homo sapiens
acctggatgaatcaccagggaattaggctgagtgaaaaaaaaaattgcaaaatgttgtctactaaatgattccacttatataacactcctggaatgccaaaactatagagatgaaaattaataattgctgtgttaatgaagaagtggaaatgggagggaagtggctgtggctacaaaagggcaaaatgagggatattatagtgatgaaagtgttctttattttaattatatcaatgtcaatatccagactgtgataatttactgtagtttacaagatgttatccttgggggaaactgggtaaaatgtacatgagatatctctgtaacatttcttaaaagtgtctgtgaatcaacaatgatatcaaaataaaaagtataatttaatccagcaaaaaaaaa

SEQ ID NO: 722581 - DNA, 432 bp, Homo sapiens
tgtaaagtctgcaagtgcatatttggacttctttgaggccttcgttggaaacgggatttcttcatataatgctagacagaagaattctcagtcacctctttgtgttgtgtgtattgatctcacagatttgaaccttcctttagactgagcagttttgaaaaactctttctgtggaatttgcaagtggagatttcaagtgatttgaggccaatctttgaaatggaaatatcttcgtgtaaaattagacagaatcattgtcagaaattactttgtgatgtgtgcgttcagctcacagagtttcacgtttcttttcacagagcagtttggaaagactctgtttgcaaagtctgctagagaatacttggaccctttgaggccttctttggaagtggaattttttcatatactgctagacagaagaattctcaaaaa

SEQ ID NO: 722582 - DNA, 1024 bp, Homo sapiens
  misc_feature (9)..(9): n is a, c, g, or t
  misc_feature (130)..(130): n is a, c, g, or t
  misc_feature (158)..(158): n is a, c, g, or t
  misc_feature (163)..(163): n is a, c, g, or t
  misc_feature (189)..(190): n is a, c, g, or t
  misc_feature (216)..(216): n is a, c, g, or t
  misc_feature (233)..(233): n is a, c, g, or t
  misc_feature (242)..(242): n is a, c, g, or t
  misc_feature (246)..(246): n is a, c, g, or t
  misc_feature (249)..(250): n is a, c, g, or t
  misc_feature (268)..(268): n is a, c, g, or t
  misc_feature (272)..(272): n is a, c, g, or t
  misc_feature (276)..(276): n is a, c, g, or t
  misc_feature (285)..(285): n is a, c, g, or t
  misc_feature (292)..(292): n is a, c, g, or t
  misc_feature (296)..(296): n is a, c, g, or t
  misc_feature (303)..(303): n is a, c, g, or t
  misc_feature (314)..(314): n is a, c, g, or t
  misc_feature (352)..(352): n is a, c, g, or t
  misc_feature (365)..(365): n is a, c, g, or t
  misc_feature (372)..(372): n is a, c, g, or t
  misc_feature (387)..(388): n is a, c, g, or t
  misc_feature (394)..(395): n is a, c, g, or t
  misc_feature (415)..(415): n is a, c, g, or t
  misc_feature (438)..(438): n is a, c, g, or t
  misc_feature (440)..(440): n is a, c, g, or t
  misc_feature (459)..(459): n is a, c, g, or t
  misc_feature (492)..(492): n is a, c, g, or t
  misc_feature (495)..(495): n is a, c, g, or t
  misc_feature (693)..(693): n is a, c, g, or t
  misc_feature (860)..(860): n is a, c, g, or t
  misc_feature (995)..(995): n is a, c, g, or t
tgacaaaangaggtggacggccggattcccgggtgcgcagaacggggctgtggggggcgcgtcgaagatgggaccagggctacggaggctacggggcgtggagtggcgtggacctgccaacacccagggngcatatggaactggtgtggccagctggnaaggntatgaaaactacaattactatggggnncagaacaccagtgtcaccacaggggnaacctacagctacgggncagcctcgngggnggnngccaaggcgaatgatggngggntggngggcggggngcctgcnatgnacatggnctcttacgggncagagccatgcaccgacaattccgactccctcattgcnaagatcaaccagngtttggncatgatgtccaaggnngggggnnggggggggggcggggggggnggggggggcatacaggaccgggngngctccttccgcttccagcngttcgagtcctatgactccaggccctgcctgcnggngcacaacccctaccgccccagctacagctacgactatgagttcgacctggggtcgcgaccgcaatggcagctttggggggcagtacagtgaatgccgagacccagcccgggagcggggctcccttgatggcttcatgcggggccggggccagggccgcttccaggaccggagcaaccctggcaccttcatgcgcaganccccttcgtgccccccgctgcgtcctctgagcccctgtccacgccctggaacgagctgaactacgtgggtggacggggcctgggagggcctcccccagccggccacctccgtccctcttctcccagtccatggctcccgactacggcgtgatgggcatgcagggggngggcggctatgacagcaccatgccctacggatgtggccgctcgcagcctcggatgcgggatcgggatcggcccaagaggagagggtttgaccgcttcggaccagatggcacgggcaggaaacggagcagttcaantttacgaggggcagacacaaactggccaa

SEQ ID NO: 722583 - DNA, 699 bp, Homo sapiens
gaggctctctctgatggggcagggcaagagagtgatcgtgtgtagtgctgtgtgtgtgcactacccttctcttgtgagctggggtcccatccgattttcaatattcttctgtccatagacctgaagcagaggatgggggggcccacagccttaccatggtgccgctcatgaagcagttggtgcacagggttggaaggaagataggggatacgttcagggaccttcgggatcatgtgcactggagtcagaatagccttcttgcgcagcgtagggatgtgggctgcaagagcagtttctccacctctggggccaggtctcggcacatctcagcagagcccatggtgctcaaagtgcacaaggccaggccttgtcctgtctgaatcccctggctcaggtcattcttgatgctgttggtaatgagcaggtgggcatcgtgcctctcatccaatagaagcatggcccccaggtagcccaccctcttgtctgtgactctggaggaggcgatcagtttcaggcactccatctgtccaaagtgggcggggtagcccaacatgtgggcgtacagcagtttggcagctgccggtgctgtgccggggtcccgtcccgctggcggccggcttgggccctcttttgctccctccggcctggcctggtctgcccgccatcctcgagcgccctgactaccaggccacactgagg

SEQ ID NO: 722584 - DNA, 128 bp, Homo sapiens
accacatgccactggagaagggaggtgggggagagggcaggtgggaagagcctcggggaggaagtggatctcacagtgtgcccacggagcccttctccggtgcgtggtccttctccggtggctgtggt

SEQ ID NO: 722585 - DNA, 379 bp, Homo sapiens
actacatacttccgtatcataattcctgcagctaccacctttttaataaccatgcttaatgcaaaagaccttctgcaggacctgaaattggtcccatctgatgaaatgaagaaccatggttgttaacgagaaattgaaactctaatacaatgaagacaggaccagatgcacccagggggcactgcaattagtgttacagtaccttatagagtagcagaccagcccttaaaacttatgcctcaagactgggaccgcgttgtagccgtttttgtgcagggtcctgcatggcagttcaaaggtggaccatggcttttgcctgatggatcaccagttgatatatttgctaaaattaaagccttccattggaaggtgtagtcgg

SEQ ID NO: 722586 - DNA, 154 bp, Homo sapiens
  misc_feature (50)..(50): n is a, c, g, or t
  misc_feature (56)..(56): n is a, c, g, or t
attgtgctggggtgactagaggatcccgggagtatgtcaacatgagtgtnggaggnaacattcaaaccacagcagtatgaaaacaatattcaactccaaggtatatggtcaagattacagggtggtaaggaatatggctacgagaatacggaat

SEQ ID NO: 722587 - DNA, 758 bp, Homo sapiens
ttatttcaattccgggccggcgttcattgtattactggccctcgtcttacaattacaaccctgacatgtatcagttggaagggctgaactggctacgcttctcctgggcccaggtagtgacaccattctagctgatgagatggggctaggcaagaccatacaaaccatcgtcttcctctactcactctacaaggagggccacacaaaaggtcccttcctggctgagtgccccacatctctacctgcattcaactgaactcgcgcacccccccccccccccccccccccccccccccccccctccccccccccccccccccccccccccccccccaccccgaagcgcgcccggcaccgcacgcagcgacgcgcaagcaaccggctacgcgcccccagccgcgagcgtcgaggcagacgcacccccgcgcgcacccgcagccgcaacccccgcacgcgccgaccgcgcccagggacaccagctcggagagccggcaccaggaccaccaagcgcccagccccactcgcaagctacgcaccagccgagacgacacccagcgtgcgccacccgccgcgacgcccgcgccgacaccccatgcacgcccgcaccccagcaccaccgccccaccacccaccacccacaccaccgacccacccgctccaccgcccacccccgcacgacacacccacacacgcgacacgcccccacggctcacgcagcgcccgctgccccaccgcgccacagcacacacagcaccacc

SEQ ID NO: 722588 - DNA, 102 bp, Homo sapiens
gcgggcgctcagacggatcccttcgatggggggcacttatgcacgcttactatcttaacaagctatgagtgcgagagatgaagagttcaaatctgaccaaga

SEQ ID NO: 722589 - DNA, 342 bp, Homo sapiens
  misc_feature (99)..(99): n is a, c, g, or t
tatctagagcgatcttcagtctggaaaagggggctactagggttgtgaggtctctggatagaggctctcttctttggttgtcagatccttcattgcggntgcggggttcggaggaataacttcttgtgggcagatgatgaagggctgccctgaagggctcagggctccgcctggtgatggagttgtggagctggggagaacttcctccctgggacttggccctctcagtggtaggagagggctggcgcctggggcgggggcccaatttgccagggctgggtagaaggctcatcttcctcagaggagcttgcttcagatccttccttctctatttcctcctct

SEQ ID NO: 722590 - DNA, 563 bp, Homo sapiens
ggccggatttggctgagagtagaagcagatatacatttgcctgggtccatagcgtgtgatcactggatccctgacaggagtccttatgtcaaaactgagtatgtgccaagaactctgggaatcccagcagataatttccccgtgtgaacatgcacatatatgctataaaacattactccacatgcaacactgtagaacatgtaagagttgacgaggaaagaaacacgaaatgctgctggcagttatagacaggttttcttcagtgaaaacctgagagacactcctggacaatttctatcaggagtgctttctcttacagattaagagtatgtattagttttagggtgagggggcttatcagaagcttcgaatgttactgtttgagggagaagttttatggtggggttggaatgtctctgggtggaggggagtttgccttggggcaggcatctttctggccagagggatgtcatctcgagactggcatcttcccagctggagggggtttatctcggggctagcctgtctctggctggggaggagtttggaatgttctggttaga

SEQ ID NO: 722591 - DNA, 318 bp, Homo sapiens
aggtatccgacgaggaataaatagcaatgccctgaattccaactgtaccttctacagaaaagtgcttgactgccaacttggtcttcccagtccttcagtgaggctctatctagaatgctccatactcctacttggatgatgacatcaagatctctggtacaaatacgcttgttcttgtgcatttcttcctgatcaatgtattgctctttgactcttctgagtcctatactactgatacttaccgatgtcatctacctcatctgaccccacatcttcgatcttgcgcatctcttcatcatctcaatcttcctctgctat

SEQ ID NO: 722592 - DNA, 211 bp, Homo sapiens
tatagtgttagtattggagccctttgaaaatagatattttcaaaaaaaatgtaggatttaaaagtttaatttttaattttaaaaaaaaatatgatggccattggaaatagtcccaatgaagtttttcatccagtaggtgtttaacagtgttattttgcccctggtaatgtgtaaactgtgagtgatttccaataaatgattatgaattcca

SEQ ID NO: 722593 - DNA, 422 bp, Homo sapiens
  misc_feature (112)..(112): n is a, c, g, or t
  misc_feature (146)..(146): n is a, c, g, or t
  misc_feature (207)..(207): n is a, c, g, or t
  misc_feature (252)..(252): n is a, c, g, or t
  misc_feature (261)..(261): n is a, c, g, or t
gcggactagaggatcccgagcgagatacatcactgcactacagcggggcgacagagtgaggcttcgtctcaaaaaaaaaaaaaatctgggggccaaatctccagacagcacnggcgggtgcagaaccccaccaggaagcggccggngtacctcgggcagatgggagccgggcctaaagcggcctttaatgcagctggggtcagggtnaaacatcatggtcacagtggatttttctcactatgtggtgagacntgggagaangggctccaagtactactctggtccacgggtgggctgggactacggatggtgcaccattctccattcctctcacccggcagggggtcagggccccgggcgggggcagaggagaaaaaggggcggccttctccaggacaaaccctcactccaactcacctagg

SEQ ID NO: 722594 - DNA, 434 bp, Homo sapiens
gctcgacgtggctctcttagtttttgcctgtagccccagctatttgggaggctgagactgaaggactgcttgagcctgggaagcagaggttgcagtgagtagagattataccactgcatgtcagcctgggtgacggagtgagaccctgtctcaaaaaaaaaaaaaagaaaagaaaagaaaaatagtagattgctgaagagtagaagtatgaccaagcatggtggctcataccagtaatcccagtacttagggaggcccaggcaggaggattgcttgaacccaggagtttgagaccagcctgggcaatatagcaagaccctgtctctacaaaaaacaatttttttttaattaaccaggcatggtggtgctcacctgtacttggaagggtgaggtgggaggatggcttgagctcaggagtttaaggctgccatgag

SEQ ID NO: 722595 - DNA, 224 bp, Homo sapiens
caggactctgagctgcgatgagctttactcccggtggaaacaagggagcccagccggagccatggccagtacagtggtagcagtatggactgaccattgctgctgcaggatttgcaggccgttacgtttatgcaagccatgaatgcatatgtgagcctcaagataaaacaagtttttcaaatgcctaaccaaatatcttgcctatcagtaggtgtgctacttac

SEQ ID NO: 722596 - DNA, 193 bp, Homo sapiens
  misc_feature (181)..(181): n is a, c, g, or t
gtgcatgtactcatcgttcagccaaagtcattctcagagccaatgtcgctttgctcgatctctgaagctgaagaaggctcgccgctacatgtctgcgtcttgtgagagaagaacgggagccagcggatgcgtcagtaaggacgtggtgtggaggaagaaaatctctatttcatatggtcangcctacgttccg

SEQ ID NO: 722597 - DNA, 241 bp, Homo sapiens
ttgtacagtacaatgtttctagaggttttagtgtctcagatttagtcctgtaccatttatgatgatatgcatttctgtattgcatcactatgtgaatatgcattcaatgtgtctactaaagtgtcaaattgtagagagtcacttgaactgtattcaggtaatatgcctaaagatctttctttattgccagacaaatatttaacatttaaaactgctaatacatgtactgacatcagaatga

SEQ ID NO: 722598 - DNA, 100 bp, Homo sapiens
agtcggtaccatgttcacagctggttggagtgctctgcaaatgggcagctatcaactagggactgcaaaatgctgctcactgctccacccgacggggtgg

SEQ ID NO: 722599 - DNA, 178 bp, Homo sapiens
gatgggtcagataggacaggatgtaacatactagacaaccttactgtggggacgaagtctatccgggtgcgtctcgagagtaggagtcactcatgtgaaatatactagactgttcctatcttcccaaaggggaaggagacggtacagcccctacgtaagggcagtcacctatcaccac

SEQ ID NO: 722600 - DNA, 143 bp, Homo sapiens
  misc_feature (9)..(9): n is a, c, g, or t
  misc_feature (20)..(20): n is a, c, g, or t
  misc_feature (60)..(60): n is a, c, g, or t
  misc_feature (73)..(73): n is a, c, g, or t
  misc_feature (88)..(88): n is a, c, g, or t
  misc_feature (94)..(94): n is a, c, g, or t
  misc_feature (110)..(111): n is a, c, g, or t
  misc_feature (119)..(120): n is a, c, g, or t
  misc_feature (123)..(123): n is a, c, g, or t
  misc_feature (134)..(134): n is a, c, g, or t
  misc_feature (138)..(138): n is a, c, g, or t
tattccgtnggggtccggcntttaagggttgtcaaaggtaggccaattgttcgtcttttngccctatacaaangcaaggaaggaaggnccaagntcataaatattaatgnnaaacactnnacnaataaatttcntatncaaaa

SEQ ID NO: 722601 - DNA, 140 bp, Homo sapiens
  misc_feature (7)..(7): n is a, c, g, or t
  misc_feature (47)..(47): n is a, c, g, or t
  misc_feature (69)..(69): n is a, c, g, or t
  misc_feature (108)..(108): n is a, c, g, or t
agatttnggagccaaactctcacgtggaaactgtttaagtttgggancgatatgtctggcctcaacccntcattcttcaaaaatctggtatttcgggattccttcccnattgtaagatactgtgcccaggtttttggttt

SEQ ID NO: 722602 - DNA, 195 bp, Homo sapiens
cttaaaattcccgttcctttaaattgggggttttggccctgtgatgttttgctggccccttgcctgttatggaagttccgcggtgtttgtccccctttaccctggggggcccttaacttgggggattttttttctaaaaatgtaaaataaagcctttttttaagttttgaataaaggtttgaggttgccttccca

SEQ ID NO: 722603 - DNA, 482 bp, Homo sapiens
  misc_feature (20)..(20): n is a, c, g, or t
  misc_feature (39)..(39): n is a, c, g, or t
aaggttttgcccagcaaagnaccatcagaccaagagccnacctgttgaatgcaggaactatctgcaaactattcatcttacaagggacttgtatatccggaatatacaaggaactcaattcagcagcaaaataataatgataatgtgattttaaaatgggcaaaggatctgaacagacatttctcaaaagaagaagtagaggccgggtgtggtggttcatgcctgtaatcccagcacgttgggaggccgaggtgggtagattgcctgaggtcagggcttcgagaccagcctggccaacatggtgaaaccccatctctactaaaaatacaaaattagctgggtgtggtagcatacacctgtaatcccagctactcgggaggctgaggcaggagaatcacccgaacctgggaggcggaggttgcagtgagccgagaacacaccattgcactccagcctgggcaacaagagtgaaactctgtctc

SEQ ID NO: 722604 - DNA, 230 bp, Homo sapiens
ttccatgtgacccgcttctcacttggctcggcaatgattcgacagcacagaccacatggaccctctcggggaatgtcacaaagtccctccctgccagtgctctttccctcatgatcccaggagatatgtttgctgtttcccgtctgggaagtccaatgtctccccattccctgtactcggaccgttcttcttcaggagattcctctcccagccgagattcctcagcagct

SEQ ID NO: 722605 - DNA, 121 bp, Homo sapiens
  misc_feature (38)..(38): n is a, c, g, or t
  misc_feature (52)..(52): n is a, c, g, or t
  misc_feature (93)..(93): n is a, c, g, or t
  misc_feature (111)..(111): n is a, c, g, or t
gagagccagcgttgaaccccacgctagcaggggagggnagaatgaaaaccantaagaccgcatatcgacgcgagccacagcgcggaagaaagncgcagaataaacactttngcctgcaaaa

SEQ ID NO: 722606 - DNA, 335 bp, Homo sapiens
aggcccctccacctggaaagtaggatggctggctactatggggaattgaagaaaagtggattaatgacaagagtccttgtgttaatatacaaccaagacagggttctttgtacatggattccatgcagtgaatgaagacatagggtggttacccaacacaaatggacagagcatttgactttctaaagactttgtttgtagacattttgacattgggagaagaaagatggcacactaaccgagattataggtcttatgcctggaattttttgcaggttgatttgtatgcgtgtgacctctagaaatgtaaattattaataaaattgtgatcactc

SEQ ID NO: 722607 - DNA, 313 bp, Homo sapiens
tgatctcacgcattttattactgtatgtatttatcttgctgttaacatcgtaatagttatggattatttcatgtatgtcacctgtgtgaatctgaaatatccgaagtaatggagccgcttttttaaatcaactttgtgtaatggcataaagccagcagttcatggccatgtagcacatattgttcttatatgtattctttttcaaaatcactcatcagcagcatacattcagatgggatgcatgtatgtggttcatcaacatgattaggagaaaacaatatgctcttgatggacgtggtgtcacactgatttc

SEQ ID NO: 722608 - DNA, 388 bp, Homo sapiens
cgatccctaaggtggtcgtgggtagtaggggtggtggtggtggtggtggttgagacaggttctctgattgcccaggctggagtgcaatgatgcaattatagctcattgcagcctcgaagtcctgggctggagcgttcttcctggctcagcctccctagtagctgggaccacaggtgtgtaccaccacgcccagcttatttttaaacttcttgtatagatgaggttttactacgtcgcccaggctggagggtggtggtttttatattccattgtgtgaggggtgtctgtgatatttggaatctgagaatggacttagacaatgctaagctacagtctgctggcgctccgcactccgtcctggcgactctgctcgacggcgctccacccc

SEQ ID NO: 722609 - DNA, 608 bp, Homo sapiens
  misc_feature (5)..(5): n is a, c, g, or t
  misc_feature (53)..(53): n is a, c, g, or t
  misc_feature (61)..(61): n is a, c, g, or t
  misc_feature (302)..(302): n is a, c, g, or t
  misc_feature (323)..(323): n is a, c, g, or t
  misc_feature (351)..(351): n is a, c, g, or t
  misc_feature (420)..(420): n is a, c, g, or t
  misc_feature (424)..(424): n is a, c, g, or t
  misc_feature (433)..(433): n is a, c, g, or t
  misc_feature (449)..(449): n is a, c, g, or t
ctcanttgagggcaactcttacccaggaggtcatcagttcatagcagccaggntctatttnacagaaggcgcagacttgtgagtctgagaaccattgagcagggagatgaggttgtccatagggaagtcatcatggaggaggatgtactggcaccgacagaccaaatgtccccacaaacttcacagaagctgccctggaacttcttcccaggatagacctggagctgtcaagaggatagtcccccgagtcctttacatcccacaagatcagatgaaaaagttaacaagctccagaaatcctncatccctggtcttgcttgtanctaatccagcccactcatctacccaaanactttagggtgccaaacgccgggcgctgggccgccgctcctgccttgcacgttagagagccggtacaanttcncatgggganaagctccaacaacggnatgagcgccgcgcccgtgataaggttttacctggtacatcggcatggcggaaccaaagcaagagagggtggcgcgtgccaaacaccaacgctcagaaaccgtccgaggctacgactgggggcggacatctcccttgtgaccctgctgcggtcgttcgga

SEQ ID NO: 722610 - DNA, 550 bp, Homo sapiens
  misc_feature (112)..(112): n is a, c, g, or t
atgtcttggtcagtagtggtaccaagccaggctccagtgacacccttgagatcagtagggtcgcttcttccataagcgcatcacttaattggatccatcgcaggtacgtagnctcagtgatgaagttacacatttcaacatacacagtacccggctgccggtcaatagcatgaggttctagcataacacaatacacgaatgagacgctattattacgcgatactgtattagggagcagtactgattcacaaccagaggaagtacgcaacgatgaagcatacggatcaatccaaacattaccgacccctgttcccatggagaaggccttccgaataacgggcatcaacatccgctaatttttatttaacccatccaagaaaagaaattataaatgtagaccttccgggcaggggacagtctctagtcacgatggaagaccagttatgtaacaccaacatcaccaaggccataaggcaccatttaagacgccacacaaagtaagaggacgagggcacaatgggcacccaccaaaaaaagaggacagtaaacc

SEQ ID NO: 722611 - DNA, 247 bp, Homo sapiens
ttttttttttaaactaacgattatttaacaacctacctgtatgggccaggcatttatgctgaggaaggacaaaggagatgaagcatgctccttaccttgggaaacttaaagtgtagtcaggaggagaaacagaatattgcaggttgaaaatacaggaagtcaaaaaattaacaagagtaaataggaaaactggtctaacagttcacatattgtactggaaaaaagagagcacagatgcagaaagagt

SEQ ID NO: 722612 - DNA, 797 bp, Homo sapiens
tccccctcagtaacgggagggagttccggttaatacggggagggggaggatggtgtagggatcaaatttggcgggggttgagcgagctggggaggaaatcaaattaagttctcggaaagtgtggaagtttggaagaagtgctttattaacactagtggtgagggagattattcaaatctctggaatttctcgagggttaaaagaggaagggattttcacaagggcaaaagagaaaatagtgcactttcttctagaatctttagaatagtgcaaccaaagaatatccctttttctcgagggtaagaatctattctcatctctgtgggagggattatgtgtaatgtggatctccaaaatgtggattattattctgtgtgtgtggtgtattaaccttctcacattaagggaaaatttactttaaaaaaattttaaacagacagccaaaatttattaacaaaggggccgtggtattcctcgggattagcaggtgaacgggggtttttattaaccatttaggttggttaaggttaatctcttcaggacgagaagagagtatatttcacggtgggaaaaatcttctccacctcttgagtacctcttatgcgagtcacctaaagagttagggcttattctttagacaaaaaaatctttgaagaggttggcacgagctctggaggcccaggaggggaggttagaagtgggggtctggaaacggctttccttaaaaattttttcaacaaacctctttggtggaaccaacaaaattggtggtgcccttccatggggaagaaaaccac

SEQ ID NO: 722613 - DNA, 171 bp, Homo sapiens
tggggaaatatctaatatagcttcagtcaactttaccaagaagtcctggatttccaagatccgcgtctgaaagtgcagtacatcgtttgtacctgaaactgccgccacatgcactcctccaccgctgagagttgaatagcttttcttctgcaatgggagttgggagtgatg

SEQ ID NO: 722614 - DNA, 441 bp, Homo sapiens
tacaggctcatttgggggagcatgacagttatgtggtttttcagatgtcactgcagtccaagtccctggaggagaagctcaaatcttccgggataccatatgaagttcacatatatcctggatgttcgcatgccttcatgaacacttcgcccgaggccctcaagaggaagaaggggatgggtctgactgatgagaaccaggaagccgtcgacctggcctggtctcgcttctcttcttggatgggccgtttccttggatctgcttgagccattccccacttcatgtgctgtgtgattatgtgtggagtcagggcccatgaatcaaatgttcagattcaggatgctgtatccaaaccatacaaatggactgggttgtacggtgctttggatttggtcgtccttccttctgtttatggataatatataccgtagtgtcgtttcc

SEQ ID NO: 722615 - DNA, 686 bp, Homo sapiens
gggggaaaaaaattaaaaaaaaaataataaaaaaaaaaaaaaaaaaaaaaaaaaaaaaaaaaaaaaaaaaaaaaaaaaaaaaaaaaaaaaaaaaaaaaaaaaaaaaaaaaaaaaaaaaaaaaaaaaactttgagcccactttgcccaaggattttaaaaattacccaaagtttttcaaggggcccaaatttgggccaaattggccaattcccccttaaagggggccttttaaaattcaagggcccgggttttaaaaatgcagtaaaggtgaaaaacctggggataccccatctaaaccccttggaaaaaaacccccttttccccatggggaaaaaaacaaaaaggccccaaaaaaatggctttacaaaaagatgcccaccccaaatggctaaggaaaaatggaagcgtaaaaattttggaaaataccccgaaaaaattttgttaaaaaaggcgatttttttaaccaaatgggccaaattgggaaaaatccttaaaaattcaaagatataacccggaaaaggtgctacagtttttcccaaatttggaaacaaagtccccctttttaaaaaccgtgtctccaaaatcttaaatgggcatataaaccggtttttaaagggattggccccctttggtgaacccaccccctttaaaacaaattttttggaggatcaggtgtacgcaaaaac

SEQ ID NO: 722616 - DNA, 204 bp, Homo sapiens
agttcagtcatgctcagtaccttttaccttcacactgtgtgcaacccatctccagaagccttttcatcctgcaaaattgaaactggacccattaaacaacagctccccatttgtcctcccccggcccctggcaaccgcctttttgcttccttctccatggatgtgactgttttaggaacctcatataagagcaatcccccagta

SEQ ID NO: 722617 - DNA, 348 bp, Homo sapiens
  misc_feature (6)..(6): n is a, c, g, or t
  misc_feature (71)..(71): n is a, c, g, or t
  misc_feature (83)..(83): n is a, c, g, or t
  misc_feature (87)..(87): n is a, c, g, or t
  misc_feature (100)..(100): n is a, c, g, or t
  misc_feature (112)..(113): n is a, c, g, or t
  misc_feature (119)..(120): n is a, c, g, or t
  misc_feature (126)..(126): n is a, c, g, or t
  misc_feature (131)..(131): n is a, c, g, or t
  misc_feature (142)..(142): n is a, c, g, or t
  misc_feature (146)..(146): n is a, c, g, or t
  misc_feature (150)..(152): n is a, c, g, or t
  misc_feature (160)..(160): n is a, c, g, or t
  misc_feature (163)..(165): n is a, c, g, or t
  misc_feature (172)..(172): n is a, c, g, or t
  misc_feature (175)..(175): n is a, c, g, or t
  misc_feature (178)..(178): n is a, c, g, or t
  misc_feature (180)..(180): n is a, c, g, or t
  misc_feature (182)..(184): n is a, c, g, or t
  misc_feature (186)..(186): n is a, c, g, or t
  misc_feature (191)..(191): n is a, c, g, or t
  misc_feature (202)..(202): n is a, c, g, or t
  misc_feature (216)..(216): n is a, c, g, or t
  misc_feature (218)..(218): n is a, c, g, or t
  misc_feature (220)..(220): n is a, c, g, or t
  misc_feature (224)..(224): n is a, c, g, or t
  misc_feature (231)..(232): n is a, c, g, or t
  misc_feature (236)..(236): n is a, c, g, or t
  misc_feature (241)..(241): n is a, c, g, or t
  misc_feature (244)..(244): n is a, c, g, or t
  misc_feature (249)..(251): n is a, c, g, or t
  misc_feature (255)..(255): n is a, c, g, or t
  misc_feature (286)..(286): n is a, c, g, or t
  misc_feature (317)..(317): n is a, c, g, or t
atttcntcagtgacaatgtaactgtgagtgtgcatgtatattcacattagtgtacattttaagcacttcgntatgttcaagtntttntaactgggagggnaaaagtggttannataaanngggagngttangggttgggttngatnattnnnggaggggngtnnnggggaanggnggngngnnncngaggngtgtgaaaatnataacagtgaaaangnantggnggggatnntggnaaaanagnaaaannntggntatagaacaaatctgttcataaaattctggnagtctgtagtacacatacataagattaaagnaaatattatcctttcatttaaagaactatgc

SEQ ID NO: 722618 - DNA, 417 bp, Homo sapiens
ctgtgagtcagttaaacctcttttctttataaattacccagtctcaggcatttcctgatagcagtgtgagaatgtactaatataaatacctagcacttagaacaagccctaaatatacataacagtttgtttccttaggaggactgtgtaggctgcatgcatgtatcctcaggacctaatactggacctagcacattgtaaatgcttagaaaatgtttgtcaaatgaatgttgtatatattatggcagcactatttttaaatgcattctagcttggttatgatagaaagacaaaatagtggcaagaatgagagcttatataaaggaaaaattctaattattttgctttctttaatgtgtacaactatgtaactaacctgcacagtgtgcacatgtaaaatataccctaaagtataat

SEQ ID NO: 722619 - DNA, 120 bp, Homo sapiens
tacactctgcagagctttggcgagatggccgactcctttaaagctgactacttcaacatgcccgtgcatatggtgcccacagaacttgtggagaaggagttctgtgggcaccatatgcgc

SEQ ID NO: 722620 - DNA, 460 bp, Homo sapiens
ggagtcttcggcgggctcgcgagcccggccgcggcctgctggtttcagacggagtcttactctctctcccggtctggagtgcagtggcgtgatctcggctcaatgtaacctccactctccgggttcaaggggttctcctgcctcagcctcccaagtagctgggaccgcgggtgcacaccatcacggctggctaatttttttgtattttttgtagagacggggttttgccgtgttgcccgggctggtctccaactcctggtctcaagctacctgcctcggtctcccaaagtgctgggattataggcgtgggccacagctcctggccgaatttgatttttatttaatttaaataaccatatgggagtagacagtgcggacccctagattctgctctttttagtccatttctcccctttgtcttcctgaaggctgtcgttgcttaatgtctcttgagtacatc

SEQ ID NO: 722621 - DNA, 261 bp, Homo sapiens
atctgaggtacttaaggatcccggctccacttggtgccaaggagaaatgttcgtcttctcaggtggacatgtgccaacggatcacattgctgtggacccgaaggcagattaacagggaagcgttcgtgcagtttgctcgcagagtagctgagaggctctggaacagggaacggaagggtgaggaagagggtgtaggggagcgcggagtaagaagtttgcattgtgttcatgcgcaagggccagtcatagaacttgaggcac

SEQ ID NO: 722622 - DNA, 534 bp, Homo sapiens
  misc_feature (54)..(54): n is a, c, g, or t
  misc_feature (66)..(66): n is a, c, g, or t
  misc_feature (113)..(113): n is a, c, g, or t
  misc_feature (130)..(130): n is a, c, g, or t
  misc_feature (135)..(135): n is a, c, g, or t
  misc_feature (138)..(138): n is a, c, g, or t
  misc_feature (160)..(161): n is a, c, g, or t
  misc_feature (202)..(202): n is a, c, g, or t
  misc_feature (207)..(207): n is a, c, g, or t
  misc_feature (209)..(209): n is a, c, g, or t
  misc_feature (215)..(216): n is a, c, g, or t
  misc_feature (224)..(224): n is a, c, g, or t
  misc_feature (229)..(229): n is a, c, g, or t
  misc_feature (238)..(238): n is a, c, g, or t
  misc_feature (241)..(242): n is a, c, g, or t
  misc_feature (244)..(244): n is a, c, g, or t
  misc_feature (250)..(250): n is a, c, g, or t
  misc_feature (253)..(253): n is a, c, g, or t
  misc_feature (255)..(255): n is a, c, g, or t
  misc_feature (258)..(258): n is a, c, g, or t
  misc_feature (322)..(324): n is a, c, g, or t
  misc_feature (336)..(336): n is a, c, g, or t
  misc_feature (338)..(338): n is a, c, g, or t
  misc_feature (363)..(363): n is a, c, g, or t
  misc_feature (444)..(444): n is a, c, g, or t
  misc_feature (446)..(446): n is a, c, g, or t
  misc_feature (518)..(518): n is a, c, g, or t
tgcggcggggcctggacggaagagggggcgagccccggggcgccgcacgtgganccccggcacggncacgctcacgtgcacccgtcctttcacgccaacgcgtttcctgctgnacccacccctgcaccantgcangtnccagaccccggcccagcctccnngcggtccctaggctgggggagctcagacaggaggctaggangaggngnactttnnggctgagnctttnccaaacgancannantttccnaantnttntaggaagcgggaagggtgcgccaggccgccatggcatcagatgaaggcaaaatttttgttggannnctgagttttganancaatgagcagttgctggagcaggtnttctcaaagtacggacagatctctgaagtggtggttgtgaaagaaagggagacccagagatctaggggatttgggtttttnanctttgagaacattgacgacgctaaggatgccatgatggccatgaatgggaagtctgtagatggacggcaganccgagtagacaaggga

SEQ ID NO: 722623 - DNA, 150 bp, Homo sapiens
tacgcaccaagtatgagacaagcacactagtcatcgcagctgcacggcaacagcgattgacacagccaatattgcgtctgcgcctacttacccttgtgttcttaccgacgagttggctcattggcttgatcgacttgcaacgttggtcag

SEQ ID NO: 722624 - DNA, 137 bp, Homo sapiens
acgctgcaccgcgtgtcaaaagttaagaacgggaagaatgggtggcaaggtggctcctggaagagctcacccagcacagttcccttgagctcggagccttggtttctagtccctggggggatttatatttaagtaga

SEQ ID NO: 722625 - DNA, 134 bp, Homo sapiens
aagtcggtcaggcaccggccagccagctccagacgcaggatggcttgggggagggcgtagccctcgtagatgtgccaccgtgtgggtgaccccgtctccagagtccatgacaatgccagtggtgcgcccagaga

SEQ ID NO: 722626 - DNA, 919 bp, Homo sapiens
ttctgggcgtcgatgatgttctagctgagatgataacgtgtggcttgtgctagttgagtcgatcgtcgttgttgtgtgattatctcgttctgctccgtttctctgcgccgctatgtttgtctcgcttgatgctgatggcggtgcggccgcggagacattctcgggtaccgcatgggggacggtgtccgcctccgtgtgtaccccgcccgagtgtgttttcaccctccctaatgggccgtgttctccgccctccgtaagtcaccgtgccgccgatctcttgtggtggggaccgccgccgaatctcttggtgttgcaggccacttttagcagggtcctcctgtcctggtctggcattattcccgcgggtttctcccttctctgccccggggaacaccaccgcggtggggtgaaactccagccacgacgggaccagtgttgcgcccgaggactgctccgcgggtgtccccgccgccctaatctggggggaagcgcggcgtttagaagcccccacttatgggggacgcccccctcttgctgttcctctccgcgcaaaaagaagtgtgtcttcgtgcccctttattgggaggtgttagaacccgtgaagatgattttgttccccacgggggccacaaaggactctaagaaaaaatgttcgcggagtgggcaaaaattggggccacaaataacgttgttgccccccttttcacacatttcaacattggggggtggaattattataaaaaaatatcgcgggaacgttacaaccacttaatcgcgcaggatgaaatgttccgctgggaccaccatatccgcgcggtcgcacacgtctcagtaaaaaaaaaaaaccccttaattttttgggccaaacccccccttggggttttttcaaaccaaaaaattttttttgggggccccccga

SEQ ID NO: 722627 - DNA, 252 bp, Homo sapiens
  misc_feature (63)..(63): n is a, c, g, or t
  misc_feature (215)..(215): n is a, c, g, or t
  misc_feature (235)..(235): n is a, c, g, or t
tatgctgacaagccagagacgaccaaggagcaactgggagagttctacgaagctcttcgactntgcgcattcccaagtcagatgtcgtgtacaccgattggaaaaaggataagtgtgagccactggagaagcagcacgagaaggagaggaaacaggaggagggggaatcctagcagacacagccttggatcaggacagagactttggccatcctnccctccaacccgacatgtgncctcagctttttccctc

SEQ ID NO: 722628 - DNA, 543 bp, Homo sapiens
  misc_feature (194)..(194): n is a, c, g, or t
  misc_feature (416)..(416): n is a, c, g, or t
gttagaggatccctgatatgcgtctcaactttcttgccccaaccttctctcaactcactcctgttaacttcttttcccaatattctatcacaagtgccttcttccaggtcaccagtgacccccactgaaccaaatcccacagtccaccctcagtcctcataacttccacttctcggcagctgatattcctgacnccacagccatccgcacaccactgatcttctttccacctccttccacgttgtgcttctccagtttcatgacgtcaaataccatctgtatcctgaaggctccgcaaattcagatctctagtcatgggctgcctcatgaactccagctgtatttccactagccatttcagactcaaattttttttttttcttaagatggagtctcgctctcatcgcccaggctgnagtgatgttgcgagactccatttcaaagaaaaaaaaaaaaggaagcccgggaaggggaggtggcagtgagctgacggggccacggcacttcagccggggcgacagagtgagactctgcctcaaggca

SEQ ID NO: 722629 - DNA, 553 bp, Homo sapiens
  misc_feature (50)..(51): n is a, c, g, or t
  misc_feature (63)..(63): n is a, c, g, or t
  misc_feature (440)..(440): n is a, c, g, or t
  misc_feature (444)..(444): n is a, c, g, or t
  misc_feature (447)..(449): n is a, c, g, or t
  misc_feature (453)..(453): n is a, c, g, or t
  misc_feature (455)..(455): n is a, c, g, or t
gatactgaaaacagcaccatgggccagctcacactgagggcagtgttagnnctaagcggcatntgggacagtttggtgtgagagcacacaagcagactcagaccctgatgggactgtggtgtaacagaacacagtcatcaagctcctttagaaagcatctcgtccaggagttcccgtcgtggcgcagtggttaacgaatccgactaggaaccatgaggttgcgggttcggtccctgcccttgctcagtgggttaacgatccggcgttgccgtgagctgtggtgtaggttgcagacgcggctcggatcccgcgttgctgtggctctggcgtaggccggtggctacagctccgattcgacccctagcctgggaacctccatatgccgcgggagcggcccaagaaatagcaacaacaacaacaaaaaaacaaaaacaaaaaanaaanggnnnttcntnggccttaaattaaaaacaaaaaaattaaaaaagagtcttcaaacccataaagtgtgcgcagggaattgtcaggaggttaaatacccctttttggtttt

SEQ ID NO: 722630 - DNA, 553 bp, Homo sapiens
  misc_feature (50)..(51): n is a, c, g, or t
  misc_feature (63)..(63): n is a, c, g, or t
  misc_feature (439)..(439): n is a, c, g, or t
  misc_feature (441)..(441): n is a, c, g, or t
gatactgaaaacagcaccatgggccagctcacactgagggcagtgttagnnctaagcggcatntgggacagtttggtgtgagagcacacaagcagactcagaccctgatgggactgtggtgtaacagaacacagtcatcaagctcctttagaaagcatctcgtccaggagttcccgtcgtggcgcagtggttaacgaatccgactaggaaccatgaggttgcgggttcggtccctgcccttgctcagtgggttaacgatccggcgttgccgtgagctgtggtgtaggttgcagacgcggctcggatcccgcgttgctgtggctctggcgtaggccggtggctacagctccgattcgacccctagcctgggaacctccatatgccgcgggagcggcccaagaaatagcaacaacaacaacaaaaaaacaaaaacaaaaananataaataaatttgtcacttagcttgtcatcagagagttctgcaagtttaatcttttgttaaaaacacagcttatcattaatacttcctgtgaaacggagcgtccacttaggc

SEQ ID NO: 722631 - DNA, 644 bp, Homo sapiens
  misc_feature (50)..(51): n is a, c, g, or t
  misc_feature (63)..(63): n is a, c, g, or t
gatactgaaaacagcaccatgggccagctcacactgagggcagtgttagnnctaagcggcatntgggacagtttggtgtgagagcacacaagcagactcagaccctgatgggactgtggtgtaacagaacacagtcatcaagctcctttagaaagcatctcgtccaggagttcccgtcgtggcgcagtggttaacgaatccgactaggaaccatgaggttgcgggttcggtccctgcccttgctcagtgggttaacgatccggcgttgccgtgagctgtggtgtaggttgcagacgcggctcggatcccgcgttgctgtggctctggcgtaggccggtggctacagctccgattcgacccctagcctgggaacctccatatgccgcgggagcggcccaagaaatagcaacaacaacaacaaaaaaacaaaaacaaaagacaaaaaaataaaaaattaaaaaaaaataaaatctatttctagtcaaagtttcttttctgaattcttaatccactgtcaatgggccatgtccacctaagatatccctattgacaactcaaacatagcaagttccatacttaaaacagtaattgtcacccccagatgtgaaatattatttaccatagttaaaaacctgaatgtaccc

SEQ ID NO: 722632 - DNA, 1032 bp, Homo sapiens
agcggctctggttggaagaaggctatggagatccatatggaggaggtggtggtggtggtggtggtggtggtggaggaggtggatatagaagatactatagatctataaacagattaggatagcgaggtggcttgcgttctgtatagtaggactagcagttagacagataggtgcttccaaaataagccgagtagcttgagatagtcaggtcgtgtgtgcaagctaacacgagcccgatggttaggacgtcccatggtgataccacgttctggcaaatgggcttaagtatgtaagaacattgttggtagattaccgagttgatcgtctcgaaatgaagtggatgacgttttgtccgagtattcgtgtgctaccctgtggagctatgtaagtgtcggtttttaaaaaacgagaagaaagaagaacgaaaattattctcggaaagatgtaaatatttattacctatcagaactatggagaatggaaagtagttatactggatcagtgaatggagatttagacttgtaaccttgtgatctggtatcagggtgtagacgagcagtatacagaaggaccccgagccgtgtagagtacgcacaagggaactagtagtacacgcgtggcctcaacgcgggtacttcgccatgatgcgcatggttgtaatgccggggaattcggccattacgattgagagcaaaacctacggggaacagggcacatgtcccaggattgctaaatttaggaaaggccaggtaggtccgcctggaagatccattgttgtgggtactccttgatagtgcacgggaagacttaccgtcttcgtaggcccattgggtcccttggttgagaagcttatcgacttgaggtttggaatgaccccaaaggatttaacgtcattacctggtacaataccttatatttctaaatgcgcattgggcaatacagcccatgcattaggggtggaaaaacgccacagttgtaaggaccgagagcacagaaatatgcttacatcgtgaccaaggaaccattaacaca

SEQ ID NO: 722633 - DNA, 161 bp, Homo sapiens
cctgaattctgttagtctgtctctagagtatccccattcaattgctgtaccatcctggcgtgcagacccgctcagagatccatgatgtgctattgggacagtaagggaatagaggggcagagaaggatgaaggagttcatgggagacgcatcacacagtat

SEQ ID NO: 722634 - DNA, 583 bp, Homo sapiens
  misc_feature (470)..(470): n is a, c, g, or t
  misc_feature (474)..(474): n is a, c, g, or t
  misc_feature (477)..(479): n is a, c, g, or t
  misc_feature (483)..(483): n is a, c, g, or t
  misc_feature (485)..(485): n is a, c, g, or t
ctcggtacccgcgaacatgcggcatgcggcaatgatataatacttttaactctcacggcaaattagtcacttgtcaagtccattgagagaccaatggagtcttgtttcatcattttatatcctgtataatttttttctaacttgagcgaagttttatactgtatttagttcaatattctacgttaaataaaaccagggagttcccgtcgtggcgcagtggttaacgaatccgactaggaaccatgaggttgcgggttcggtccctgcccttgctcagtgggttaacgatccggcgttgccgtgagctgtggtgtaggttgcagacgcggctcggatcccgcgttgctgtggctctggcgtaggccggtggctacagctccgattcgacccctagcctgggaacctccatatgccgcgggagcggcccaagaaatagcaacaacaacaacaaaaaaacaaaaacaaaaaanaaanggnnnttcntnggccttaaattaaaaacaaaaaaattaaaaaagagtcttcaaacccataaagtgtgcgcagggaattgtcaggaggttaaatacccctttttggtttt

SEQ ID NO: 722635 - DNA, 230 bp, Homo sapiens
tactactactaaattcgcggccgcgtcgacggagtcttgctcttcggctccagtgatcctatctttcttaccctcctgagtagctgggactacaggcatgcaccaccatgtggctaattttaaatttttttgtagagacagggtcttcccgtgttgcttatgctggtgttgaactcctggactcaagcaatcctcctgctttggcctgctgagtcgacgcggccgcgaat

SEQ ID NO: 722636 - DNA, 195 bp, Homo sapiens
aggaacagagagaaaaaataaaaaattcgaccagagcctaaggaaccataggatgccagggggagaaccaacatatgcatggtcgatgctccagaagcagaagaaagagaaagtgacagagagaatattggaagaaaaattctattggacggggggaaaactttccaatttggaggaaggacaatttaaacccct

SEQ ID NO: 722637 - DNA, 739 bp, Homo sapiens
  misc_feature (626)..(626): n is a, c, g, or t
  misc_feature (630)..(630): n is a, c, g, or t
  misc_feature (633)..(635): n is a, c, g, or t
  misc_feature (639)..(639): n is a, c, g, or t
  misc_feature (641)..(641): n is a, c, g, or t
caggccccgtacaatccatttacagcattgtgtagtttttaagtttgaaactatacagtgggtcagtggtagaactagaacttgaatctcagagcaccatattcccttctcttaccaccacaaagatcaatggatggaaactaaggataagttatggtaccaccctcaccacattgttcggggcctgcaggccccgaacaatattctatttggtgcacgccaattcaagccctcacaatcccacgaccaagtagtgacaatatgatgcttcctagtttggtcttagcaacccatcctacagccatcttggactgaattctgcctctggaaatcaccattaaaacaaaaatcaggagttcccgtcgtggcgcagtggttaacgaatccgactaggaaccatgaggttgcgggttcggtccctgcccttgctcagtgggttaacgatccggcgttgccgtgagctgtggtgtaggttgcagacgcggctcggatcccgcgttgctgtggctctggcgtaggccggtggctacagctccgattcgacccctagcctgggaacctccatatgccgcgggagcggcccaagaaatagcaacaacaacaacaaaaaaacaaaaacaaaaaanaaanggnnnttcntnggccttaaattaaaaacaaaaaaattaaaaaagagtcttcaaacccataaagtgtgcgcagggaattgtcaggaggttaaatacccctttttggtttt

SEQ ID NO: 722638 - DNA, 1077 bp, Homo sapiens
tggaaagggagtctccctcggtggcccaggcgggagtgcaggggcgcgatctccctcacggcaatctcggcctcccggggttcaagtgattctccggtctcagcctccagaaggtggcgtgggactacgagggtggtgcaccatcagccagtgccgtgggctacttttggacatttaaatagaagaagtggggttctctccagtggtgtgccgccgggcgtggtcttcaacctccgtgaaccctcagaggtgatcgtgcgctgtgcctctgcggacctctcaccaaaaatgtggcgtgggaaatatacagggccctgtgacgcacaactgtggtgttcgcggctccagatataagctgtgtgattattttaaaatctccctcaacaacgggcgtgatatgtcactataggggagaaaaaccgcgctccaatattcgtggcactataacacaattcgcgcgagaaaccctcgtgggcgccctcgtgggagaagaagtgaaagtgtgggtatatgtcgcccacaatgatatgcgctatatagagggcgctaagagcgccttctatagagtgtcccacaacaaattgcgatagcgcgataaccgtgggaagaaactccacgacacgtgtgtgcgcaaacacaaatgctctactatagaaaagaagacaagctgtgccaccacttcctggggcggccgccggtggacaagcaccacaggtgggggggccccacaacgcgaagaaccgcgacgttactccggctgggggccaacaccaggctattccatatactatgaggggggaggaggaccacaaaaccatccccctgctacgcacccaatgatgggtggtccctccccgattcacgccgtgggacgatccaccatacaacagcgtgcctcactagaaaagtcctgccgccagttaattcgtccaccgaaggagaaacatagcctggtgggcaacccaacaaacggaggggggggatacaaactttctccccacccgaacgcacggcgggatgcacacaccactatgtggcggacaaaacaacggcggggtgtattcaactcaaaaacga

SEQ ID NO: 722639 - DNA, 745 bp, Homo sapiens
atgctctttgtgttcttgcgcatattgtaaaggagctctagagcagtttatggaggaggctgttctgagatgttgagtggctcatgctggtgacacagcttgccaatagaacaccaggcaaatagaagctgtagctaatggagtcttatgactaaagtacatgagtaatgttgaacaacgcaatcatagactgacaattgcatggctatgacagtggagatctctgggtggctagcagtgtcaaggggctgcatcacaagtgtaaggcatataccacatgcgtggattggatatgaaggtgaatggcaccagttggagatatgagtatcgctgggtataagagcaaagtttacaagctgaagcgacaggttcttctgagtgcagctggaagcagcaagaggtgatactgcgtgtggacaacatcatcagaagcgggacccaggaaacgtgtcacctgatcaccgaccccctgttaatgcattcccacgtgcgtgtcgatctttggaccagttgtctagcacatagattgtgtttgagaagatactctagttaaagaagactgtggaatctggttgatcggtgcgccgattgatatccttaagttgtggatatttagctgagcttcgatttagacataggtctaatttatttggcggtcagtttccatacaaatcagttgagtttaaaagagttcatgtgtcatactgtgccattaaaatagaaattgaaccaattaaaaaaaaag

SEQ ID NO: 722640 - DNA, 435 bp, Homo sapiens
  misc_feature (34)..(34): n is a, c, g, or t
  misc_feature (322)..(322): n is a, c, g, or t
  misc_feature (326)..(326): n is a, c, g, or t
  misc_feature (329)..(331): n is a, c, g, or t
  misc_feature (335)..(335): n is a, c, g, or t
  misc_feature (337)..(337): n is a, c, g, or t
cgtcctgtctacatggaaacttctactctatttnaaaaccaacagtatggagttcccgtcgtggcgcagtggttaacgaatccgactaggaaccatgaggttgcgggttcggtccctgcccttgctcagtgggttaacgatccggcgttgccgtgagctgtggtgtaggttgcagacgcggctcggatcccgcgttgctgtggctctggcgtaggccggtggctacagctccgattcgacccctagcctgggaacctccatatgccgcgggagcggcccaagaaatagcaacaacaacaacaaaaaaacaaaaacaaaaaanaaanggnnnttcntnggccttaaattaaaaacaaaaaaattaaaaaagagtcttcaaacccataaagtgtgcgcagggaattgtcaggaggttaaatacccctttttggtttt

SEQ ID NO: 722641 - DNA, 156 bp, Homo sapiens
  misc_feature (106)..(106): n is a, c, g, or t
  misc_feature (113)..(113): n is a, c, g, or t
gggactagagggtgtggccagcagcggacttagctctcagccctcttggccttgcgtgaggagagctgcttcacccacagacatgccctctccctagggcaagtangtccagngcctcatcaatgtggaaaggaagtgaaggcccagtgcctcccc

SEQ ID NO: 722642 - DNA, 185 bp, Homo sapiens
  misc_feature (32)..(32): n is a, c, g, or t
  misc_feature (44)..(44): n is a, c, g, or t
  misc_feature (76)..(76): n is a, c, g, or t
  misc_feature (134)..(134): n is a, c, g, or t
ctgctgggccttcgagatgcgccggtgcacgnagccccacaggnccgggtgcctggactgctagcaagctgggcgncattccggatgctctgcccaccgtggctgcgccaggcccgtgtgtcagcgctgcggancagccgcttcgctctggtcgtgcaggtgtattgcccgctggaaggctcccc

SEQ ID NO: 722643 - DNA, 620 bp, Homo sapiens
  misc_feature (507)..(507): n is a, c, g, or t
  misc_feature (511)..(511): n is a, c, g, or t
  misc_feature (514)..(516): n is a, c, g, or t
  misc_feature (520)..(520): n is a, c, g, or t
  misc_feature (522)..(522): n is a, c, g, or t
caggccccgaacaatccagtgctccagagatcctgtgcaccattgcccgagaactcctgggaagaatctaattgaaaatatgaataatcattaaaataacatcatcttgctctgttaagaaaattccctctttcatagctcatatttggccaaataatcacacaaaatttacattttaaataattccttgtgtgtcttataggcacagttttacaactattaaaaagttttacggagttcccgtcgtggcgcagtggttaacgaatccgactaggaaccatgaggttgcgggttcggtccctgcccttgctcagtgggttaacgatccggcgttgccgtgagctgtggtgtaggttgcagacgcggctcggatcccgcgttgctgtggctctggcgtaggccggtggctacagctccgattcgacccctagcctgggaacctccatatgccgcgggagcggcccaagaaatagcaacaacaacaacaaaaaaacaaaaacaaaaaanaaanggnnnttcntnggccttaaattaaaaacaaaaaaattaaaaaagagtcttcaaacccataaagtgtgcgcagggaattgtcaggaggttaaatacccctttttggtttt

SEQ ID NO: 722644 - DNA, 231 bp, Homo sapiens
acatcaataaatcaaatatgcaataaagtgggtcataggaattttggatttcccagtgcacgtaaaagttacactatagtggtattaatgtgtgcaataccattacatctaaaaaccactgtacataccttaattaaaaatactttatggctagcaatcatctgagccttctgcaaattgtaatcttttggctcgtggagggtcatgcatggatgtggctgcgctgaaacg

SEQ ID NO: 722645 - DNA, 536 bp, Homo sapiens
  misc_feature (423)..(423): n is a, c, g, or t
  misc_feature (427)..(427): n is a, c, g, or t
  misc_feature (430)..(432): n is a, c, g, or t
  misc_feature (436)..(436): n is a, c, g, or t
  misc_feature (438)..(438): n is a, c, g, or t
acatggtgctggaaagcaacaagcagcatttaaaaagtgttcattacagcataatgcatatatgggaaattcttacaaaatattaactgaagaaaactagatagaacatgtagtataaaagcatgaactcatttaaaatgcataaggggggagttcccgtcgtggcgcagtggttaacgaatccgactaggaaccatgaggttgcgggttcggtccctgcccttgctcagtgggttaacgatccggcgttgccgtgagctgtggtgtaggttgcagacgcggctcggatcccgcgttgctgtggctctggcgtaggccggtggctacagctccgattcgacccctagcctgggaacctccatatgccgcgggagcggcccaagaaatagcaacaacaacaacaaaaaaacaaaaacaaaaaanaaanggnnnttcntnggccttaaattaaaaacaaaaaaattaaaaaagagtcttcaaacccataaagtgtgcgcagggaattgtcaggaggttaaatacccctttttggtttt

SEQ ID NO: 722646 - DNA, 520 bp, Homo sapiens
  misc_feature (407)..(407): n is a, c, g, or t
  misc_feature (411)..(411): n is a, c, g, or t
  misc_feature (414)..(416): n is a, c, g, or t
  misc_feature (420)..(420): n is a, c, g, or t
  misc_feature (422)..(422): n is a, c, g, or t
caagcgatagcggcctgctttagggacctttggggatgacggtaatgtcctctatattgattgtgggcatggttacatgagcatatacatttatcaaaacttattgaactatacatttaaaataagtaaatagggagttcccgtcgtggcgcagtggttaacgaatccgactaggaaccatgaggttgcgggttcggtccctgcccttgctcagtgggttaacgatccggcgttgccgtgagctgtggtgtaggttgcagacgcggctcggatcccgcgttgctgtggctctggcgtaggccggtggctacagctccgattcgacccctagcctgggaacctccatatgccgcgggagcggcccaagaaatagcaacaacaacaacaaaaaaacaaaaacaaaaaanaaanggnnnttcntnggccttaaattaaaaacaaaaaaattaaaaaagagtcttcaaacccataaagtgtgcgcagggaattgtcaggaggttaaatacccctttttggtttt

SEQ ID NO: 722647 - DNA, 382 bp, Homo sapiens
ccctgaaagatactggttccacaagtttattaaaacaaataaaataaaatggccgggtgcggtagctcacgcctgtaatctcagcactttgggaggccaaggcgggtggatcacgaggtcaggagattgagatcaccctggccaacatggtgaaaccctgtctgtactaaaaatacaaaaaaaaaaaaaaatattagctgggcttggtggcccgtgcctgtaatcccagctactccggaggctgaggcaggaaatattgtttgaccccaggaggtgaaggttgcagtgagccaggattctcaccattgcactccagcctgggcaacacagggagactcctgtctcaaaaaagaaaaaatttttaccggtgaaagatgggcaa

SEQ ID NO: 722648 - DNA, 516 bp, Homo sapiens
  misc_feature (403)..(403): n is a, c, g, or t
  misc_feature (407)..(407): n is a, c, g, or t
  misc_feature (410)..(412): n is a, c, g, or t
  misc_feature (416)..(416): n is a, c, g, or t
  misc_feature (418)..(418): n is a, c, g, or t
caatggaaaaatgggcaaaagacctgaatagacatttatccaaggaagataaacagatggccaacaagtgcatgaaaaaatgctcaacatccctgattattagagaaatgcaaatcaaaactaccatgaggagttcccgtcgtggcgcagtggttaacgaatccgactaggaaccatgaggttgcgggttcggtccctgcccttgctcagtgggttaacgatccggcgttgccgtgagctgtggtgtaggttgcagacgcggctcggatcccgcgttgctgtggctctggcgtaggccggtggctacagctccgattcgacccctagcctgggaacctccatatgccgcgggagcggcccaagaaatagcaacaacaacaacaaaaaaacaaaaacaaaaaanaaanggnnnttcntnggccttaaattaaaaacaaaaaaattaaaaaagagtcttcaaacccataaagtgtgcgcagggaattgtcaggaggttaaatacccctttttggtttt

SEQ ID NO: 722649 - DNA, 719 bp, Homo sapiens
gtaacttgggcttgcggctgtcactggacgtctgcgtccaggtacactgctcagagccaagcccgagatgcggttaggaggtatcggaccgcaccaggtatgcttgactacgtactttcgttggactgactagcgcctgtacgaagaggaggtgcgacgacacgttcctgacggttaacatgaaatcagagttcgacgagagctggaaagagtccacgctgtagcctttgagcaagaaagcttactacgcgtgcggtaactcagcggatgcccttagtagctcagccaaagaccgagctgttcgagcctcatcagcattagttcgtcacttgcagaattctgtcatcacgtcgttagatcacgcgtaacaatacagagccttgtgactgtagtctagtgacaatgtccttgtggagctgtacaagctcgtggaactgcgactcccacgatgctgggatctaggggagataagctcgggtccccaatgcggtctacaacttacaagagtacgtacaatcatggtattttctctcaatcagatcgacttgagatttatgaccgtcgggttgtcactcggggtataactgacgaaattgcaagaccgttaacatcgaaattgcgccacggccaccgagaacgatccctgtaccttgccttctttgttaagcaactgcggctggacattgacacaagcgcgttccttgggaagaggaggcgag

SEQ ID NO: 722650 - DNA, 117 bp, Homo sapiens
gaattaatccctctcatggaagttactggagttttagagggtcgagcaaaacagttatacagtgcaggttacaaaagtctaatgcacttagctaatgcaaatcctgaagtgctcgta

SEQ ID NO: 722651 - DNA, 285 bp, Homo sapiens
gtcgaccgaatttggctacagaacagggcgatggacctcatggccacatggctccaaggagtaagaccctggaccaccaccccagcaagagcacaagaggaagagagagaccctcactgctggggagtcctgccacactcagtcccccaccacactgaatctcccctcctcacagtttccatgtagaccccttgaagaggggaggggcctagggagccgcaccttgtcatgtaccatcaataaagtaccctgtgctcaaccaaaaaaagaaagaaaaaagtggac

SEQ ID NO: 722652 - DNA, 102 bp, Homo sapiens
attagaatcgagctctggtaccccaggtagacctaacccaggtagccaggtagacctaacccaggtagacctaaccatcttctccttacacctagcagtgtg

SEQ ID NO: 722653 - DNA, 393 bp, Homo sapiens
  misc_feature (17)..(17): n is a, c, g, or t
  misc_feature (51)..(51): n is a, c, g, or t
  misc_feature (59)..(59): n is a, c, g, or t
  misc_feature (73)..(73): n is a, c, g, or t
  misc_feature (125)..(125): n is a, c, g, or t
  misc_feature (337)..(337): n is a, c, g, or t
tctgcaaggcttccccntgaacatagtcagtaacaactgtgtccaaggccncagtgccnatgaagagtaaggnctacacacagggaatagtccttcgcagagcaaggattcaaataaccagccgnaaccagacccaggagcaaaccactgacaaccctctcgatagtccagtgaagagatacagccttgaagccagaatggtggctcggtcacaagtgtatgtggtgcactccacaccattctggtatagctcggtcctgaagaaatgttgagatatgagcaggtctgacctctgagagttcgaagccacagagctcggcctcatagggcaccgcangcggcactcagcctacagagacccgacatcgcgctcctgagggctcaaggtcatcc

SEQ ID NO: 722654 - DNA, 304 bp, Homo sapiens
cgcgtgcacacacacacacacacatacacacacacacacacacacacacacacaccccctccccccaaacaacaaaattcagagtatgtcaaaggaaaagggtgtgttattgtatagatcaaaaccgagtggaatcaacaccatctatcttagcttagcaggtatggtgttgagatcttgagtctatattagtggaatctattgttgcattgtgaaatagagaattggggatataccattatgttatagagtcctagaaacaatttcgaaaagcattatagtgtggagtacagtgggatgggag

SEQ ID NO: 722655 - DNA, 5630 bp, Homo sapiens
gcaatcacgggtgtttagtctgcagccgagcagctaaagggagaaagaatcgctcaggaaagacacactgcagactccaccggcaccctgcaatagatggattccgactacacaagggagaaaacgcggaggtgacactctcctgcctggaaagaggacgaacgaccaaacaaacgcaaggactggactccatgccgaaggtatctggaagtcgtgacacggtgtgtataaaacaaaagtttgcgagctgttaattgctgtgctgtgttattaagagacgctttcaagtttcaagtaccaaatgtagctttacgttgccaaaggaagttgaggcaattgctttgctgttttaacttgctctgtgagggaaatctcataaactgaccaatgcaccaaatgaatgctaaaatgcactttaggtttgtttttgcacttctgatagtatctttcaaccacgatgtactgggcaagaatttgaaatacaggatttatgaggaacagagggttggatcagtaattgcaagactatcagaggatgtggctgatgttttattgaagcttcctaatccttctactgttcgatttcgagccatgcagaggggaaattctcctctacttgtagtaaacgaggataatggggaaatcagcataggggctacaattgaccgtgaacaactgtgccagaaaaacttgaactgttccatagagtttgatgtgatcactctacccacagagcatctgcagcttttccatattgaagttgaagtgctggatattaatgacaattctccccagttttcaagatctctcatacctattgagatatctgagagtgcagcagttgggactcgcattcccctggacagtgcatttgatccagatgttggggaaaattccctccacacatactcgctctctgccaatgatttttttaatatcgaggttcggaccaggactgatggagccaagtatgcagaactcatagtggtcagagagttagatcgggagctgaagtcaagctacgagcttcagctcactgcctcagacatgggagtacctcagaggtctggctcatccatactaaaaataagcatttcagactccaatgacaacagccctgcttttgagcagcaatcttatataatacaactcttagaaaactccccggttggcactttgctcttagatctgaatgccacggatccagatgagggcgctaatgggaaaattgtatattccttcagcagtcatgtgtctcccaaaattatggagacttttaaaattgattctgaaagaggacatttgactcttttcaagcaagtggattatgaaatcaccaaatcctatgagattgatgttcaggctcaagatttgggtccaaattcaatcccagcccattgcaaaattataattaaggttgtggatgttaatgacaataaacctgaaattaacatcaacctcatgtcccctggaaaagaagaaatatcttatatttttgaaggggatcctattgatacatttgttgctttggtcagagttcaggacaaggattctgggctgaatggagaaatagtttgtaagcttcatggacatggtcactttaaacttcagaagacatatgaaaacaattatttaatcttaactaatgccacactggatagagaaaagagatctgagtatagtttgactgtaatcgctgaggacagggggacacccagtctctctacagtgaaacattttacagttcaaatcaatgatatcaatgacaatccaccccacttccagagaagccgatatgaatttgtaatttcagaaaataactcaccaggggcatatatcaccactgttacagccacagatcctgatcttggagaaaatgggcaagtgacatacaccatcttggagagttttattctaggaagttccataactacatatgtaaccattgacccatctaatggagccatctatgccctcagaatctttgatcatgaagaagtgagtcagatcacttttgtggtagaagcaagagatggaggaagcccgaagcaactggtaagcaataccacagttgtgctcaccatcattgacgaaaatgacaacgttcctgtggttatagggcctgcattgcgtaataatacggcagaaatcaccattcccaaaggggctgaaagtggctttcatgtcacaagaataagggcaattgacagagactctggtgtgaatgctgaactcagctgcgccatagtagcaggtaatgaggagaatatcttcataattgatccacgatcatgtgacatccataccaacgttagcatggattctgttccctacacagaatgggagctgtcagttatcattcaggacaaaggcaatcctcagctacataccaaagtccttctgaagtgcatgatctttgaatatgcagagtcggtgacaagtacagcaatgacttcagtaagccaggcatccttggatgtctccatgataataattatttccttaggagcaatttgtgcagtgttgctggttattatggtgctatttgcaactaggtgtaaccgcgagaagaaagacactagatcctataactgcagggtggccgaatcaacttaccagcaccacccaaaaaggccatcccggcagattcacaaaggggacatcacattggtgcctaccataaatggcactctgcccatcagatctcatcacagatcgtctccatcttcatctcctaccttagaaagagggcagatgggcagccggcagagtcacaacagtcaccagtcactcaacagtttggtgacaatctcatcaaaccacgtgccagagaatttctcattagaactcacccacgccactcctgctgttgagcaggtctctcagcttctttcaatgcttcaccaggggcaatatcagccaagaccaagttttcgaggaaacaaatattccaggagctacagatatgcccttcaagacatggacaaatttagcttgaaagacagtggccgtggtgacagtgaggcaggagacagtgattatgatttggggcgagattctccaatagataggctgttgggtgaaggattcagcgacctgtttctcacagatggaagaattccagcagctatgagactctgcacggaggagtgcagggtcctgggacactctgaccagtgctggatgccaccactgccctcaccgtcttctgattataggagtaacatgttcattccaggggaagaattcccaacgcaaccccagcagcagcatccacatcagagtcttgaggatgacgctcagcctgcagattccggtgaaaagaagaagagtttttccacctttggaaaggactccccaaacgatgaggacactggggataccagcacatcatctctgctctcggaaatgagcagtgtgttccagcgtctcttaccgccttccctggacacctattctgaatgcagtgaggtggatcggtccaactccctggagcgcaggaagggacccttgccagccaaaactgtgggttacccacagggggtagcggcatgggcagccagtacgcattttcaaaatcccaccaccaactgtgggccgccacttggaactcactccagtgtgcagccttcttcaaaatggctgccagccatggaggagatccctgaaaattatgaggaagatgattttgacaatgtgctcaaccacctcaatgatgggaaacacgaactcatggatgccagtgaactggtggcagagattaacaaactgcttcaagatgtccgccagagctaggagattttagcgaagcatttttgtttccatgtatatggaaatagggaacaacaacaacaacaaaaaaccctgaaagaactggcattgccaaatagttgcatttatcataaatgtgtctgtgtatattgaatattaaatactgtattttcgtatgtacacaatgcaagtgtgattattttaatctgtattttaaaaatacatttgtaccttatatttatgtgtaatttaacaaacaaattttatttttttactcccatgacagacatgtttttcctagtcgtgtagaaactagccactgttcaaatctgatacactattcaaccacaaagtgtaaaggcactgcttagattagttttgttggggaagaattattatgttgtatgaacaaccccactgaagcattatacaattcttaattccattaagtgatcccactttttttcaataactttttagaaattaagaatcattaaaattgttaaggctattttattgttattttctctactttctactagccccaatagttgaactcttataggaaaatcgaaagataaagtgaaagtttatttcaggactgagaaatatcttgaaggttatttattagatgactatctcaaatgaactttttatagacaatgatgaaaacagaattaaagtcaatgtttcctgactcccaggcccctactattccaggccatcacactggcctgttccggagaatatttctctcacaatattattatctacttataattatggtaaacaataaattttattccatccttgtagtatgaaacatgctccaaggaaatggaatctgtcctttaaatggataacagtatgtgttctaatggcataaaatattactggataaaaacagttgtgtcagtgtctctcctaaggtagtaaatataattgacttattctgaacccattctattttgaatctcccctttcctctcacaatacttgaacattttaatcttttggaatattgtctttctttgttataactattcatttttagcttttgtctccagtgcatgatctcatatttttgcttttatttttagtataagaacatttataaaatcatatttttgttactgcaattgttttatttgttgtgtggcaaatgagaaatcctttatttattgtgctgtgatctctctgtgtggaatgccttggtgagagagatgcttattatgactattatcatttctgaccaagcttctattaatgttatttctaataatacactatcttgattgtactctccagaaaatttttctgtcagtgaaaataaaagaaaaattaaagtaaagctaaggaactgtctataagtcagagtcctgttcctacatatttgttcaaaagcttggcatgcagcaggcccttcctgagcgggtgattcagtgttgagtttcaaataataaacaggcagcattcagttggctgggcgaacaagaaaaacacaatggaaaaggaatgagtttgagacttgtaatgggaatgaaagtagtaagccatattccagctaaataagttaaatgcatttggggaataaagaacaaagagtaagcaagcaataattgcttgaaatattctttcaaattacaacaaaaaaaaatactttcttaggacatttcgtattaacctggtgcaggatacacaaggtatccttacaatgtttccaggaggcacgaatattatcgtccctggcttgctaagtcaggaacttgaaacactggcaaagttaagtactcggtgaagtcgcctaaagctttccaacacagactctctcaattgaggttcgaatccatccgacattg

SEQ ID NO: 722656 - DNA, 5120 bp, Homo sapiens
gcaatcacgggtgtttagtctgcagccgagcagctaaagggagaaagaatcgctcaggaaagacacactgcagactccaccggcaccctgcaatagatggattccgactacacaagggagaaaacgcggaggtgacactctcctgcctggaaagaggacgaacgaccaaacaaacgcaaggactggactccatgccgaaggtatctggaagtcgtgacacggtgtgtataaaacaaaagtttgcgagctgttaattgctgtgctgtgttattaagagacgctttcaagtttcaagtaccaaatgtagctttacgttgccaaaggaagttgaggcaattgctttgctgttttaacttgctctgtgagggaaatctcataaactgaccaatgcaccaaatgaatgctaaaatgcactttaggtttgtttttgcacttctgatagtatctttcaaccacgatgtactgggcaagaatttgaaatacaggatttatgaggaacagagggttggatcagtaattgcaagactatcagaggatgtggctgatgttttattgaagcttcctaatccttctactgttcgatttcgagccatgcagaggggaaattctcctctacttgtagtaaacgaggataatggggaaatcagcataggggctacaattgaccgtgaacaactgtgccagaaaaacttgaactgttccatagagtttgatgtgatcactctacccacagagcatctgcagcttttccatattgaagttgaagtgctggatattaatgacaattctccccagttttcaagatctctcatacctattgagatatctgagagtgcagcagttgggactcgcattcccctggacagtgcatttgatccagatgttggggaaaattccctccacacatactcgctctctgccaatgatttttttaatatcgaggttcggaccaggactgatggagccaagtatgcagaactcatagtggtcagagagttagatcgggagctgaagtcaagctacgagcttcagctcactgcctcagacatgggagtacctcagaggtctggctcatccatactaaaaataagcatttcagactccaatgacaacagccctgcttttgagcagcaatcttatataatacaactcttagaaaactccccggttggcactttgctcttagatctgaatgccacggatccagatgagggcgctaatgggaaaattgtatattccttcagcagtcatgtgtctcccaaaattatggagacttttaaaattgattctgaaagaggacatttgactcttttcaagcaagtggattatgaaatcaccaaatcctatgagattgatgttcaggctcaagatttgggtccaaattcaatcccagcccattgcaaaattataattaaggttgtggatgttaatgacaataaacctgaaattaacatcaacctcatgtcccctggaaaagaagaaatatcttatatttttgaaggggatcctattgatacatttgttgctttggtcagagttcaggacaaggattctgggctgaatggagaaatagtttgtaagcttcatggacatggtcactttaaacttcagaagacatatgaaaacaattatttaatcttaactaatgccacactggatagagaaaagagatctgagtatagtttgactgtaatcgctgaggacagggggacacccagtctctctacagtgaaacattttacagttcaaatcaatgatatcaatgacaatccaccccacttccagagaagccgatatgaatttgtaatttcagaaaataactcaccaggggcatatatcaccactgttacagccacagatcctgatcttggagaaaatgggcaagtgacatacaccatcttggagagttttattctaggaagttccataactacatatgtaaccattgacccatctaatggagccatctatgccctcagaatctttgatcatgaagaagtgagtcagatcacttttgtggtagaagcaagagatggaggaagcccgaagcaactggtaagcaataccacagttgtgctcaccatcattgacgaaaatgacaacgttcctgtggttatagggcctgcattgcgtaataatacggcagaaatcaccattcccaaaggggctgaaagtggctttcatgtcacaagaataagggcaattgacagagactctggtgtgaatgctgaactcagctgcgccatagtagcaggtaatgaggagaatatcttcataattgatccacgatcatgtgacatccataccaacgttagcatggattctgttccctacacagaatgggagctgtcagttatcattcaggacaaaggcaatcctcagctacataccaaagtccttctgaagtgcatgatctttgaatatgcagagtcggtgacaagtacagcaatgacttcagtaagccaggcatccttggatgtctccatgataataattatttccttaggagcaatttgtgcagtgttgctggttattatggtgctatttgcaactaggtgtaaccgcgagaagaaagacactagatcctataactgcagggtggccgaatcaacttaccagcaccacccaaaaaggccatcccggcagattcacaaaggggacatcacattggtgcctaccataaatggcactctgcccatcagatctcatcacagatcgtctccatcttcatctcctaccttagaaagagggcagatgggcagccggcagagtcacaacagtcaccagtcactcaacagtttggtgacaatctcatcaaaccacgtgccagagaatttctcattagaactcacccacgccactcctgctgttgagcaggtctctcagcttctttcaatgcttcaccaggggcaatatcagccaagaccaagttttcgaggaaacaaatattccaggagctacagatatgcccttcaagacatggacaaatttagcttgaaagacagtggccgtggtgacagtgaggcaggagacagtgattatgatttggggcgagattctccaatagataggctgttgggtgaaggattcagcgacctgtttctcacagatggaagaattccagcagctatgagactctgcacggaggagtgcagggtcctgggacactctgaccagtgctggatgccaccactgccctcaccgtcttctgattataggagtaacatgttcattccaggggaagaattcccaacgcaaccccagcagcagcatccacatcagagtcttgaggatgacgctcagcctgcagattccggtgaaaagaagaagagtttttccacctttggaaaggactccccaaacgatgaggacactggggataccagcacatcatctctgctctcggaaatgagcagtgtgttccagcgtctcttaccgccttccctggacacctattctgaatgcagtgaggtggatcggtccaactccctggagcgcaggaagggacccttgccagccaaaactgtgggttacccacagggggtagcggcatgggcagccagtacgcattttcaaaatcccaccaccaactgtgggccgccacttggaactcactccagtgtgcagccttcttcaaaatggctgccagccatggaggagatccctgaaaattatgaggaagatgattttgacaatgtgctcaaccacctcaatgatgggaaacacgaactcatggatgccagtgaactggtggcagagattaacaaactgcttcaagatgtccgccagagctaggagattttagcgaagcatttttgtttccatgtatatggaaatagggaacaacaacaacaacaaaaaaccctgaaagaactggcattgccaaatagttgcatttatcataaatgtgtctgtgtatattgaatattaaatactgtattttcgtatgtacacaatgcaagtgtgattattttaatctgtattttaaaaatacatttgtaccttatatttatgtgtaatttaacaaacaaattttatttttttactcccatgacagacatgtttttcctagtcgtgtagaaactagccactgttcaaatctgatacactattcaaccacaaagtgtaaaggcactgcttagattagttttgttggggaagaattattatgttgtatgaacaaccccactgaagcattatacaattcttaattccattaagtgatcccactttttttcaataactttttagaaattaagaatcattaaaattgttaaggctattttattgttattttctctactttctactagccccaatagttgaactcttataggaaaatcgaaagataaagtgaaagtttatttcaggactgagaaatatcttgaaggttatttattagatgactatctcaaatgaactttttatagacaatgatgaaaacagaattaaagtcaatgtttcctgactcccaggcccctactattccaggccatcacactggcctgttccggagaatatttctctcacaatattattatctacttataattatggtaaacaataaattttattccatccttgtagtatgaaacatgctccaaggaaatggaatctgtcctttaaatggataacagtatgtgttctaatggcataaaatattactggataaaaacagttgtgtcagtgtctctcctaaggtagtaaatataattgacttattctgaacccattctattttgaatctcccctttcctctcacaatacttgaacattttaatcttttggaatattgtctttctttgttataactattcatttttagcttttgtctccagtgcatgatctcatatttttgcttttatttttagtataagaacatttataaaatcatatttttgttactgcaattgttttatttgttgtgtggcaaatgagaaatcctttatttattgtgctgtgatctctctgtgtggaatgccttggtgagagagatgcttattatgactattatcatttctgaccaagcttctattaatgttatttctaataatacactatcttgattgtactctccagaaaatttttctgtcagtgaaaataaaagaaaaattaaagta

SEQ ID NO: 722657 - DNA, 988 bp, Homo sapiens
tggaaacagagtctcgcttggtggcccaggtgggagtgcagtgactcggttcagtgaaacctctgcctcccaatatcaaaaaatctctggtactacagcctccggagtagcggggaatggcgaggctattggtctaccacgacccacctaaatattgggtatctccaagtaagaagaacgagggttcacgcgcatgatagggccagcgcgtgacacaaaaagctccatgaacaactccagagaaatcaaacaccgaactggacatctaccaaaaagcgcatgagacacataacatcagaaaccatcaagaaacaaacagaaaacaaaagatgaataaaaaataaaaaaacacagtggaaacaacatgagaacaaaaaccacaaaacaacaaaacgcaagaaacaaacaaaaaaacgagaactaaaagaaaaatagaccaaagaacaaaaaacaaaacatagaaatcaaaaaaacacaacacacagaagaacaacacatacaacagatcaacacacaaaaaggacacataacagaaacaaaaaaaaaaaaaagcacaagaaaaagaaaagacaaacaagaaaacaaacaagaaaaaagagaaacgcgaaagatagaaacacaacagaaagaaacaacaacatacaaaaaacaagagaacagacaaagagagagataaaaagacagaagaaaacaacagataactccaacgcagacaagacgatatagaagagcgaaaaaacaaagagaacatcaagagcacaacagaacaaaaaaaaaaagaacaagaaaaaagacacaagaacagcaagaacacaacagaaagaaaacaacagcaaacacaaagaagcacagatgacagaaaacaacaaaagaaagaaaccaagaacaaaaaacaaaacaacagcaagagcaagaagagaaacaaagaaaaaaaatgggaaagaacgaaggagagagacagaaaacagacgatgacaacgcaaagaac

SEQ ID NO: 722658 - DNA, 3954 bp, Homo sapiens
gcaatcacgggtgtttagtctgcagccgagcagctaaagggagaaagaatcgctcaggaaagacacactgcagactccaccggcaccctgcaatagatggattccgactacacaagggagaaaacgcggaggtgacactctcctgcctggaaagaggacgaacgaccaaacaaacgcaaggactggactccatgccgaaggtatctggaagtcgtgacacggtgtgtataaaacaaaagtttgcgagctgttaattgctgtgctgtgttattaagagacgctttcaagtttcaagtaccaaatgtagctttacgttgccaaaggaagttgaggcaattgctttgctgttttaacttgctctgtgagggaaatctcataaactgaccaatgcaccaaatgaatgctaaaatgcactttaggtttgtttttgcacttctgatagtatctttcaaccacgatgtactgggcaagaatttgaaatacaggatttatgaggaacagagggttggatcagtaattgcaagactatcagaggatgtggctgatgttttattgaagcttcctaatccttctactgttcgatttcgagccatgcagaggggaaattctcctctacttgtagtaaacgaggataatggggaaatcagcataggggctacaattgaccgtgaacaactgtgccagaaaaacttgaactgttccatagagtttgatgtgatcactctacccacagagcatctgcagcttttccatattgaagttgaagtgctggatattaatgacaattctccccagttttcaagatctctcatacctattgagatatctgagagtgcagcagttgggactcgcattcccctggacagtgcatttgatccagatgttggggaaaattccctccacacatactcgctctctgccaatgatttttttaatatcgaggttcggaccaggactgatggagccaagtatgcagaactcatagtggtcagagagttagatcgggagctgaagtcaagctacgagcttcagctcactgcctcagacatgggagtacctcagaggtctggctcatccatactaaaaataagcatttcagactccaatgacaacagccctgcttttgagcagcaatcttatataatacaactcttagaaaactccccggttggcactttgctcttagatctgaatgccacggatccagatgagggcgctaatgggaaaattgtatattccttcagcagtcatgtgtctcccaaaattatggagacttttaaaattgattctgaaagaggacatttgactcttttcaagcaagtggattatgaaatcaccaaatcctatgagattgatgttcaggctcaagatttgggtccaaattcaatcccagcccattgcaaaattataattaaggttgtggatgttaatgacaataaacctgaaattaacatcaacctcatgtcccctggaaaagaagaaatatcttatatttttgaaggggatcctattgatacatttgttgctttggtcagagttcaggacaaggattctgggctgaatggagaaatagtttgtaagcttcatggacatggtcactttaaacttcagaagacatatgaaaacaattatttaatcttaactaatgccacactggatagagaaaagagatctgagtatagtttgactgtaatcgctgaggacagggggacacccagtctctctacagtgaaacattttacagttcaaatcaatgatatcaatgacaatccaccccacttccagagaagccgatatgaatttgtaatttcagaaaataactcaccaggggcatatatcaccactgttacagccacagatcctgatcttggagaaaatgggcaagtgacatacaccatcttggagagttttattctaggaagttccataactacatatgtaaccattgacccatctaatggagccatctatgccctcagaatctttgatcatgaagaagtgagtcagatcacttttgtggtagaagcaagagatggaggaagcccgaagcaactggtaagcaataccacagttgtgctcaccatcattgacgaaaatgacaacgttcctgtggttatagggcctgcattgcgtaataatacggcagaaatcaccattcccaaaggggctgaaagtggctttcatgtcacaagaataagggcaattgacagagactctggtgtgaatgctgaactcagctgcgccatagtagcaggtaatgaggagaatatcttcataattgatccacgatcatgtgacatccataccaacgttagcatggattctgttccctacacagaatgggagctgtcagttatcattcaggacaaaggcaatcctcagctacataccaaagtccttctgaagtgcatgatctttgaatatgcagagtcggtgacaagtacagcaatgacttcagtaagccaggcatccttggatgtctccatgataataattatttccttaggagcaatttgtgcagtgttgctggttattatggtgctatttgcaactaggtgtaaccgcgagaagaaagacactagatcctataactgcagggtggccgaatcaacttaccagcaccacccaaaaaggccatcccggcagattcacaaaggggacatcacattggtgcctaccataaatggcactctgcccatcagatctcatcacagatcgtctccatcttcatctcctaccttagaaagagggcagatgggcagccggcagagtcacaacagtcaccagtcactcaacagtttggtgacaatctcatcaaaccacgtgccagagaatttctcattagaactcacccacgccactcctgctgttgagcaggtctctcagcttctttcaatgcttcaccaggggcaatatcagccaagaccaagttttcgaggaaacaaatattccaggagctacagatatgcccttcaagacatggacaaatttagcttgaaagacagtggccgtggtgacagtgaggcaggagacagtgattatgatttggggcgagattctccaatagataggctgttgggtgaaggattcagcgacctgtttctcacagatggaagaattccagcagctatgagactctgcacggaggagtgcagggtcctgggacactctgaccagtgctggatgccaccactgccctcaccgtcttctgattataggagtaacatgttcattccaggggaagaattcccaacgcaaccccagcagcagcatccacatcagagtcttgaggatgacgctcagcctgcagattccggtgaaaagaagaagagtttttccacctttggaaaggactccccaaacgatgaggacactggggataccagcacatcatctctgctctcggaaatgagcagtgtgttccagcgtctcttaccgccttccctggacacctattctgaatgcagtgaggtggatcggtccaactccctggagcgcaggaagggacccttgccagccaaaactgtgggttacccacagggggtagcggcatgggcagccagtacgcattttcaaaatcccaccaccaactgtgggccgccacttggaactcactccagtgtgcagccttcttcaaaatggctgccagccatggaggagatccctgaaaattatgaggaagatgattttgacaatgtgctcaaccacctcaatgatgggaaacacgaactcatggatgccagtgaactggtggcagagattaacaaactgcttcaagatgtccgccagagctaggagattttagcgaagcatttttgtttccatgtatatggaaatagggaacaacaacaacaacaaaaaaccctgaaagaactggcattgccaaatagttgcatttatcataaatgtgtctgtgtatattgaatattaaatactgtattttcgtatgtacac

SEQ ID NO: 722659 - DNA, 368 bp, Homo sapiens
atcagtcggccctgattatgtgataacctggtcttggtgcacgatggtagtagatgaactgtgggttctgcatgacagtatcactggtgatacagtcgtcactctcgccccgtggatgtcggcgagaacctgatgggatcttcccattgtattcctgtcttccggatggtggaatacacctcgtccccttcaaacagaaacagggagtactcgtccgggctgaagggggcatagcctctcatctcgccaagtgggaccacagtgccattcgaccaggttccagcagctggggtgccgggcgtcggtgccacaggccagtagcccctcactccgcctctccaggagagtgatgtagttctcgcagtccc

SEQ ID NO: 722660 - DNA, 766 bp, Homo sapiens
  misc_feature (393)..(393): n is a, c, g, or t
  misc_feature (720)..(720): n is a, c, g, or t
gaaaaaatgtcccccatagtgcctcctctctaataccacacgccgttgcattctctctcaccaaggtaaccatttctctctcccgcaccggtcctctcccgcctcattggcacacggtgtctcctttaccccccctactctgtaccttcactcattggttatataaatagagaccatctctccccgccctctcgtaccaacatttggttttttttacataacaccagttggccacgcgcgctgccccacttctcttcgtcaagatcatttcgtcttttctcctccccaaatattttcgtctgtatcgaattttttgagacgcccatctagttggcgggtgcatgctgcgcagctttctatcttgtggattgttacgcctcctatatagtattnatttccaaggagtactccgtactattttgataacccgtccgcgagtgtgttagataattaactcacagaatattttcgagggaggtgatgttccatgtggatatgccccctgttgaaaacaatctctcttttctctatcggtgatacaggctggtcccacggtcctgggtcaataatttctggggccccaggcttttgctgtaacccccccccagcccctttaattgtgcaaggtgtgacaacctcccacacaagcgaaataagaggggttagcgaagatatacgagttatcgtgcgcgagtgagagacacgctcagttctaccganggttccagcaaagatctgcagacaccgtgcgccccacccatgacaa

SEQ ID NO: 722661 - DNA, 721 bp, Homo sapiens
  misc_feature (613)..(613): n is a, c, g, or t
  misc_feature (653)..(653): n is a, c, g, or t
  misc_feature (659)..(660): n is a, c, g, or t
gactctcgtctggccgccgcgctttcaggaggtgctttggttctctccggtcttgtccacgctagggggtgcacgtactcccaactgtggtcgcgctctcaccccttctgctgctctcgtggccccctcgcgatggcgggcatcctgtttgaggatattttcgatgtgaaggatattgacccggagggcaagaagtttgaccgagtgtctcgactgcattgtgagagtgaatctttcaagatggatctaatcttagatgtaaacattcaaatttaccctgtagacttgggtgacaagtttcggttggtcatagctagtaccttgtatgaagatggtaccctggatgatggtgaatacaaccccactgatgataggccttccagggctgaccagtttgagtatgtaatgtatggaaaagtgtacaggattgagggagatgaaacttctactgaagcagcaacacgcctctctgcgtacgtgtcctatgggggcctgctcatgaggctgcagggggatgccaacaacctgcatggattcgaggtggactccagagtttatctcctgatgaagaagctagccttctgaacctcgcctgaagccagctctctgccantcactcaggtcctgggcattgttcaagctgagtggagcgntcttgnncacctgtgacgaaggttggtcctgtccaccgtgccggcatcttacggccctccatccatgg

SEQ ID NO: 722662 - DNA, 246 bp, Homo sapiens
  misc_feature (242)..(242): n is a, c, g, or t
atgttgtacatgtcggccggagtagcgtatcgatgggcagttgaggcggcgcatatgcatctaggctataaatatctggagtatacgtacgcggtacagtaacaaccggtacctctagaatatagctagatgcgaaattaaagcgctgatatcgatcgcgcgcagatctgtcatgatgatcattgcaattggatccatatatagggccggtgtaataattacctcaggtcgacgtcccatgnccat

SEQ ID NO: 722663 - DNA, 1088 bp, Homo sapiens
  misc_feature (135)..(135): n is a, c, g, or t
  misc_feature (652)..(652): n is a, c, g, or t
  misc_feature (1075)..(1075): n is a, c, g, or t
aatcgctacctgctctgtgccaggctggtctcaaactcctgatctcaaatgatccacctgcctcggcctcccaaaatgtcgggattacaggcatgagccactgcaccggcctacacctctttattttgtcatctntcaataattttctctttgatgtctctttctttgcctggagactaagatgtttttcaagacggataccagttcttatacatcttggtcactcccctcagcacagtgcctagcatagaaagagaaaacctttggatgattgaataacttgcccagagtcaggttctcagtcatccaggcaggctttgctgctggagtatctttggttgttttctggggattacgttcgcttgccacagtttttctccccttttccttcttgcatatctggttctgattgagcctgaatttctatgagagcagatgagagaccactggatgtagactgggttagattgagtatcctgttgcatacaatcccacactgtaggatctgccttggcaatacctctgtcactcttttcctgcttctccccagtgtctcgactgcattgtgagagtgaatctttcaagatggatctaatcttagatgtaaacattcaaatttaccctgtagacttgggtaagtattgaatacagncaataataagagactttttgctgcttctgctattctttactctctgatattgctgttattttcaggtgacaagtttcggttggtcatagctagtaccttgtatgaagatggtaccctggatgatggtgaatacaaccccactgatgataggccttccaggtgagggagtggagaaggtaatacttgaaatatgccttgaggactaagtagataagtgatatagaaagactcttctaaaattcctggaataaatgatgatcagcagaatctgagtaaccttaaggaaatttctgcacttaagaattcaaacaggccaggcaccgtggctcacacctgtaacccaagcactttgggaggccgaggcaggaggattgcttgagtccaggagttcaagaccagcctgagcaacatagcgaaacctcnctgctacaaaaaa

SEQ ID NO: 722664 - DNA, 481 bp, Homo sapiens
tgatcagctcgtccagataagagaaccaggcagcccgggcatgagaaaacttcaaaaattagaatccggcctcaaacctcgcaatgggcattatcaaccttgccttcaaggtgtacaatactagagaggaggcagccagacagcaacacatttctgagttacaattacttgcctctgctgtgagacaaaacccagccgcatctccagcatacaagaacttcaaaacgcctgaactgcagcggccaggcattcctccaggaccacctgccccaggatcttgcttcaagtgctggaaatctggccactgggccaagtattgcctgcagcctgggattcctcctaagccatgtcccatctgtgcaggaccccactggaaactggactgtccaactcacccagcagccactcccagagcccctggaactcaggcccaaggctatctgactgactccttcccagatcttctccgcttagcggctga

SEQ ID NO: 722665 - DNA, 1066 bp, Homo sapiens
  misc_feature (135)..(135): n is a, c, g, or t
  misc_feature (958)..(958): n is a, c, g, or t
  misc_feature (998)..(998): n is a, c, g, or t
  misc_feature (1004)..(1005): n is a, c, g, or t
aatcgctacctgctctgtgccaggctggtctcaaactcctgatctcaaatgatccacctgcctcggcctcccaaaatgtcgggattacaggcatgagccactgcaccggcctacacctctttattttgtcatctntcaataattttctctttgatgtctctttctttgcctggagactaagatgtttttcaagacggataccagttcttatacatcttggtcactcccctcagcacagtgcctagcatagaaagagaaaacctttggatgattgaataacttgcccagagtcaggttctcagtcatccaggcaggctttgctgctggagtatctttggttgttttctggggattacgttcgcttgccacagtttttctccccttttccttcttgcatatctggttctgattgagcctgaatttctatgagagcagatgagagaccactggatgtagactgggttagattgagtatcctgttgcatacaatcccacactgtaggatctgccttggcaatacctctgtcactcttttcctgcttctccccagtgtctcgactgcattgtgagagtgaatctttcaagatggatctaatcttagatgtaaacattcaaatttaccctgtagacttgggtgacaagtttcggttggtcatagctagtaccttgtatgaagatggtaccctggatgatggtgaatacaaccccactgatgataggccttccagggctgaccagtttgagtatgtaatgtatggaaaagtgtacaggattgagggagatgaaacttctactgaagcagcaacacgcctctctgcgtacgtgtcctatgggggcctgctcatgaggctgcagggggatgccaacaacctgcatggattcgaggtggactccagagtttatctcctgatgaagaagctagccttctgaacctcgcctgaagccagctctctgccantcactcaggtcctgggcattgttcaagctgagtggagcgntcttgnncacctgtgacgaaggttggtcctgtccaccgtgccggcatcttacggccctccatccatgg

SEQ ID NO: 722666 - DNA, 158 bp, Homo sapiens
tggttggtggcacacggaatgaagacatacaacggcaatgaaatttatcttcattcagattcagaaacctcattcgttgtaatcttctttcattgaatgcatgcattatgacgtaaccgcgtcaaggaaatacgttaccacttcaggaagatcggtat

SEQ ID NO: 722667 - DNA, 122 bp, Homo sapiens
gtctctgaaatctgcaggtacctcacacagccctgagctctgggccatcatgcggctggcagcctctatgctgggcatgctgggtactgcagccctagatgttctccagcagacacagaggg

SEQ ID NO: 722668 - DNA, 1149 bp, Homo sapiens
  misc_feature (135)..(135): n is a, c, g, or t
  misc_feature (652)..(652): n is a, c, g, or t
  misc_feature (1041)..(1041): n is a, c, g, or t
  misc_feature (1081)..(1081): n is a, c, g, or t
  misc_feature (1087)..(1088): n is a, c, g, or t
aatcgctacctgctctgtgccaggctggtctcaaactcctgatctcaaatgatccacctgcctcggcctcccaaaatgtcgggattacaggcatgagccactgcaccggcctacacctctttattttgtcatctntcaataattttctctttgatgtctctttctttgcctggagactaagatgtttttcaagacggataccagttcttatacatcttggtcactcccctcagcacagtgcctagcatagaaagagaaaacctttggatgattgaataacttgcccagagtcaggttctcagtcatccaggcaggctttgctgctggagtatctttggttgttttctggggattacgttcgcttgccacagtttttctccccttttccttcttgcatatctggttctgattgagcctgaatttctatgagagcagatgagagaccactggatgtagactgggttagattgagtatcctgttgcatacaatcccacactgtaggatctgccttggcaatacctctgtcactcttttcctgcttctccccagtgtctcgactgcattgtgagagtgaatctttcaagatggatctaatcttagatgtaaacattcaaatttaccctgtagacttgggtaagtattgaatacagncaataataagagactttttgctgcttctgctattctttactctctgatattgctgttattttcaggtgacaagtttcggttggtcatagctagtaccttgtatgaagatggtaccctggatgatggtgaatacaaccccactgatgataggccttccagggctgaccagtttgagtatgtaatgtatggaaaagtgtacaggattgagggagatgaaacttctactgaagcagcaacacgcctctctgcgtacgtgtcctatgggggcctgctcatgaggctgcagggggatgccaacaacctgcatggattcgaggtggactccagagtttatctcctgatgaagaagctagccttctgaacctcgcctgaagccagctctctgccantcactcaggtcctgggcattgttcaagctgagtggagcgntcttgnncacctgtgacgaaggttggtcctgtccaccgtgccggcatcttacggccctccatccatgg

SEQ ID NO: 722669 - DNA, 261 bp, Homo sapiens
cggatgacgccggtgcagcgggggggcccggaggcctggtggccctgggatggggaaccgcggtggttccgcggaggtttcggcagtggcttcggggccgggtcgcggcgtggacggggccgggcgaggccgtggactcgcggggggaggccgaggataggagtgatgcccgtcaaccacagttgggccgcttgtcaggacatgaaggatcatgtcccgtggaggagatctatctcttctcccctgcccattaaggaatca

SEQ ID NO: 722670 - DNA, 954 bp, Homo sapiens
  misc_feature (135)..(135): n is a, c, g, or t
aatcgctacctgctctgtgccaggctggtctcaaactcctgatctcaaatgatccacctgcctcggcctcccaaaatgtcgggattacaggcatgagccactgcaccggcctacacctctttattttgtcatctntcaataattttctctttgatgtctctttctttgcctggagactaagatgtttttcaagacggataccagttcttatacatcttggtcactcccctcagcacagtgcctagcatagaaagagaaaacctttggatgattgaataacttgcccagagtcaggttctcagtcatccaggcaggctttgctgctggagtatctttggttgttttctggggattacgttcgcttgccacagtttttctccccttttccttcttgcatatctggttctgattgagcctgaatttctatgagagcagatgagagaccactggatgtagactgggttagattgagtatcctgttgcatacaatcccacactgtaggatctgccttggcaatacctctgtcactcttttcctgcttctccccagtgtctcgactgcattgtgagagtgaatctttcaagatggatctaatcttagatgtaaacattcaaatttaccctgtagacttgggtgacaagtttcggttggtcatagctagtaccttgtatgaagatggtaccctggatgatggtgaatacaaccccactgatgataggccttccagggctgaccagtttgagtatgtaatgtatggaaaagtgtacaggattgagggagatgaaacttctactgaagcagcaacacgcctctctgcgtacgtgtcctatgggggcctgctcatgagcctccagcaggacacagataacatgcaggcaatggagatggactcgataccgtgcgtcttgaaactgcagatgcgctctcacaccttttcgctgatctcgcggccc

SEQ ID NO: 722671 - DNA, 459 bp, Homo sapiens
  misc_feature (46)..(46): n is a, c, g, or t
tcccggaaaaactgtaaacccttgggtgtaaatggttaaccgggtnctttggtggacattaaagaactgggcctatgggagcccttggctgtgaagctgccgacttattaaccaacagtggagacggccgttttgcttctgcgaatttatgacctcgtttccggcccccaaaaaaaaggggatggccaaagccggccaggcgggggtccttattctggcccggagtgagtgctaggccagggttcttcaatgcccagaacccgcagagtttccccctttcctgagccagagggcccggaaccctgtgggcgtttttgttcaaaaggggtccgggtggggggcagccccccgtccccttttgtcccaggtccgttttcccaaagaccctgacatggaatttttttttattggaagggttccctttagtttgcttcccatgatttaattttagtcctttta

SEQ ID NO: 722672 - DNA, 407 bp, Homo sapiens
cgaatcgaggctgaaaccacgaaaatcggtcacacagtaagagctaccactatgcacattggagttgtctccaacatactcggatgcataccctagcatcacacacgcgcagcgaagtcccgcgatctaggcctacttacgagccaaaacctgcccctactcctcctagacctaacctgactagaacagctatgagctaaaacaagtccacagcaccgaatctccacctccatcatcagctcaacccaaaaaggcataattgaactttacttcctctctttcttcttcccaattctaattctactgactatcctagtaaatcgctgtcgcctttatccaagcctacgttttcacactgtcgtagtaagcctctacctgcgcgacaacacataatgaccgaatatctg

SEQ ID NO: 722673 - DNA, 223 bp, Homo sapiens
  misc_feature (2)..(2): n is a, c, g, or t
  misc_feature (61)..(61): n is a, c, g, or t
gnaggacccccctgcgacagagttaggcaatggttgagctaaaactttcaagtttgtgtantgtggagctgaaagctgactttgtagatgaggactaccattttggagagaggctggactcccatgtggcttcagaagacaaaaagaggatcagtggatcaaagttacaaaaagaggacttgactatacaacttcctaatgatggagtgggctgctgtgacta

SEQ ID NO: 722674 - DNA, 868 bp, Homo sapiens
  misc_feature (139)..(139): n is a, c, g, or t
  misc_feature (592)..(592): n is a, c, g, or t
  misc_feature (868)..(868): n is a, c, g, or t
gaattgaaaagttttagcagtggatttacagcctgcttaatacttctatttcttacaaaacaaccgtataggggttaaagtatcagtgcaaagtcccgttcaaatatgactcagtaatgagctctacaagccagccttngtggcatgttaaattcaaaacaaagcttagcattttttttttttttttttggggataagaaacgggggggggggtgggggaaaagaaagagggacttggggaagaagaagggaggggaacttaaacctggttcctggctactggtttttctcaagaaaaccaaatatgggtatcttccatggaggagctggttttctggaccaggggaatttatgtggaatcttccgggaggttctcacccatctccagggacacaccagtgcagtgcaggaactcagggacaaaaagctgccaggcataacaggaagataccagaatggcggttaccaaataaaatacggggcagatgtgtgggtcacgcgggtaatcatagcacttcgggaggctgaggcaggaggataactggagccataggagtggagacaggctgggacattagaagaaccatctctnaaagaaaggtggaaaatgaccggccaggggggtggcattgtcatcccaagactggaagggcacaacatagcccgagaaacacgacgttcggaaataggcgaacatggtccacgcggtgacacatggaacccgtccacacggaaaaataacctgtctcattgcagagaaagaacaaaaactttgcggctggcgaagatcacaccgtggcggccgaaaaaggactcgccaaaagcgtacggcgccacaacaggcagtggacacgaggcggacaagccn

SEQ ID NO: 722675 - DNA, 200 bp, Homo sapiens
aaccgatacacggtggcacggggggttaacttgagattcaacttcacaagatggtcccgtgcagcaaatgatatcatatggggtactggagcaagtcagtttacttggtttaatttgcgctagctggtaggtctgtgcaagtcattgatgagcgcacttacagcagtatatgtgagagtatttcagcgatcatgctgaac

SEQ ID NO: 722676 - DNA, 123 bp, Homo sapiens
tgtgtgatctgctacatgagcagtggagctggaggcacgtggatgcctgaatgatgagatcaacttctcagagacctcaatgagacggagttgacagagctgcagtcccagatctccgacaca

SEQ ID NO: 722677 - DNA, 2153 bp, Homo sapiens
cacgcgtacgagcagctggatggtgcctgagtgggtttgggacacggaggggcctgctggggggcactggagccctttggggagggaggaaagcctgtcttaccatggtgtggcgcttgccctgcaggtgggaggacagcttggggttgtggtgcatgcactcgtgggtggcatcggccaagtacaccttggagaaggccccagaactgatcttcttggaggagagcaggtagccattgtccttgcactcacgcacctgctccgtgaaggttctctgatccagcttctgcctgctgctgcccttcatggagggcagtgcatggaagggggtgtggtggtccagtttcaccagtcttggggggcacagctgagacctgacttgtgtcagagggcaggggccaggtggtagggggtgctgggtgggaactgcgtccctcttgaggcagcagccacacttctgaagacttgctgggactgcggcagaggcagggagtgatggggctgcaagctcagggcgggggctggcacagctctggactgggcagggggagggccagctctgggagacgaggtgcaggttctagagtggagaattgagctgtacctgcattgtgccctcaaagggtgcgtcttcttgtttgaggacctgcccactctgaggacatcttgtgggaccagtcctgcccacatggggcccactctctgtgaggtgaaaacccatttcaagggctgcagccaggtgaggcctctgtggacccctatggacgtggctggccacagaaagctgttaaagaaatgagggtggggatttctggggcataaggacaggaaaagggacacatacgtgtcaaccaccatttcaactgcaccccctccttcgagaggatgccatggccacactcagctgggccctaaggtgggctgagccagaggaaggcaggcaggagctctgtctcccggccttctccactggagcctgaagcacctcctgcccaggccagcaaggtgcaggaagcgtcccacctagagacctctgcagacttgaccacacaccccagggcaagcaagggccccactcctgagcctacctctgatcctacagttccaagagacagaagccaaccttgcccctcccttctggaccccagagtgccctgtgggcactaattactgctaacgtttgagtgccagctctgtgccgggtgccattctgggcagtcgcaccagctaccactaccacctgtagcagtcctgcccccgttcacagaagacattcaggagcccagcctgtgggggcagttcacatctgggatctcaagtcctaacacaaccaagcaatcctcgctttacagatgatgaaattgagccgccatggtggggaagcccaacccaaatgtgtcatctctgctgtgagctagacagcacagtggctgtgggcctggagggcagggctgcctgatgggcagccatcctgggaatgtctgcaagggtctggtgcttggtacagaccagtgagtctggggaattggggtctccaccaagatctgtgggtgcacttggcatgtttgctgcagaaaaggccccagaatgggctggcttgaactggaaaaacacactttctcatcccttttggaccacgagcttcttgagagcaaagcatgtgtttgatattcctttgctcaccctcaggccttgtttggcaaattgcctgggatacagaaaataaggacaaggtctgggtgtagtggcttatgcctgtaatcccagcactttgggtgaccaaggcaggaggatctcttgaggccaggagttgcagaccagcctgggtaacatagtgagaccttgtctctgcaacaaaatttaaaaattagccagacttggtggttcccacttgtaatcccagctatttgggaggctgaggcgagaggatcacttgagcgcaggaatttaaggctgctgtgagctatgattgtgccactgcactccagcctgggtaacagtgagaggcctcatttcaacaataaaacccagcttgggccgggcgcggtggctcatgcctttaatcccagcactttgggaggccaagacgggcagatcacgaggtcaggagatagagaccatcctggttaacacggtgaaaccctgtctctaca

SEQ ID NO: 722678 - DNA, 503 bp, Homo sapiens
  misc_feature (390)..(390): n is a, c, g, or t
  misc_feature (394)..(394): n is a, c, g, or t
  misc_feature (397)..(399): n is a, c, g, or t
  misc_feature (403)..(403): n is a, c, g, or t
  misc_feature (405)..(405): n is a, c, g, or t
gagcgttaggtaagagcggtctgggggaaagccctgggtaactctgggcaccggggaggggcagtgcgcggaatcgaggcacagccccaacttcagtgaaggcggttcaaaaacatggagttcccgtcgtggcgcagtggttaacgaatccgactaggaaccatgaggttgcgggttcggtccctgcccttgctcagtgggttaacgatccggcgttgccgtgagctgtggtgtaggttgcagacgcggctcggatcccgcgttgctgtggctctggcgtaggccggtggctacagctccgattcgacccctagcctgggaacctccatatgccgcgggagcggcccaagaaatagcaacaacaacaacaaaaaaacaaaaacaaaaaanaaanggnnnttcntnggccttaaattaaaaacaaaaaaattaaaaaagagtcttcaaacccataaagtgtgcgcagggaattgtcaggaggttaaatacccctttttggtttt

SEQ ID NO: 722679 - DNA, 331 bp, Homo sapiens
attcctaccccagcaggaaccactaccctgacttttattttattttattttattttgagacagtctctctgtcacccaggcaggagtgcaatggcacagtctcaactcactgcaacctccacctcctgggttcaagttattctcctgcctcagcctcccaagtagctgggattacaagcatgtgctaccatacctggctaatttttatattttgagtagtgacagggttttaccctcaaattcctgacttcaagtgatccgcttgcctcagccaggaccagagagcgggggaaaacacccaataactagacatcttcatgtaactatcagt

SEQ ID NO: 722680 - DNA, 557 bp, Homo sapiens
tgatggcaggtaagcacatgaagggatgctcaacattattagttcatggggcaactggaaatgaaaaccacaatgagatactaataaaatctactagaaaggctaaaattaaaaagactggccatattgtgattggtaagaaagtggagctactgagctcgtccacactggtggcaggaatgtaaaaggtccacacttatttaaaaaccacgttgaacggccaggcgcagatggctcactgcctgtaactcccagacactttgggacggccacagtcgaggcagactcacgagactcaacgagactggagacccactcctgtgccaaccactggtgaacaccccggtctctacctacaacacactacaaaaacattacgctacggttgtggtctgcacactcgcctgatcactcgcaggctacctcacggaacgctgacggcaggacgacactcggttgacagccgggacggtggagggtatgcacgtgacgcatgacgactcagcacccacgtgtcactcatagccgtggcgaaccagacgcgagaactccatctc

SEQ ID NO: 722681 - DNA, 460 bp, Homo sapiens
  misc_feature (347)..(347): n is a, c, g, or t
  misc_feature (351)..(351): n is a, c, g, or t
  misc_feature (354)..(356): n is a, c, g, or t
  misc_feature (360)..(360): n is a, c, g, or t
  misc_feature (362)..(362): n is a, c, g, or t
agattaagaagatttatctgagattttactgaggttaagaagatcttcaggaagtgtcaagaatccatcctgaggagttcccgtcgtggcgcagtggttaacgaatccgactaggaaccatgaggttgcgggttcggtccctgcccttgctcagtgggttaacgatccggcgttgccgtgagctgtggtgtaggttgcagacgcggctcggatcccgcgttgctgtggctctggcgtaggccggtggctacagctccgattcgacccctagcctgggaacctccatatgccgcgggagcggcccaagaaatagcaacaacaacaacaaaaaaacaaaaacaaaaaanaaanggnnnttcntnggccttaaattaaaaacaaaaaaattaaaaaagagtcttcaaacccataaagtgtgcgcagggaattgtcaggaggttaaatacccctttttggtttt

SEQ ID NO: 722682 - DNA, 266 bp, Homo sapiens
  misc_feature (202)..(202): n is a, c, g, or t
  misc_feature (228)..(228): n is a, c, g, or t
  misc_feature (243)..(243): n is a, c, g, or t
aacccgcttcggcttcacgcgtgcgccggtaaggccaagctgttggtacaccgttgacctgccgtcagttgtgaattattggtacgcagttcgcgatcggtcaggccacggcagaaacttgccgccgtagaacaaacggttgttggcgttaccggttggttgagttgaagcaaacggccaattgccgcacatagcagccctnaagaaaaaatgctgcctttatgcgtntttacgcccgcagtngcgcggaacatatcaccttcgca

SEQ ID NO: 722683 - DNA, 453 bp, Homo sapiens
  misc_feature (340)..(340): n is a, c, g, or t
  misc_feature (344)..(344): n is a, c, g, or t
  misc_feature (347)..(349): n is a, c, g, or t
  misc_feature (353)..(353): n is a, c, g, or t
  misc_feature (355)..(355): n is a, c, g, or t
caaagcagagtgttcctctgatagcagttgaattagtcattagaattttaaaatgttctgatttggggagttcccgtcgtggcgcagtggttaacgaatccgactaggaaccatgaggttgcgggttcggtccctgcccttgctcagtgggttaacgatccggcgttgccgtgagctgtggtgtaggttgcagacgcggctcggatcccgcgttgctgtggctctggcgtaggccggtggctacagctccgattcgacccctagcctgggaacctccatatgccgcgggagcggcccaagaaatagcaacaacaacaacaaaaaaacaaaaacaaaaaanaaanggnnnttcntnggccttaaattaaaaacaaaaaaattaaaaaagagtcttcaaacccataaagtgtgcgcagggaattgtcaggaggttaaatacccctttttggtttt

SEQ ID NO: 722684 - DNA, 522 bp, Homo sapiens
  misc_feature (82)..(82): n is a, c, g, or t
  misc_feature (91)..(91): n is a, c, g, or t
  misc_feature (147)..(147): n is a, c, g, or t
ccagcccgatgctgggggcagaacagtgagaaaagagtgagatggaaagggcgtaggactggcctggggaagctggacaggntggaggctngaggtcagtggtaggtaatggggattggggggtactgggtgtttagaggctgaaanagcacgtgggtaaatgaagattctttttttcttttctttttttttttttttttttgaaaaaaagtctctctctgttgcccaggctaaatgtgcaatggtgtgatctcggttcactgcaatctctgcctcccgagtttcaagcgattctcctgcctcagcctcccaagtcgctagaattacaaggacccgccaccacactctggctaattatggtatttaagtaggagataggtttccaccatgttggccaggatggtctcaatctcttgaccttgtgatctgcccgctttggcctcccaggttgctgggtatacaggcgtgagccaccgcgcctggttgtggctcctttatcctagaagtttcttggcctctcgt

SEQ ID NO: 722685 - DNA, 233 bp, Homo sapiens
gcaggttcaaggcaattctgtctcatcctcccgagtagctggacttacagccgcgcaaccaccatgcccagctaaattttggaattttccatagagacggggtttcaccaatgttggccaacttggtttccaattcctgaccttaggagatccccaacttcagctttccaaggtcttgggatccagggcatgaccattccacttggcgtttaaattttttagaggcaaagttt

SEQ ID NO: 722686 - DNA, 452 bp, Homo sapiens
  misc_feature (339)..(339): n is a, c, g, or t
  misc_feature (343)..(343): n is a, c, g, or t
  misc_feature (346)..(348): n is a, c, g, or t
  misc_feature (352)..(352): n is a, c, g, or t
  misc_feature (354)..(354): n is a, c, g, or t
attagatcacacagggcataggacattgctagtactgatcaatattcattaattaggagttcccgggagttcccgtcgtggcgcagtggttaacgaatccgactaggaaccatgaggttgcgggttcggtccctgcccttgctcagtgggttaacgatccggcgttgccgtgagctgtggtgtaggttgcagacgcggctcggatcccgcgttgctgtggctctggcgtaggccggtggctacagctccgattcgacccctagcctgggaacctccatatgccgcgggagcggcccaagaaatagcaacaacaacaacaaaaaaacaaaaacaaaaaanaaanggnnnttcntnggccttaaattaaaaacaaaaaaattaaaaaagagtcttcaaacccataaagtgtgcgcagggaattgtcaggaggttaaatacccctttttggtttt

SEQ ID NO: 722687 - DNA, 278 bp, Homo sapiens
gcccttcaaaaacttttgcttgggggaaagtaaacaaaaaggatgggggtttggggcgaatgtccttaggcaaaaatggtttttattgggggggggggggggtgggggatttataataaagcaagcaaacccccccttgggtttcaattgaagataaaagaatggtttgggcaagcaaagccaatgggggggttttcccaaaaaaactttggaaatgagaggccaggaggggtcaaagggggatttttaaaagaaaaaaattcctttttataccccca

SEQ ID NO: 722688 - DNA, 441 bp, Homo sapiens
  misc_feature (328)..(328): n is a, c, g, or t
  misc_feature (332)..(332): n is a, c, g, or t
  misc_feature (335)..(337): n is a, c, g, or t
  misc_feature (341)..(341): n is a, c, g, or t
  misc_feature (343)..(343): n is a, c, g, or t
gtgtatctagaggacccggaacacagaagcggtaaatcacttaaaaggggaatgggagttcccgtcgtggcgcagtggttaacgaatccgactaggaaccatgaggttgcgggttcggtccctgcccttgctcagtgggttaacgatccggcgttgccgtgagctgtggtgtaggttgcagacgcggctcggatcccgcgttgctgtggctctggcgtaggccggtggctacagctccgattcgacccctagcctgggaacctccatatgccgcgggagcggcccaagaaatagcaacaacaacaacaaaaaaacaaaaacaaaaaanaaanggnnnttcntnggccttaaattaaaaacaaaaaaattaaaaaagagtcttcaaacccataaagtgtgcgcagggaattgtcaggaggttaaatacccctttttggtttt

SEQ ID NO: 722689 - DNA, 501 bp, Homo sapiens
  misc_feature (387)..(387): n is a, c, g, or t
  misc_feature (389)..(389): n is a, c, g, or t
tcggacccggtatagcggtctaggactatctaaaactggtgataaagcaagtccacagaattagaaaattgactgtgactccatgcagattatattaaaaattttcttcttccgggagttcccgtcgtggcgcagtggttaacgaatccgactaggaaccatgaggttgcgggttcggtccctgcccttgctcagtgggttaacgatccggcgttgccgtgagctgtggtgtaggttgcagacgcggctcggatcccgcgttgctgtggctctggcgtaggccggtggctacagctccgattcgacccctagcctgggaacctccatatgccgcgggagcggcccaagaaatagcaacaacaacaacaaaaaaacaaaaacaaaaananataaataaatttgtcacttagcttgtcatcagagagttctgcaagtttaatcttttgttaaaaacacagcttatcattaatacttcctgtgaaacggagcgtccacttaggc

SEQ ID NO: 722690 - DNA, 247 bp, Homo sapiens
ccttgcttggtgattccccggtattttctgttgtcattgttcgactccatgatactaaaacataatgaagaaacaaactccagtatggagaagagaaagccttaattatttggttccatctagaaaagcaacaccttaaaggagtccttcactaggattgtctcatcacctctattagataaatcatgaagtgtccctgtgaaattgaagtgacctatctctgtaggactcaagagactagctaagc

SEQ ID NO: 722691 - DNA, 518 bp, Homo sapiens
tcggacccggtatagcggtctaggactatctaaaactggtgataaagcaagtccacagaattagaaaattgactgtgactccatgcagattatattaaaaattttcttcttccgggagttcccgtcgtggcgcagtggttaacgaatccgactaggaaccatgaggttgcgggttcggtccctgcccttgctcagtgggttaacgatccggcgttgccgtgagctgtggtgtaggttgcagacgcggctcggatcccgcgttgctgtggctctggcgtaggccggtggctacagctccgattcgacccctagcctgggaacctccatatgccgcgggagcggcccaagaaatagcaacaacaacaacaaaaaaacaaaaacaaaattgagaacttgctgtgtcccacgtactggtatagggtgagtgcccctcatggctcaggagacactgaggccaacgtgtaggctccggctcttgcctctgtgcagatacttagcccgcttttgtatccgggtac

SEQ ID NO: 722692 - DNA, 547 bp, Homo sapiens
  misc_feature (433)..(433): n is a, c, g, or t
  misc_feature (435)..(435): n is a, c, g, or t
agccaatcaaatctatgtagtaccttctgatatattattagagaattttaaaatatcaatgtaataataggaagcacatataatttcatagctgaaattatataggtgcaatttttagctgtcaaagtggtaataatcaacatcaataaaactacaaggaggagttcccgtcgtggcgcagtggttaacgaatccgactaggaaccatgaggttgcgggttcggtccctgcccttgctcagtgggttaacgatccggcgttgccgtgagctgtggtgtaggttgcagacgcggctcggatcccgcgttgctgtggctctggcgtaggccggtggctacagctccgattcgacccctagcctgggaacctccatatgccgcgggagcggcccaagaaatagcaacaacaacaacaaaaaaacaaaaacaaaaananataaataaatttgtcacttagcttgtcatcagagagttctgcaagtttaatcttttgttaaaaacacagcttatcattaatacttcctgtgaaacggagcgtccacttaggc

SEQ ID NO: 722693 - DNA, 488 bp, Homo sapiens
  misc_feature (374)..(374): n is a, c, g, or t
  misc_feature (376)..(376): n is a, c, g, or t
cgggtaccccaccaaaagcggcaggttatgaaacaaactagcacccatgaggatgcaggttagatccctagcctcgctcagtgggttaagaatccagtgttggagttcccgtcgtggcgcagtggttaacgaatccgactaggaaccatgaggttgcgggttcggtccctgcccttgctcagtgggttaacgatccggcgttgccgtgagctgtggtgtaggttgcagacgcggctcggatcccgcgttgctgtggctctggcgtaggccggtggctacagctccgattcgacccctagcctgggaacctccatatgccgcgggagcggcccaagaaatagcaacaacaacaacaaaaaaacaaaaacaaaaananataaataaatttgtcacttagcttgtcatcagagagttctgcaagtttaatcttttgttaaaaacacagcttatcattaatacttcctgtgaaacggagcgtccacttaggc

SEQ ID NO: 722694 - DNA, 795 bp, Homo sapiens
  misc_feature (637)..(637): n is a, c, g, or t
agccaatcaaatctatgtagtaccttctgatatattattagagaattttaaaatatcaatgtaataataggaagcacatataatttcatagctgaaattatataggtgcaatttttagctgtcaaagtggtaataatcaacatcaataaaactacaaggaggagttcccgtcgtggcgcagtggttaacgaatccgactaggaaccatgaggttgcgggttcggtccctgcccttgctcagtgggttaacgatccggcgttgccgtgagctgtggtgtaggttgcagacgcggagttcccgtcgtggcgcagtggttaacgaatccgactaggaaccatgaggttgcgggttcggtccctgcccttgctcagtgggttaacgatccggcgttgccgtgagctgtggtgtaggttgcagacgctcggatcccgcgttgctgtggctctggcgtaggccggtggctacagctccgattcgacccctagcctgggaacctccatatgccgcgggagcggcccaagaaatagcaacaacaacaacaaaaaaacaaaaacaaaacaacaacctaaaaaaaaattttaaagtcaagagacaaattagccggttgctcttagatttagaaaagtctctggagtntccatgttgtggcgcagtggttaacgaatccgactagaaaccatgaggtttcggattccatcctggccttgctcagtgggttaaagatccggcattgccgtgagctgtggtgtaggttgcaacacggctcggatccataataaatttagggtgaaggg

SEQ ID NO: 722695 - DNA, 234 bp, Homo sapiens
agagttttttaaacatttattttttaaatttttatttattttttatttacacattattattgtacatatttatagagtacagtttggtgttttgatacatatctctgctgtataatgatccagtcagggtagtgtattcatcacgtgatacatttatcatttctttgtgataataaccttgaaaagcctctcttctagctattttgtgatatacagtgttttactgttaactag

SEQ ID NO: 722696 - DNA, 659 bp, Homo sapiens
ggaccggactgcggttggggcgggaagagcctggggcctgtggctgacatggagcagccctgcatgctgatgtgcctgcgccctccccgccctgatggtggtgtgtgcccaccagtgatgatgcaatgctgcccagtggatgctgacccgagacttgtgatgcgcagcctgcctgcctgtggcctccctgggctcctcactgtcccacagccatgatgcctctcctcgcgcctccttcctgccgcctgagaatgcgaagggccatctctgatgtccgcctgcgccttctgtctcttctgtcaccttcgacctgctcttcatctccctgctctgtgatcatcgaactgaataccaacacatggcatcctgtaagaacttgtgagcagtgagatcatccagtacaactttaaaacttccttcttcgacatctttgtcctggccttcttcctgcttctctgtgacttgctcctagggctatgcctgtgcttgcatgctcctgtgcactggtgggtgatttgctgtgtcactgactgctggtgtccagtgcattcctcatatgtcaatggtcatcctctctgagctgctcagcaaatggggcatttggctacctgctccccatcgtctctttttgtcctcgcctggttggcgacctggttcct

SEQ ID NO: 722697 - DNA, 184 bp, Homo sapiens
cctcacgctcggcacctatgtgaatgtgtgtgagtgtgtatgtgtaatacacactcacacactattcacatacatacaagactcacaaacatacacaaaaatacatgtataatttgtataataagctggggtcagaatgaccatataattatatagggtttgctttgttatttgcctaaataaa

SEQ ID NO: 722698 - DNA, 104 bp, Homo sapiens
tccacactggaaaacaatcttttggccccattaaacttaaaagcacatgccgtctgacccagaagttctcagaagtactcattcactacccagtgtggagagag

SEQ ID NO: 722699 - DNA, 220 bp, Homo sapiens
tcgtacagttgcgatgcatgtgatttatgctgcagatggatcgggacatactgacggacgctcaagtgggcgaagatcgagccgcattgtttaggcaagcggactgaccctggcgaagcggcgagacaatcggttatttgtggaggcggtgttgtggatcgcgcgcacgggcagcccgtggggtgatctgccggagcggttccgcaactggtacggcggg

SEQ ID NO: 722700 - DNA, 605 bp, Homo sapiens
  misc_feature (332)..(332): n is a, c, g, or t
gtgccctcgctttctctatccagccgcctgctaagcagacccctcggagagctttctgactctcttcgccatcaggatgctggcttgctgggaacctattaatctgccttactcccgcgtttagacacctgcggcatcgtctcatggcttgtgatataccgtcttaagtactcaccattgcatcctcgctttaaatacacactgacgtgcattgtcaacttggcttgtgattaccatatcgtgcttgtaacagcaggttcgattaaccagttggtaacacgtcagagtagtatttaaatgccagtacaggtgtgggctgtgccgtgcactcncagatgtggaggattaatcttgaagggatgtgccccaaggggacccagatctgggggctggcctgatgctactgccctgtgtcctacgcataggcacctggcacctagagcactgcatccctaggacctctcgggtcctcaggatgcgtcaggcatgtagttccatctaccagggatactgtcacactgtcccatccaggcaaagactccattacgcactttgctctcactgagagataaacacttgctcctgaatccctccgtccgcgaaaa

SEQ ID NO: 722701 - DNA, 487 bp, Homo sapiens
ggatctccgatctggaaaacatcctgctggctggttactactgatacttcagatgaaagctctagtgctcattaactagttgattatcaagatacttagctaatcattacacatatattcatctctatttggtccacacaagagtcccaaaaagatattcattcctagagaatttagataacttgcctatggtcaaatgctcagaactggagaccaaattcgaagtcggcttgtccaaatgcacatagttcacaggccagtgacaccgttaccatactgttcccatcctatgcaatgcacagaaacagaagagattttagtgtcaggatataaaggatagataatcagatgactagcaaggaaagccccaagagaggaggttaaaagtccaatacaaaggcaaaatgcaaagaaccaaggtagcttcatagtcctcttggctgccagaaagaatacttacaatgagctgggcatggtggtatacacc

SEQ ID NO: 722702 - DNA, 887 bp, Homo sapiens
gggtgcacgctggatagcgtgctggccgtctgctagaggtatcccctcacaggagaagagacgagatggtgttaaaccttttatgacaggggctgcagaacaaatcaagcacatccttgctaatttcaaaaactaccagttctttattggtgaaaacatgaatccagatggcatggttgctctattggactaccgtgaggatggtgtgaccccatatatgattttctttaaggatggtttagaaatggaaaaatgttaacaaatgtggcaattattttggatctatcacctgtcatcataactggcttctgcttgtcatccacacaacaccaggacttaagacaaatgggactgatgtcatcttgagctcttcatttattttgactgtgatttatttggagtggaggcattgtttttaagaaaaacatgtcatgtaggttgtctaaaaataaaatgcatttaaactcatttgagagaatgcctttaagtttaatgcataatttaaagctaaattgatcctgtagctgtccctgggcagaagctagagcctgattgtgggctactactcatccaattaaccttctaccaggggacgactacttctgggactggagtataacacaagaattcaaggggttcttggattttgagctctgcactaaacgggaaaggaacatgcttcatagcagctgccacattcttgaatgtgtgaggccttacccttttatcacctacaaggagtccgttacttggcagaagatacccagagatcaagggctccttcgtggcaaaacactccaaagccaacgaaaaaaaaaacttttggggcgcccaagattcaaaattaggggggcccataacatttatccacaaactctccaggtgcc

SEQ ID NO: 722703 - DNA, 276 bp, Homo sapiens
ccccctccccgggtacgtgcacggacactcttggggtgtcctgcgttggctatctgaaaggaagttcttgtcgggtgattccttttggcagagcaggctttcagttgtttatggcacagtgaaatatattcttcaatgctatgtaattttgaactaaaaagtctgtttaaggcacatgtctcagggtgattattaaaaacacacacacacacacacacacagcgtttagtccaagaccaatgtccttcacatttagtttctgtcttcaagtactga

SEQ ID NO: 722704 - DNA, 586 bp, Homo sapiens
agcggcgtttttccgccgcgtcccccctccccccgagcgccgctccggctgcaccgcgctcgctccgagtttcaggctcgtgctaagctagcgccgtcgtcgtctcccttcagtcgccatcatgattatctaccgggacctcatcagccacgatgagatgttctccgacatctacaagatccgggagatcgcggacgggttgtgcctggaggtggaggggaagatggtcagtaggacagaaggtaacattgatgactcgctcattggtggaaatgcctccgctgaaggccccgagggcgaaggtaccgaaagcacagtaatcactggtgtcgatattgtcatgaaccatcacctgcaggaaacaagtttcacaaaagaagcctacaagaagtacatcaaagattacatgaaatcaatcaaagggaaacttgaagaacagagaccagaaagagtaaaatggcaataaatgcatatttatcaataattaccttcaatgtcaatggactgaatgttccaatcaaaagacactggatgaaaaaacaagagcctgcatatgctgtttaaaagaactcacggctctttcaat

SEQ ID NO: 722705 - DNA, 157 bp, Homo sapiens
gtggttctgtgctggtacatgtcaggtgcccagcctctgggccagtaactcagctactctttgtggctttcttcagggctttttttggtgggctgccacgcccatctttatcaccagaaagagtccacccagcacaagaacaccagcacaagaacca

SEQ ID NO: 722706 - DNA, 1525 bp, Homo sapiens
gagcccgagcagcgtgaagaacgaggcgagaacgacccccggaccgaccaaagcccgcgcgccgctgcactcccgcgtccagcacctacgctcccgcctgccgctcgccgccgcccaccactgcccaagcagaaacggctgcaacggggcactgctaacgggcagactaaacgcaaaggctgaaggacgaaccacagcagaacgactccgcgaggcttgtctgctaacacctgctcctccaacagccacgagcccaacgcctaacacaaggcccctgcaaagaagggcagcagaaggtacccaacagggcacacaacaggcgaaccagcctgactgctggccaggcaggggcaactaacccccttgccagcacaacatggcacgcactgtccaacacacccagacccagccccaccagcaaacgcctgcaacggctgcctgcgacgactgcccaacagctgcaacgctgctgctgccactttcttctgcactaaccctgctgctaacctctcctgggcctggacctggctaccacgctctctgacacacctaccctactttctctcaactccaaacgctctctctcctacacaccaaccttgccacgaaactcttccggctctcttagcgtttttcttctccctctctctctctttaacacaccgccctaactcgtctgtgctataacgccaccccacccacagacacccaccccttccactcggcgtcgcgcactcctcggggggcgcgcatacgcgcgggcccattaagtggctccaaccctacacctacccacccgtgtctccctccaaacaacgaccgtgcgcacctcgcacctctgctgccgcacgcacacaccaacaaccgttttctcccgcatttcaataaggcctctccgcgcaaccacgcaacctcccccctccctcggggcccttcccccgccgggacagcggaaccggccgaaacttcccccgctgggaacccttgtctggatcccccaccaacgtggcgccccacccccctttgggtcccccaaacacaacgcctccttggtcgggcgctaccccgacacacacacccgcacacaacttctgccctcaccaacacacccaccccactactaccaccgcctcacccaccccctcctcacgcccacctacgcactccaacacccccccctataaagcacccagcaaaaccacttctcgcttgcagaaccctggcaccccactcataccatctggcacacctcacggcggtctttcgcgccaccactgcgccactcccccaagcgactcccacgatgaatagtggcacctgtccacacagacgacagccgggctcccaagcttaacacaagggcgcgctctgccacaacactacggcacgagcccccaacaactaaccaccgtccgaaagacagagcccggcgccctcacgcaaacaaccggtctcaccacggccacctcgcacagccgacccccgcccacacaacagccactgcctcctactacacatcacctct

SEQ ID NO: 722707 - DNA, 564 bp, Homo sapiens
agcggcgtttttccgccgcgtcccccctccccccgagcgccgctccggctgcaccgcgctcgctccgagtttcaggctcgtgctaagctagcgccgtcgtcgtctcccttcagtcgccatcatgattatctaccgggacctcatcagccacgatgagatgttctccgacatctacaagatccgggagatcgcggacgggttgtgcctggaggtggaggggaagatggtcagtaggacagaaggtaacattgatgactcgctcattggtggaaatgcctccgctgaaggccccgagggcgaaggtaccgaaagcacagtaatcactggtgtcgatattgtcatgaaccatcttcccctccacctccaggcacaacccgtccgcgatctcccggatcttgtagatgtcggagaacatctcatcgtggctgatgaggtcccggtagataatcatgatggcgactgaagggagacgacgacggcgctagcttagcacgagcctgaaactcggagcgagcgcggtgcaccggagcggcgctcggggggagggggagcgggcggaaaagc

SEQ ID NO: 722708 - DNA, 251 bp, Homo sapiens
taagctgagcctgactcacacttcctaaactcctcggttcttcacacgggcaagcagaagctctttccctacacgggccggtaaccgtgcccaggacacagggctcttggccttggcttcttggtatcctatggctgtgacgggggtctgatcattaaattacatgacttttaaggccagggagctgggcacgggggctcacaccggtaattccagcacttggggaggctgaggcgggcggatcactggag

SEQ ID NO: 722709 - DNA, 576 bp, Homo sapiens
gctttttcgcaagcgtggtttgccgccagtaacacaggtgtcgtgaaaactacccctaaaagccaacatgggaaaggaagaagactcatatcaacattgtcgtcattggacacgtagaattgcgggccaagttccaccacatactggtccactcgtgagtctaatcaaatgcggtggcagtcgaacaaagagaaaaaaacaaaagaaaataaaaaaaaaaaaagatgtggttggaggcggccctgcggccccccggagaagaaacatttttgaagacccccttgtgcggtttggggccggcggggcccaaggagggttaaaggagacaaccgagtgcaaatgaggcgtgttccctaaggagaagactcggggcaagggcacttacgggggctgggggttcctccccaaatataataaacagccccgggcgggaaacaccggagagctggctctgaacacaactccaaaagaggggagaggtcacggaggcaccaaacaggggagccttatacacaccagggagttccacagaggcgagcaccagaataataaaatttaacgcgccgcggcgtgggg

SEQ ID NO: 722710 - DNA, 341 bp, Homo sapiens
tcttgtggagacgggctcatgcacttatctacacttggaggcacgcgggtgatacctgaggacaggagttgaaagcagccggcaacatgctgaaaccccatctgtacaaaaaatacaaaaactcagccaggtgtggtggtgggcgcctgcaatccaagccatccgggaggccgaggcaggtggaccatctgaggtcaagagttcaagaccagccaggccaacatggtgaaaccgtgtctctgctagaaatacaaaaaattagccgggcgtgctggcgggtgcctgtagtcccagctactcgggagggaggctgaggcaggagaatgacatgaacccaggag

SEQ ID NO: 722711 - DNA, 180 bp, Homo sapiens
tcccgtcgttactcaaccgaacatctaccgctcaccgaaaacatatcacacagtactcctagacttgacttctgtggtcaccaccactgagaccaggtcacacagtcctcccagcttcacttcttcgatcaccaccacagagatcacctcacacagtactcctgttcggttgagcggaga

SEQ ID NO: 722712 - DNA, 310 bp, Homo sapiens
  misc_feature (66)..(66): n is a, c, g, or t
cctagaggatcccccaacgctgctcacaacgcaaatgcttctaggcggactatgacttagctgcgnacaccctttctgacaaaacctaactgcgcagaaaacaagatgagatggcatggctttatttgttttttttgtttcgtttgggtttttttttttttctgggctggactcaggatttaaaaacgggaagggtgaaggtgacagcagtcggtgggagcgagcatcccccaaagttcacaagggggccgaggacttggatggcacatggtggttttttaaatagtcattccaaaggtgagcaggtggg

SEQ ID NO: 722713 - DNA, 106 bp, Homo sapiens
tatactcttcagccacagcatcaatcctacctccatcgctaacccactaaaacactcaccaagacctcaaggccctgagccccatgcctcaggacacgaatgttca

SEQ ID NO: 722714 - DNA, 726 bp, Homo sapiens
tacttctctattgtttagggcgtgctcggcctctgacagagatgtgggcagctggtcagtgatggccattcgggctcagcacagcaacgcagcccagactcagactgtgggaagcaaacaggggctgtgacagtgccaggagagcctgatcgagacagatgatcctgagatgtgggagtatgctgcagagggagaaggacaaggcagtgtcagtggcctggagctcattgcctcagagaacttctgcagcctgatgctgcagctggagtgccctggaggtcctgatctgaacaacaagtacatcggagggttatcctggacaagagatactatgggggagacagagtgtggtgtgatgaaataagagactgctagtgccagcagccgggaccttgagaagaccttagagcatggatacctgcacagataggggagtcaaatgtcacagcccctactaccgtggataccccagacaaacctgagagcgcactacaacagaccactacatgcaaacccatcaaaagaaccagagaaatcaatagagaagacatgagacactatgacaacagactggaagagtgcaccaatattcaacaccaacaggaataacaattgatcttagaacagtcaaagacggagattatcaagaccacagataacagtcatacatacggaagatctaaatgcgcctaataaagcgctcaaaccagaaaaatatggcctcat

SEQ ID NO: 722715 - DNA, 125 bp, Homo sapiens
gtatgacattaagcaaagtctctctcgtctgtacactaaatcaaaaagcagcagactgtagaagaatgcatggactaagagccccatggcacagatcgccagatacaacaagatgatagagggaa

SEQ ID NO: 722716 - DNA, 311 bp, Homo sapiens
tagagtcgcttgagcgggaacttgatcgtcactcaagaaatgtatctgacattttcaatcggattttcggtaatacggaggcaaggaatgcggaaaatccgacgataagcagtcaaaattcacctgatcctcagcacccgtacgtttttcagcaatcaggctcgaccgattacggtatcgaatcgttgcgagccatcagcccgcgtttggcagaggcggtttcgactcatcctgaactcggtaaaatcttatcagacctgccgctcaggcctcagaaacgtgattttcattctatcctttcggaagctgtc

SEQ ID NO: 722717 - DNA, 831 bp, Homo sapiens
  misc_feature (673)..(673): n is a, c, g, or t
ctcggtacccgcgaacatgcggcatgcggcaatgatataatacttttaactctcacggcaaattagtcacttgtcaagtccattgagagaccaatggagtcttgtttcatcattttatatcctgtataatttttttctaacttgagcgaagttttatactgtatttagttcaatattctacgttaaataaaaccagggagttcccgtcgtggcgcagtggttaacgaatccgactaggaaccatgaggttgcgggttcggtccctgcccttgctcagtgggttaacgatccggcgttgccgtgagctgtggtgtaggttgcagacgcggagttcccgtcgtggcgcagtggttaacgaatccgactaggaaccatgaggttgcgggttcggtccctgcccttgctcagtgggttaacgatccggcgttgccgtgagctgtggtgtaggttgcagacgctcggatcccgcgttgctgtggctctggcgtaggccggtggctacagctccgattcgacccctagcctgggaacctccatatgccgcgggagcggcccaagaaatagcaacaacaacaacaaaaaaacaaaaacaaaacaacaacctaaaaaaaaattttaaagtcaagagacaaattagccggttgctcttagatttagaaaagtctctggagtntccatgttgtggcgcagtggttaacgaatccgactagaaaccatgaggtttcggattccatcctggccttgctcagtgggttaaagatccggcattgccgtgagctgtggtgtaggttgcaacacggctcggatccataataaatttagggtgaaggg

SEQ ID NO: 722718 - DNA, 110 bp, Homo sapiens
caggacaccctgtgctgcatacctgatgagggctcttatcccaggctcctgctgccggccgccccaaactgctccccataggacagactgggacttgggtactgaaggat

SEQ ID NO: 722719 - DNA, 603 bp, Homo sapiens
  misc_feature (489)..(489): n is a, c, g, or t
  misc_feature (491)..(491): n is a, c, g, or t
tacttggtaaatggaagacaccttatgaagtatttaacttaatgctaataataaccctaagaggtaggtgctactattatgcccagtttacccatgaagaaatcaagacaaaagaggtcaactagtgagtcaactaacaaagttagtgtttgaagggctggctcaagagctccatgtttggcatcctcctttgggaaataaagaaaattaaagtgtggagttcccgtcgtggcgcagtggttaacgaatccgactaggaaccatgaggttgcgggttcggtccctgcccttgctcagtgggttaacgatccggcgttgccgtgagctgtggtgtaggttgcagacgcggctcggatcccgcgttgctgtggctctggcgtaggccggtggctacagctccgattcgacccctagcctgggaacctccatatgccgcgggagcggcccaagaaatagcaacaacaacaacaaaaaaacaaaaacaaaaananataaataaatttgtcacttagcttgtcatcagagagttctgcaagtttaatcttttgttaaaaacacagcttatcattaatacttcctgtgaaacggagcgtccacttaggc

SEQ ID NO: 722720 - DNA, 395 bp, Homo sapiens
ataacatcctttaaaatattcattaaagttttgctggaaaccagaaataccacttaacttctcagttgcataagctaataatataattctttatggctaatctgcctccggttgcattttctgctacttacaatgaagagaatactaaatataatgtcttttgaataagtctatattgtgatgtctttactgcatctataattgaatcctgccccattggaagcagttgtctgctatatgaatataaaatgccaagtctatggccttttgttttagatgtggcaagttatgtttagagatttcatataattgtgtctcaactgattttaaggtaaactaatttatgtgggagggggtgggtcacttgaggctaatttattttctagggaagtttt

SEQ ID NO: 722721 - DNA, 1686 bp, Homo sapiens
  misc_feature (207)..(207): n is a, c, g, or t
  misc_feature (362)..(362): n is a, c, g, or t
  misc_feature (928)..(928): n is a, c, g, or t
  misc_feature (1420)..(1420): n is a, c, g, or t
gcagaagggagcgcgcgttgtgtgccggctgccaggctaatacggaagactgctcactcgggacgagttggtagtgactagtgaggcttgtcgcgtggtccgactacgaacatatgtagtgcatagcgactgaggttatcctagtgacacacttcgtgatgccaatgaggagtagacgaggaggtcggtagaggctacggcgatagncgactccaactgctgtgctgcctaggttacagtagaagtctgacatcacattccacttcccctcgtattagaatattcactatttaatcattaaggtgctggtactcgctgtgcacgagtggcaggagtccatgttggacacctacaactttacncttcagaagatgtgcgtgcgttaagtatgggaccatgtggcaagcatatgaacgaccaaaatagggtgcccttgagcttgttgcatatattgtaggaggcgtaaagaatggagacaattgtatatgactttttatgaggaaaggatggccttgcgttatagggtgatagtccaaagaagggccagatattcgcataggggggatacgagcgaatgggcaatttcgctagtcaaagaacgaggacgtaagaagggtaaggatattaggggagggttggtgggggcataggcttatttagttggcaaagtaatgaccaaagatataccatccaaggagaaccttccagattccagtggggatacgcctttttcggaagagaaggctttcggcatattgttccgcctaaagttcaacgagcaaccgttgttgcaggcgctaaagcaaagctatatgacgcttatattacccaaacaccatggagcgcatagatttgggcggatgtgtgcgccatacctgtggcgctaattggtgtgggggcgcggtggccatttgccttgttcaaccgntaaaaatagggcggtgggatatatgtagacacgggatccaagggggaggggataacacaaaggtctatggccaatatgggctacatttttgcgagtgtcccactgggaatgggcccaatatttcccggttcctaccgaattaattgcccgttaccacccataccggagagggacaaattccccggcaacaattgctttggtggatttccgaccaaagacccaagtttccccccccggccggacaatagcggtgctcggcaagaaatggccagttggaatcttcgccatggatttactaaacttacgggcctttgggggtggacaagtgtgaaatctgcttcccctaacggggtgcagggaactattgtgccttgtggtccctaatgacatctgggccctcgggtagtgactgaccaccgttcgcctgtcagaaatttaccttttctgggggattatacccatcagggacacggtgaccaaccgtgggtgggnttaatctaaaagcgctcgggtggtatttggcccaggaagcaagccatttatgtgtgtagaggggcactaacaagttgtgtcggttcagggaaaataccccgcgagtgtttccacagcaccgattctgcgatggaacccagtttgtctgttttttgtgacagcactgatcggggaaactccgcgcgtgcgcgtactacctatgcaaagcgtgcaccgcacacaaaaatttataacacgagcgcgggcggggttacaccaatggtggg

SEQ ID NO: 722722 - DNA, 454 bp, Homo sapiens
  misc_feature (33)..(33): n is a, c, g, or t
  misc_feature (45)..(45): n is a, c, g, or t
  misc_feature (340)..(340): n is a, c, g, or t
  misc_feature (342)..(342): n is a, c, g, or t
accgcgaatatcggataacagatttgaagtgtnaaccaacatganaggagtatttaaaaggattgtgggagttcccgtcgtggcgcagtggttaacgaatccgactaggaaccatgaggttgcgggttcggtccctgcccttgctcagtgggttaacgatccggcgttgccgtgagctgtggtgtaggttgcagacgcggctcggatcccgcgttgctgtggctctggcgtaggccggtggctacagctccgattcgacccctagcctgggaacctccatatgccgcgggagcggcccaagaaatagcaacaacaacaacaaaaaaacaaaaacaaaaananataaataaatttgtcacttagcttgtcatcagagagttctgcaagtttaatcttttgttaaaaacacagcttatcattaatacttcctgtgaaacggagcgtccacttaggc

SEQ ID NO: 722723 - DNA, 580 bp, Homo sapiens
  misc_feature (422)..(422): n is a, c, g, or t
cagccaatatgtgccaggttgtaaaggggaatacatctgagacggtgagagggagaaaccattaagatgctgatcaggagttcccgtcgtggcgcagtggttaacgaatccgactaggaaccatgaggttgcgggttcggtccctgcccttgctcagtgggttaacgatccggcgttgccgtgagctgtggtgtaggttgcagacgctcggatcccgcgttgctgtggctctggcgtaggccggtggctacagctccgattcgacccctagcctgggaacctccatatgccgcgggagcggcccaagaaatagcaacaacaacaacaaaaaaacaaaaacaaaacaacaacctaaaaaaaaattttaaagtcaagagacaaattagccggttgctcttagatttagaaaagtctctggagtntccatgttgtggcgcagtggttaacgaatccgactagaaaccatgaggtttcggattccatcctggccttgctcagtgggttaaagatccggcattgccgtgagctgtggtgtaggttgcaacacggctcggatccataataaatttagggtgaaggg

SEQ ID NO: 722724 - DNA, 458 bp, Homo sapiens
actgttaattataatagctccattatgtgtatggctaccttggtagaacaatgccttctcccaccataactaaagtaaaaatgcttatggagcatgcacggtatgccaatgggtataccaggggaacaagcagctaaggtccctgccctcaaatggcaatgaggatatacactactaaacatataaaaacttgaggtggcaataagtgctatggaggaaaataaaataggaggggaggagagagacgatggctaaaggtcttgggtggtgccataaagcaacccacccatcaccctctacaaaatcccgcattgcaatcacaggaccacggggtggcacacagtgactctaagggggggcaacatagagtgattttgtcttcccttaatggacagatgcaaaacttttcaacaagctaaacacaggaaaaaaaaatcactctagggggtaccgagctc

SEQ ID NO: 722725 - DNA, 443 bp, Homo sapiens
  misc_feature (329)..(329): n is a, c, g, or t
  misc_feature (331)..(331): n is a, c, g, or t
taggtcggaccaggtggtgctcatcttagtgattctaatacaaaataaaataaaaaggagttcccgtcgtggcgcagtggttaacgaatccgactaggaaccatgaggttgcgggttcggtccctgcccttgctcagtgggttaacgatccggcgttgccgtgagctgtggtgtaggttgcagacgcggctcggatcccgcgttgctgtggctctggcgtaggccggtggctacagctccgattcgacccctagcctgggaacctccatatgccgcgggagcggcccaagaaatagcaacaacaacaacaaaaaaacaaaaacaaaaananataaataaatttgtcacttagcttgtcatcagagagttctgcaagtttaatcttttgttaaaaacacagcttatcattaatacttcctgtgaaacggagcgtccacttaggc

SEQ ID NO: 722726 - DNA, 410 bp, Homo sapiens
taccgggggatcatgctgtttatccgagaatacttatgaactatcaccactcaattaaaaagacagtccattttaaaaagtgggcaaattatttgagtaggtatttctctaagatatacaagtggccaagaagcacatgaaaagatgttcaatatcattagtgattagggaaatgcaaatcaaaatcatgagacaccacttcacattcattaggatggctactacgaaaaacacaatcatggaaaagtgttgccaaggacttggagaaattggaaccctcaaatgttgctgagaacaaaaaaaggtgcaccttcacacaaaagcactttggaaaacagttgggcatttcctcaaaaagttaaatacagagttaccatataacccagcaattccactcctaatgataaacg

SEQ ID NO: 722727 - DNA, 656 bp, Homo sapiens
  misc_feature (498)..(498): n is a, c, g, or t
cgatgaagctgatggctatactagatgatctactgagctctgagtagaaaaatatatatctagatagagagatcgatagatattgtttttatagtgatatggtaatacagtagtactggtttagcaattgcatattaatttaatagtatgtgggagttcccgtcgtggcgcagtggttaacgaatccgactaggaaccatgaggttgcgggttcggtccctgcccttgctcagtgggttaacgatccggcgttgccgtgagctgtggtgtaggttgcagacgctcggatcccgcgttgctgtggctctggcgtaggccggtggctacagctccgattcgacccctagcctgggaacctccatatgccgcgggagcggcccaagaaatagcaacaacaacaacaaaaaaacaaaaacaaaacaacaacctaaaaaaaaattttaaagtcaagagacaaattagccggttgctcttagatttagaaaagtctctggagtntccatgttgtggcgcagtggttaacgaatccgactagaaaccatgaggtttcggattccatcctggccttgctcagtgggttaaagatccggcattgccgtgagctgtggtgtaggttgcaacacggctcggatccataataaatttagggtgaaggg

SEQ ID NO: 722728 - DNA, 91 bp, Homo sapiens
tggttgtcatgtgatgggtccctccaggttactaaagggtgcatgtccctgcttgaacactgaagggcaggtggtgggccatggcaatggt

SEQ ID NO: 722729 - DNA, 757 bp, Homo sapiens
  misc_feature (599)..(599): n is a, c, g, or t
cacaaaaacgggaagcacagattataattttcagatgagaaaactgaaacccaggaaaataagtcacttgtccaaggacacaaagtagtgtttaagcctagacttcaaagccattaagggtttgttacctctctgccctgaattgggatttcccagacccatacaatttcatttgaaaaataataataaaattatgaaccaatttaccaactctttatttcactgccaataactcaaatataaagtacatgctggagttcccgtcgtggcgcagtggttaacgaatccgactaggaaccatgaggttgcgggttcggtccctgcccttgctcagtgggttaacgatccggcgttgccgtgagctgtggtgtaggttgcagacgctcggatcccgcgttgctgtggctctggcgtaggccggtggctacagctccgattcgacccctagcctgggaacctccatatgccgcgggagcggcccaagaaatagcaacaacaacaacaaaaaaacaaaaacaaaacaacaacctaaaaaaaaattttaaagtcaagagacaaattagccggttgctcttagatttagaaaagtctctggagtntccatgttgtggcgcagtggttaacgaatccgactagaaaccatgaggtttcggattccatcctggccttgctcagtgggttaaagatccggcattgccgtgagctgtggtgtaggttgcaacacggctcggatccataataaatttagggtgaaggg

SEQ ID NO: 722730 - DNA, 565 bp, Homo sapiens
  misc_feature (407)..(407): n is a, c, g, or t
acaccatctagacttcaaagaggggttgagatctagaccaccattaagaaaagtaatgtagggagttcccgtcgtggcgcagtggttaacgaatccgactaggaaccatgaggttgcgggttcggtccctgcccttgctcagtgggttaacgatccggcgttgccgtgagctgtggtgtaggttgcagacgctcggatcccgcgttgctgtggctctggcgtaggccggtggctacagctccgattcgacccctagcctgggaacctccatatgccgcgggagcggcccaagaaatagcaacaacaacaacaaaaaaacaaaaacaaaacaacaacctaaaaaaaaattttaaagtcaagagacaaattagccggttgctcttagatttagaaaagtctctggagtntccatgttgtggcgcagtggttaacgaatccgactagaaaccatgaggtttcggattccatcctggccttgctcagtgggttaaagatccggcattgccgtgagctgtggtgtaggttgcaacacggctcggatccataataaatttagggtgaaggg

SEQ ID NO: 722731 - DNA, 630 bp, Homo sapiens
  misc_feature (472)..(472): n is a, c, g, or t
taattagtgagcactccagtatttcaagggagtttgaccataacctgatatatcatatccagtgattgctaagtaattaagcatttagaattctgctctctaattttgttacaaaaagagtgttttggagttcccgtcgtggcgcagtggttaacgaatccgactaggaaccatgaggttgcgggttcggtccctgcccttgctcagtgggttaacgatccggcgttgccgtgagctgtggtgtaggttgcagacgctcggatcccgcgttgctgtggctctggcgtaggccggtggctacagctccgattcgacccctagcctgggaacctccatatgccgcgggagcggcccaagaaatagcaacaacaacaacaaaaaaacaaaaacaaaacaacaacctaaaaaaaaattttaaagtcaagagacaaattagccggttgctcttagatttagaaaagtctctggagtntccatgttgtggcgcagtggttaacgaatccgactagaaaccatgaggtttcggattccatcctggccttgctcagtgggttaaagatccggcattgccgtgagctgtggtgtaggttgcaacacggctcggatccataataaatttagggtgaaggg

SEQ ID NO: 722732 - DNA, 328 bp, Homo sapiens
agtggtgagaccagccgaggcaacacagcaagagccatgtctttacaacaagaatacaaaaattagccaggtgaggtggtgcaagcctgtagttccagctactcgggaggctgatggtaggaggatcagtttaggcccgggagcttgaggctgcagtgagctgtgatcgtgtcactgggtgacagggcgaaatcctgtctcaaaaaaaaaaaaggcaaactggtattcctgggacaatttggatataaaaagtaaagcaggcatatgggttaagtaacttcattggctagaccttctctccggtttatgtttccactgggaggcccca

SEQ ID NO: 722733 - DNA, 323 bp, Homo sapiens
actctcgaggatccccatttcttattatcttgtatgatgcactgaccaatgaagcttgttttattttttctttaatctttgcttttcaatttgaattatttctgttgacgtatcttcaaatttgctaattttttttccgaattatttgataagctatgaatcttacaaaatggattttaaaattttggatactaaacttttcaattctagactctttttggttctgtttctagtttcaatttctctgctgagattttccatctatttactccttatgttcttttccattaaatgcatacaatatgtacaataattccgggtac

SEQ ID NO: 722734 - DNA, 742 bp, Homo sapiens
caccctagtaggctcccttcccctattcatcgcgctaatttacagtcacaacaccctaggctcagccaagacattctactactcactctcacgtgcccagggagagtatcaaattgcctgagccaacaaggttaatatgactagctggacacaatagcttttagtagtaaagatacctcgtttacggacgtccacttatgactccctaagagcccatgtcggaagcccccatcgctgggtcaatagtgacttgcccgcgagtactcttaggaactaggcggctatggtataagtacgcctacacagcgtcagttctgcaactcccctgaggaaaaacagcatagcctatccccttccttgtgctatccctatgaggcataattataacaagctccatctgcctgatccgacaaacagagcctaaaagtcgtctgcattgcgtactcttcaatcagccacatagccctcgtagtgaacagccattctcatccaataccccctgaagcttcaccggcgcagtcgattctcataatcgcccacggacttacgattcctcataacttattctgcctagcagaggtcgtaaactaggaacgcgtgcgcagtcgcatcataatccgctctcgaaggagctcaaaggctactcccactaatagctttcgatgactgccagcaagctcggaactcggctgaaccccaatatttactaatgggagaacgcctgggtgagaaccacggcctg

SEQ ID NO: 722735 - DNA, 575 bp, Homo sapiens
  misc_feature (417)..(417): n is a, c, g, or t
ctcctctatagtgggtggctgctgtacctctggatttcttttgggtcttgtacttgattagaacttaaagtggagttcccgtcgtggcgcagtggttaacgaatccgactaggaaccatgaggttgcgggttcggtccctgcccttgctcagtgggttaacgatccggcgttgccgtgagctgtggtgtaggttgcagacgctcggatcccgcgttgctgtggctctggcgtaggccggtggctacagctccgattcgacccctagcctgggaacctccatatgccgcgggagcggcccaagaaatagcaacaacaacaacaaaaaaacaaaaacaaaacaacaacctaaaaaaaaattttaaagtcaagagacaaattagccggttgctcttagatttagaaaagtctctggagtntccatgttgtggcgcagtggttaacgaatccgactagaaaccatgaggtttcggattccatcctggccttgctcagtgggttaaagatccggcattgccgtgagctgtggtgtaggttgcaacacggctcggatccataataaatttagggtgaaggg

SEQ ID NO: 722736 - DNA, 370 bp, Homo sapiens
atgaaaaattgttgagatacggttatcgggtgcccggctagctcagtcggtagagcatgagactcttaatctcagggtcgtgggttcgagccccacgttgggcggcaactggtcgttttagtcctaaatctacgactactagccatacctaaaaatataagtagaccagctcttaggaaaataatctgctctgaagtcttgcatttctgtgtgtgtaatactcttgcgggcgctccactgttcattatctacccattatcttgcgatacaattaggatttaaagctgtggtaaaatatgcccaacaaaatttaacactttttaactgtacagttctgtagcattaaatacatttaaatggttgtgcatca

SEQ ID NO: 722737 - DNA, 107 bp, Homo sapiens
tctcgagggtggctcgtcgcgcggctctttgggtggcgcatgtgggtgtgctcttggtggaggccatctatccttaatactacacaaacgcagccgagtgtaccaga

SEQ ID NO: 722738 - DNA, 267 bp, Homo sapiens
ccacgatattctggtcaccctgtgatgtctgtgaagagcctgctgaccagaactgtatatagtctccattgtcttgcttgggatttgagaatgaaaatcagagagggaagatctggtatttcgtggcctaaattccccttgtggcgtgacagtggagatgctgcagttccaaaagagaaggtttcttccagagtcatctacctgagtcctgaagctccctgtcctgaaagccacagacaatatggtcccaaatgagcgaatatcgtg

SEQ ID NO: 722739 - DNA, 502 bp, Homo sapiens
ctcatgtacgtcaatataatgctatcaaaaaccatctgcacttctaggaatactaatatgtcgctcacacctcatatcctccctatatgcctaaaaggcaataatactatcgctgttcattgatagctactctcataagcctcaacagccactccctcttagcgcaatattgtgcctattgccatagctagtctttgccgcctgggaaggcaggcggtgggcctagccgcgtactagtctcaatctccaagagatatggcctagactacgtacataagctaaacctagctccaagtgctaaaactaatcgtcccaacaattatattactaccactgacatgactttccaaaaaaacacataagttggaatcaacgaggaacacccacaggctaattattagcatcatccccctactattgtgggaaccaaatcaacaacaacctatagagctgttccccaagctttttcctccgaacccctaaaaggccccctcctagtata

SEQ ID NO: 722740 - DNA, 780 bp, Homo sapiens
tgtgactattctccaactacaggtctggagatggagtcctgacacgggaacctttttacccgctgggctgcaatgcaatggcaaggaaaaggccaacgccatcatggaggaggttatgagcctgctgcagcccctaagtatcactcaagacctgagccatggacaatggacagacatcaacttttgaatccaagctggagtgcctgtagccagtctacttgacgacttatacaagcatttcttcttccatcactcccactgagacaccatgactgtcatggatccatagcaaatgattggtgctgatgctgattgtgctgctgccactgatgatgatgcagacatggaaaaaatgctgtctatgtcctagaaacacgtggaaagaaacgtttccatgcttctggcatggaatgctgtgtctgcaactatggaaaacttctcttcacataacaattacatccaatacatcttaaaggcacaactctatttcatgcttgctgaagtaccaatattgatactttccaaactctctgattctatgaggaggaatcattgtcccctgcctactaacacatagaattaacatatgggaggtgatacagcgggggcatttctttatatcacctcttaaacacatttgccgcactttagaagtaaacactgaaaaaatcttgtgacgatcggccagcaaaggccagaacccgtaaaagggccggttgctggagttttccaaagctccgcccccataaaaacttattccctaggggctatttcttttag

SEQ ID NO: 722741 - DNA, 770 bp, Homo sapiens
aagcaggggtatcaactgcagagtgcccattacggccggggcagacactgagcttcagactgcctcggctccagcggcatggcgccctccaggaagttgcttcgttgggtggaataccggaagatgaacggtcgggaacgcatgagtctggcgggagctcattcgggtacgtctcgaaccggctgggcaagggtgccgcgtccgacaacgcgaggttggtatatgtcgcttcgcgcccctactgcctaattagtccgatcttccgtcccggggcaagaccgcctaagattcaccaggattgctgtgtggttgggcaggaactcgctcacaaaagctgacttaatgtgggctgttatacctgggggaagatcagccctggcgtagagtgcaaagacgggcggagccaggtgggtggtcctgggggtcaaatcgagagagaaaggcatgtcgtgtggtgtgagtcagatgatcgggattgggccataactggggcccattggcctctggaagagggactcggagtactcgcctgcattggggagaagctagcatgaaaagggaagctggcatcactgagaaggtggtgttccgagcagacaaaggtcatcgcagattacaccgggaaggactggagcaaggtcggtcctggctatgagcctgtggttgggccattgggttactggcacggagtggaacaccccaacagggccagggacgttaaacgagaaagccgaggatgggtgaagtccaccgtctctgatgccggggtc

SEQ ID NO: 722742 - DNA, 304 bp, Homo sapiens
cagggagcccgactgtccgttatgcaggagtcttgagccctttatctcctttaggcccggcatgtcagtcaggaatcggggaaccttctctccttttattcaggaggcctgacaacccggtggtgcctgtgctcaggggaccctagctcagggggctattctcgaactctgagacccacgagcctgcaatcagagtccgttcactctgatccctgagccagggtccgattgttcatgtttcaggacgctgtaccaatgtccctctcccggtgtgcagatgcgggagactggaacttgagtccgt

SEQ ID NO: 722743 - DNA, 763 bp, Homo sapiens
  misc_feature (54)..(54): n is a, c, g, or t
  misc_feature (65)..(65): n is a, c, g, or t
  misc_feature (108)..(108): n is a, c, g, or t
  misc_feature (117)..(117): n is a, c, g, or t
  misc_feature (141)..(141): n is a, c, g, or t
  misc_feature (151)..(151): n is a, c, g, or t
  misc_feature (162)..(163): n is a, c, g, or t
  misc_feature (221)..(221): n is a, c, g, or t
  misc_feature (228)..(228): n is a, c, g, or t
  misc_feature (255)..(255): n is a, c, g, or t
  misc_feature (297)..(297): n is a, c, g, or t
  misc_feature (304)..(304): n is a, c, g, or t
  misc_feature (314)..(314): n is a, c, g, or t
  misc_feature (338)..(338): n is a, c, g, or t
  misc_feature (495)..(495): n is a, c, g, or t
  misc_feature (500)..(500): n is a, c, g, or t
  misc_feature (508)..(508): n is a, c, g, or t
  misc_feature (528)..(528): n is a, c, g, or t
  misc_feature (605)..(605): n is a, c, g, or t
  misc_feature (671)..(671): n is a, c, g, or t
  misc_feature (683)..(684): n is a, c, g, or t
  misc_feature (707)..(707): n is a, c, g, or t
aattaatatttaaattttataatataaataacagtataaccttttactagtaanaatataaacgnttaaagaggctctttgtaattcatttatacaaattcacaaacngtccaattnattgataaaggtctctgggtttcnttaaccccanggtcttgcatnnggcagtggaagggtatactaaagaaataacaacaaaaatcacaacgaaaatgatacantcctacnccacgaagtgatctcactctctcaaanccacaagatacccaacccccaccaaacagaaagaaagtacancctaatnccccccattnaagcaaacggaattttttaaaacnaacaaactacccatttaagttaatagcaacagagataaagcatcatggggctctccatccacagccccaggtggccctggcaggccagaccctagcccctcgtttccccacaggaagccgcgctggtagtcgaccttttgggggggaaactgggaanagggncgagggtnagggcagcatttcgcaaaanaaaacaccatttccaagacacaacacggcttcaccaacacaaaacaacggtccaacccgcatggcccccacaaattngggcaaaaaatcacagattcagaaagaggaccgcaaaacccaaagaacaaggagaaaaaggaaatnagagccagatgnnggaatgggggcacacaggacggnaggaggcagggaagaagccaacacaaaaagacggacaaacccaagggcatctttcc

SEQ ID NO: 722744 - DNA, 568 bp, Homo sapiens
caacgatggtcctcatgcttttccggtccctggctttacaggtactagggtctctggattcagtctccagaattgctggtttcctggttgtctgctccaagcctaagtgtttcttttccccactctccactgtgccaggccgcacatctcttgtctctctgctttcttgcttccaaatggtttttttttttttttttttggaaaaagtttctctctggtcgcccaggcgggagtgtaggggcgcgatctcggctcacggcaacctccgccttacgggtggaagcgattctcctgcctcagcctcccgagtagcggggactacgggcgtgtgccatcacacccagttaattttttattttaagtagagatggagcttcaccatgtgggccaggcgggtctcaaactctggacctctagtgatccgccggtttgggcctcccaaggggtggaaattacgggcatgagccaccacgcccagcgcatttattcttacagaaaattgggggccatgcagaagatgggaaccagagggagcagagaaatctcagaccgggtgattccataggtt

SEQ ID NO: 722745 - DNA, 165 bp, Homo sapiens
tctacctgaagcaactctgctcttccgtcagctcaaagcacaaggaggtcagcccaggaggaggccagctgcaattgtggagacacggtccccccccccaaacccacctcatgcacaccgccaaccccttgccccaggagcgggctctaggcaggtcccctagga

SEQ ID NO: 722746 - DNA, 165 bp, Homo sapiens
attcccttatgcatttcttgcagggcaagtctaattgtaataaactccctcagcttttgttttatctgagaatgtcttgatttctcccctatttttgatggataatcttgccagatacatgaatttttgggaacagtatttttctttcagcacttaaatatgtca

SEQ ID NO: 722747 - DNA, 1091 bp, Homo sapiens
  misc_feature (259)..(259): n is a, c, g, or t
  misc_feature (1066)..(1066): n is a, c, g, or t
tcccgggacatgcagtgtaatatcgtgctacgtagtgtagtagtagtagtagtagtagtagtagtagtagtagtagtagtagtagtagtagtagtagtagtagtagtagtagtagtatgagtagtagtagtatgagtatgtagagtagagtactattagattaggttatcatatatttcttataccttagtcttttatcttgttcacggcttaattatgtgttaccatctcgctctttaatttacgttcctctttatcnttgtaatcacgtatattcatcatctgcaaattagttatcatatctttcacttctatgtttccatattatttcatttttttctactattatctgttttatctctgtggactcttttcttctcctcgattctttatctctcttattgtcatcgatctcgtttacatcattcaatatttctctccttgtttacttcttcttacatctttatctatatgtatcacattattcctacttatcatctcttagtaatactacctttttatgatcttctataatctcttgtaaatatcattcttcaattctaagacatttattctcacacttaactgatctaatagttaattgtatatattgtttataatttttttatacatcgctattaaagatatatactcttctttattcacctcaatttctattttatgatcctgtatacactatctttactatatcatttatatcactcatttgttgattaataactcaattcactcatgatattacttactcataatgtttgactattctacatacactttgtttattcaccttcatatcttattatctagatcctattgtctttactgtgtattcttaacatctaacttgttacttactctacatcactattttgtatactttatactcttaattacatcattacattattatattccttgctactacatctggtttctattctcctcctcttctctctctctatccccgtctctatactatattactcctactcatcactccttttatatatttagattactactactttaacttaattatgatacntatcatactcctgtctatgatctct

SEQ ID NO: 722748 - DNA, 363 bp, Homo sapiens
ctcccttgtgagacacatcaaagggaaaccttccttggctcttcctggcttctggtggttgttggcaatcctcggcgttcctgggctgcagctgcatccctccagtctccgcctctgtcatcacctgtcattctcactgtgtgtctgtgtctgcacatggctgtcttccctcttcttataaggacaccagatatattggactaaggacccaccctacttcaatgtgacctcatcttaaactaattacatctgcaacagccctacttccaaataaggtcaaattcagtgggtactggcaggggtcagggactttcagctttactttttgggggggttacaattccaaaccattcacagctacct

SEQ ID NO: 722749 - DNA, 109 bp, Homo sapiens
  misc_feature (96)..(96): n is a, c, g, or t
tatcgatgccacacacattatattatatatgtgtgtggtatccaaggaatcacttttatgagggctaaagataaagaagttggccagaaaatgcangccatccttgtgt

SEQ ID NO: 722750 - DNA, 1965 bp, Homo sapiens
  misc_feature (501)..(501): n is a, c, g, or t
  misc_feature (609)..(609): n is a, c, g, or t
  misc_feature (685)..(686): n is a, c, g, or t
ggctgctccgcgccgggattatgggatctcgcagctcgcatgcgccgtgtagccgtcgccaccgcgcagtccgtgcgccctcggtggcgtacccggccgcgctccatccccgccgcggcacgggcgcgctcgtgcgcccggacagtgtcccgctgcggtccgcggtgatggccaccaagatcgacaaagatggcttgccgggcgggtacaacctggtgcgcgacgacggctcggccgtcatctgggtgacttttaaatatgacggctccaccatcgtccccggcgagcagggagcggagtaccagcacttcatccagcagtgcacagatgacgtccggttgtttgccttcgtgcgcttcaccaccgggatgccatgagcaagaggtccaagtttgccctcatcacgtggatcggtgagaacgtcagcgggctgcagcgcgccaaaaccgggacggacaagaccctggtgaaggaggtcgtacagaatttcgctaaggagtntgtgatcagtgatcggaaggagctggaggaagatttcatcaagagcgagctgaagaaggcggggggagccaattacgacgcccagacggagtaaccccagcccccgcncacaccaacccttgccaaagtcatctgcctgctccccgggggagaggaccgccggcctcagctactagcccaccanncccaccagggacgcaaacagcaagccactgacgcaggcagccgccccgcccaccctgctgctccaccacgccccacaccctatacccgactctccccttcagcaaccccctgcccccgcgctcccctcatctctccactgccaccgccctccacttcgcaacaacccatccctctcacccctctactgcaatccctcccacatcctactctcacacatacttgtccctacaccaccctcccatccatcatcctaacacacaccgctcctcccttcacaccacgccaccaaccacacgctcccactccccaccccggcattcggccccccccggcgccttcccccccttgcccccctatcgacccactacttccgcacgccccacttccccccgcccgcgcgccttggccccccttccccccttcgcccccccccccccgccacatccccccccttccttcccttccccccccttcgcggcccccccgaacttccatccccgcccctcaccctttcctctccccgccccacacccggccccccgcgcgcaaccccgtcgcacagggcgccgcactccccctttcgggcccccgccccctcacaacgcgctcctgcgcccacccggccgacactttccccctctggggccgcgcagtttccggccgccaacgccgccctgtttccgccgccacgcccgcggctttttcaccgggggcgcctcactccttgtacctagcgcccccctcctcacgcgtgcgtaaaacggcgcggccccacccccccacagcgcaggcggcgtccgcgcctccgcccgccgttgtgtcagcaccgtatctcgccgccacccagctccctcggcgcccccgctccaccgcaacatctactccccccgccatctcgcagcaagagcggcagccgttcagctcatcctacactcgctcactccccggcatcatatggtgcggccgggtccccgccccgccgcgatttcgcccccccgcgcattctgctctcaccacccagtcattcgggctctcctggcgcgactttcaccgaccccgccccgcgaagcgctcctcctgttgcgaccaacactcgcaccacggcagcgccatgtctcccccatacgccagggccgccccccacgcacctgcttgctgcgcgcgcggccgcgcgcacccgcgccccatcacacctgctgtccgtcgcgcgcaacaaagggctcgccccccctgcctatgccgaccctcctcgtgcgggccccctccgcctcccccagg

SEQ ID NO: 722751 - DNA, 2012 bp, Homo sapiens
  misc_feature (229)..(229): n is a, c, g, or t
  misc_feature (1309)..(1309): n is a, c, g, or t
  misc_feature (1701)..(1701): n is a, c, g, or t
gcagatgtgtgtgctggcaccgtggaggtgattgatcctcactcatcgattggactgactctggttgcgcttcggaaggtgggaggttgtgtgctgtcgctagattgccttcctggatctgactagtattggatgggctactccgttgtcgtgcctggtttgcttgtgggttgcctctccgctctccgtgctgtgatgcactgcatgagtgatggatgtcgcgcttgcnctgtgttatcttcgccctcgcttggatgtgttgtccgcgcgcttcgtgagtatgatggagttttgttctgctgttgggtcgagtggacttgttttgatgggctggtgagtgttctctccagctcagctttgtacagttatgtgttgctcttcgatgagcattggttttcgtgtggcgtgagaagatttgtgcttgtttggtggtggtatatcgctcacgatcctcgctgcttgtgttgtttgttccctgaccggtgtgttgatgtggtgtgtttgattgttttgtccctcgctccgtgtggttcgtagatttgggtgcgtccaacttgatgggagcggcgtcaatctacatttatgggaaggacgtcccaccgatgattttggttggggcgtgcgtggagaatatgtgtgtttgtgtgtggttgatgtggtctctgacccccctcgttttgtctctctcttgggtgataccgtcggtcgatcctactgaattagttggtgggtgtggttgttggcttcatattattgagccgctcccgctatctgcttcttgtgtgtactagctatggtttggtggacgacaccgactgagtttaggatccacccctgcttggttgtgactcatcgaggggggggtgccgactccacgtttggtttgtctgcgtccctccctcctcctggtgggttggtgacacccctctatcgtagtggtctttctcggcggagaagaggtttgtcttgtgctggggaatgatgatcctcccggcgtgtgctcgatgagtgtggcgggcattgtgtggtgtatcctgctcctgcatccgtccagcatgtggggggcccaccctctgtgctctgtcggatgcctgctctgcggtgtggtcgaacggcgccttctgcttgtgtaggtggttcgccttcgtccactccttcctctgtggggtgttgttcctttttgtcgtcgtccacctacaggggacctttttgcttctcctctgctgagggaaggagccctcaacggagaagttgttgtgtgaagacgccccacttgctgggagaggcgataccccacggtggggcgccncagctcgtcactcttgtgttctccccaccacagggaggctctcgggccccccacatagagtagagattgggacgagaccaacttgtgtctctctgaagactctctcgctcactcttgtgtgttgctgcgtccccgctctttgggggcgcacaccacccacgctctcgacacacacagtggcgcctcataagagatgtgtgtgtgcgcacacaaacactctcttattgaggtccacacgaggagtgtcttttgtactctctggaacagaggtgccacatctcgcacacaatgtggatacctggtgtttgtgcacacactttaaagacacacactccaaggtagaataagaggccgagggtctcaataatggaatagatattgttaattacacncagatgtctctgtgtgtggttgtgtacactctctctctgtaatacaccagaccctgccatatcccgtgggtaccaagagccaggggtgaacatctcatccataatttgggaggacatccatggcaccagaaacaccagaatattgaagattactatccccaacacccacccccttgtacactttgtgaccgacgcctaagagaataaatgtgttttaaacccccttccctttctgtggcttttaatttggagattttcccctgtgtaagacctttggactgagaaattggggaaacccaaattactccccc

SEQ ID NO: 722752 - DNA, 1861 bp, Homo sapiens
  misc_feature (501)..(501): n is a, c, g, or t
  misc_feature (609)..(609): n is a, c, g, or t
  misc_feature (685)..(686): n is a, c, g, or t
ggctgctccgcgccgggattatgggatctcgcagctcgcatgcgccgtgtagccgtcgccaccgcgcagtccgtgcgccctcggtggcgtacccggccgcgctccatccccgccgcggcacgggcgcgctcgtgcgcccggacagtgtcccgctgcggtccgcggtgatggccaccaagatcgacaaagatggcttgccgggcgggtacaacctggtgcgcgacgacggctcggccgtcatctgggtgacttttaaatatgacggctccaccatcgtccccggcgagcagggagcggagtaccagcacttcatccagcagtgcacagatgacgtccggttgtttgccttcgtgcgcttcaccaccgggatgccatgagcaagaggtccaagtttgccctcatcacgtggatcggtgagaacgtcagcgggctgcagcgcgccaaaaccgggacggacaagaccctggtgaaggaggtcgtacagaatttcgctaaggagtntgtgatcagtgatcggaaggagctggaggaagatttcatcaagagcgagctgaagaaggcggggggagccaattacgacgcccagacggagtaaccccagcccccgcncacaccaacccttgccaaagtcatctgcctgctccccgggggagaggaccgccggcctcagctactagcccaccanncccaccagggagaagagaagccagtgagatggcagcgcccgacaaacatgtgtccacaagacccacaccattcccgcgttcccattagaacccatgccgtgtccatatctcatgacgctcatggaagcctcatttctttgaatcttcatttatactataactcacccctcatattcaaggttctaaagaagaagtcatttagatgcaaggtcctgccatgccatcagatccgaggtgcctccctgcaagtgacccctttaccctgcgcattactcattccacagcgacgaggtctgcctagtgagactcatggcaatgaaccatcacagttcgctcttccaagaaggccccggggcacattataatagggcaaatcctaagattaaaccatggagccacatgattatctggtgataccaaatggacgggggcacagccttgggaccagtgaagctggtgacaccgagtgacatgtcaagcacctacaagtagaggcagcacagcgtaccagttacccctaactaaagggcaccagaaacctccgtggaagtactgaccacagggggcatacccgtcattggcacacgcgtccagtaccgggaggtggacacaaagaatgccatggtacaggacaataaggcacgagcattgcacccggagtggggacaaaaagcggaaagagaacccgagggtaccaagcacaggaacgcacagacaggaagaacaacaagtacgggctacaaaaacataaacccaggagagaagcggaaacaggaaagaacggaggacaggaaaaccaagcatggtaccacagcaaactgaaccagaagatagcgtaggtagacacacaaaaagtggcacgggacattgagagcccagcagtggccggagagggagaactacacgaggggacaaccacggggccgccagaactcggccaagctactgtagggagtgaaagcacagcgaggagcgaaggaaaatacacgacacagcgagagagacccagtaggacacagcacacggtacaacacacaggacaggtgggcacgagatatggaagccgataagtagaagacagagaaaacacaaagacgcataccggacgcaccaccgcgtgtattagccaggcgaacgacatatctgcccgcagcgcccaaccgacttatggagca

SEQ ID NO: 722753 - DNA, 365 bp, Homo sapiens
tttttgggggggggcccccccccccccccccccccaaatttttttttgtggtttttttccccccccccccccccccttaaaaattttttttttttagggggggtaaaaacccccccccccccccccccggggggggaagggggggtttttttaccccccccccccccccttttttttttttttttttttcccccggggcccccccccccggttttttttttagggggggtttttaaccccccaaggggggggtcccgggggtttttttttttttgtttttttcccccgggtttttttttttggggggccccccccccaaaaaaaaaattccctttttttcttggtttttttttttttggggggga

SEQ ID NO: 722754 - DNA, 965 bp, Homo sapiens
gctccgtctgccgctgctcacagtggtactgcctgtgcgttgtcaccggtgactctcgcattgttgcggttagtgtgtgaccgcgacgggtgactgtcgggctagtgctcagccagttcttgtcgcgtgtctggccacttgcgggccgccctagtccccccgcgagccgggggtgcctcgcggtggttttccggtgactcctgtgctatggcgcgccggctttccctctgtttgggtgcccccgcgcgtgacccatgtgcagtactatcctgctgcggcgcttgcgaggtgtgtttgcgccctctgtttgtgaaacccgggtcgtggtgcccctcattcttcgtgcattttttggtaggcccccccctgcgtattaacgggtccgggacaaccaccccgatctggtagagggtcttgtcctcgagttgaccaaccactgtgggagaccactttccgcgtcgtcatatcggacagcaacctcgctctccggctggggattctccctaacccaggtggtcactcaaatgcctggtgctgaatgcatttgcacacacgtccacctcacgtatctgtccccgccgatcatgcttcacgagacgctgctttgagtggattattctaagtgcccattaccacgccccaccgccgctatgtgaccacgcgggggggcgaagaacgaacgggcctatacaaacgagggtgtgtctcaatcgccgctcctctacagcgtcaatatgatcagaagacgtgcgtatgtgattatccaggagctgaatgtctcaaccctctctaaagaagcaagagtgaacaagtatttgggggcacccgctgcggtttttttttgttccgtatggcgcactttattgatatgagttttttcaaaccccatttgtttggaggcctagtgtccccgacatttgtccccagatgtcgggacccctttcaaaaaatataatgggacaaaa

SEQ ID NO: 722755 - DNA, 392 bp, Homo sapiens
caggttatgactcggtccggaccggtcccctgctgcgtcgcccgggaatgctggccagccacatgagtgccctcagccagtcccagctcatctcgcacatgggcattcggagcaggatcgcccacagctccccatcaccggcggggagcaagtgagcgaccccctgtccctccagctccactcatgaagaggagttggaagtgcatttcaagatctcgggagaaagaagaccttaaaccgacccaggaaaaacggcccagaacccgaggacgagaacccagaaagaccccaatgagccgcacaagcctgtgtcggcctgcgcactcttgttcagagacactcaggccgacatcatgggtcagaaccccagggccactttcggtgacgtgttc

SEQ ID NO: 722756 - DNA, 584 bp, Homo sapiens
  misc_feature (426)..(426): n is a, c, g, or t
cctccaggctcccccagaccacctatttctgttattacttgaatggaattgttgggcccttgtttttaaaagcaggttcaggagttcccgtcgtggcgcagtggttaacgaatccgactaggaaccatgaggttgcgggttcggtccctgcccttgctcagtgggttaacgatccggcgttgccgtgagctgtggtgtaggttgcagacgctcggatcccgcgttgctgtggctctggcgtaggccggtggctacagctccgattcgacccctagcctgggaacctccatatgccgcgggagcggcccaagaaatagcaacaacaacaacaaaaaaacaaaaacaaaacaacaacctaaaaaaaaattttaaagtcaagagacaaattagccggttgctcttagatttagaaaagtctctggagtntccatgttgtggcgcagtggttaacgaatccgactagaaaccatgaggtttcggattccatcctggccttgctcagtgggttaaagatccggcattgccgtgagctgtggtgtaggttgcaacacggctcggatccataataaatttagggtgaaggg

SEQ ID NO: 722757 - DNA, 645 bp, Homo sapiens
  misc_feature (487)..(487): n is a, c, g, or t
gaaccattccaaggcaatacttaagaaaagagctaaaacaggtagctgattaaccatacagatatctgtcagaagaggaaatagcaagtgcaaaggtcctgaggcaggaatatatatggtaggatcaagaagtaccaaggaggagttcccgtcgtggcgcagtggttaacgaatccgactaggaaccatgaggttgcgggttcggtccctgcccttgctcagtgggttaacgatccggcgttgccgtgagctgtggtgtaggttgcagacgctcggatcccgcgttgctgtggctctggcgtaggccggtggctacagctccgattcgacccctagcctgggaacctccatatgccgcgggagcggcccaagaaatagcaacaacaacaacaaaaaaacaaaaacaaaacaacaacctaaaaaaaaattttaaagtcaagagacaaattagccggttgctcttagatttagaaaagtctctggagtntccatgttgtggcgcagtggttaacgaatccgactagaaaccatgaggtttcggattccatcctggccttgctcagtgggttaaagatccggcattgccgtgagctgtggtgtaggttgcaacacggctcggatccataataaatttagggtgaaggg

SEQ ID NO: 722758 - DNA, 644 bp, Homo sapiens
  misc_feature (486)..(486): n is a, c, g, or t
cgcggtacggcatcacacacacacacacacacacacacacacacagacacacaaaattgagtatattgttgctattattattttgaacacataccgtaatctcttagtatcaattaagagtaagaaagataaaagtttgtggagttcccgtcgtggcgcagtggttaacgaatccgactaggaaccatgaggttgcgggttcggtccctgcccttgctcagtgggttaacgatccggcgttgccgtgagctgtggtgtaggttgcagacgctcggatcccgcgttgctgtggctctggcgtaggccggtggctacagctccgattcgacccctagcctgggaacctccatatgccgcgggagcggcccaagaaatagcaacaacaacaacaaaaaaacaaaaacaaaacaacaacctaaaaaaaaattttaaagtcaagagacaaattagccggttgctcttagatttagaaaagtctctggagtntccatgttgtggcgcagtggttaacgaatccgactagaaaccatgaggtttcggattccatcctggccttgctcagtgggttaaagatccggcattgccgtgagctgtggtgtaggttgcaacacggctcggatccataataaatttagggtgaaggg

SEQ ID NO: 722759 - DNA, 1007 bp, Homo sapiens
ggcatgcttcggacactggacatcaaacacgaagacgaagtgaaatcgtagtctcgagtgatgatccatgttttcagcgacgggtaacaaactggggcaggatgtgactctcatttcttaggtgcctttgtggctcaacacttgaagaccataaaccaagaacgctgcatcgaaccattagcagaaagtatcacagacgttctcgtaacggacacaacgggcactggctagttaaaccaacagcaggctgggatgggtttgtggagttcttcccatgtcagaggcacctcagcacaggtggccatccaggaatgtgctgctggctttagcaggtgttgctgcagtaggagctggtttggcatatctcaataagcatagccttcctgtcagtgcaaatcagttgacttcaaccaacccaccacaacacaaaaccagtttcatgcagtatggaactccacaagctgtacaaccttcctagagtagcacccataggcaaccttagcagaaacagcaagtggccagaggcattatcggctaaccacggcacttacatacatgggaaagagtgctccccatttgattgcaagcagtcactgtctggaacagcataacaaaagttcaagtttcagcaacaaacaaacttagtctgcggaagcctatggaggcaggactaacagatataacagaacacaggacaccggggaacagacttcaataccctggtagagaacaggaccgaggcccgcaagcccggacaagactcgcaagtgaaccacggacgaacttaatacatacaccggacctgacaagcacagccaccaccaaggccacggaccgtggtacccgaccgaccacgcacacgacggcacaccaccgacggcacacaacacacgaccacaaaacatccaacccatccaaccaatcagaccaaccagcacaagacaacagacacaacaaacaaccacacagcaacacacacaaaaaaacaacacaacaagaaacaaaca

SEQ ID NO: 722760 - DNA, 563 bp, Homo sapiens
  misc_feature (405)..(405): n is a, c, g, or t
accggaacctagcgacgcaaaatctaactatactggcttagcaagtaagttgacttctcggagttcccgtcgtggcgcagtggttaacgaatccgactaggaaccatgaggttgcgggttcggtccctgcccttgctcagtgggttaacgatccggcgttgccgtgagctgtggtgtaggttgcagacgctcggatcccgcgttgctgtggctctggcgtaggccggtggctacagctccgattcgacccctagcctgggaacctccatatgccgcgggagcggcccaagaaatagcaacaacaacaacaaaaaaacaaaaacaaaacaacaacctaaaaaaaaattttaaagtcaagagacaaattagccggttgctcttagatttagaaaagtctctggagtntccatgttgtggcgcagtggttaacgaatccgactagaaaccatgaggtttcggattccatcctggccttgctcagtgggttaaagatccggcattgccgtgagctgtggtgtaggttgcaacacggctcggatccataataaatttagggtgaaggg

SEQ ID NO: 722761 - DNA, 668 bp, Homo sapiens
  misc_feature (1)..(1): n is a, c, g, or t
  misc_feature (85)..(85): n is a, c, g, or t
  misc_feature (137)..(138): n is a, c, g, or t
  misc_feature (143)..(143): n is a, c, g, or t
  misc_feature (154)..(155): n is a, c, g, or t
  misc_feature (224)..(224): n is a, c, g, or t
  misc_feature (400)..(400): n is a, c, g, or t
  misc_feature (664)..(664): n is a, c, g, or t
nccgcctgtgtgcgctgcccaaggctttgcgtgtggcccccaggggacgtttggccagcccccaaagtgccgcccaaggccccanggctgccgcccactgggcttgcgtccgcccatggggctcgtgcccacgaagnntctcnggtgcttttgnnggagggttgtttcaatcgttggagtcaagggcgtgtaaatgctcaagccactagaactttcttccactncgcttccgggtcgcttcaagagccgcctttaaaaaagaaacattccacgttgggcacttctagccagttagagctatagagttgaggcgccccggacctcgacggcgtccttagtaggcgctcctttccggtccttcgcgggaagcgctgccttctaaggtctcgcttctcgcgcngttctgagggagataggcctccagggagaggacttcctttctctgctgcccggacccggaactcaaggacttaggcttgacggacctggcgtggggaagagttagaagacggacaagggaggggacgggaggcctccgagacagcgccggaagtacggttttcggagggatcagactcagactcacgtcgcactcctcgcagttggactggtgggaactgggaacactggagacctgatttctaactgacgctaccgtcgcggncgca

SEQ ID NO: 722762 - DNA, 122 bp, Homo sapiens
tcgagctctgtaccctcgataagggcaacgctgctcagaatccgccaggaactgacctgctgactgctctctgccaggaatcccaatgctttcactcttatctaccctttggcctttatgag

SEQ ID NO: 722763 - DNA, 619 bp, Homo sapiens
  misc_feature (461)..(461): n is a, c, g, or t
aacacaaaagcgggaggaggtagagaacattgctgctgtccataatgaagtgagcacagttgagttgagaggggtggattccgaggaaaggggctgtggaaaagaaagggagagaggagttcccgtcgtggcgcagtggttaacgaatccgactaggaaccatgaggttgcgggttcggtccctgcccttgctcagtgggttaacgatccggcgttgccgtgagctgtggtgtaggttgcagacgctcggatcccgcgttgctgtggctctggcgtaggccggtggctacagctccgattcgacccctagcctgggaacctccatatgccgcgggagcggcccaagaaatagcaacaacaacaacaaaaaaacaaaaacaaaacaacaacctaaaaaaaaattttaaagtcaagagacaaattagccggttgctcttagatttagaaaagtctctggagtntccatgttgtggcgcagtggttaacgaatccgactagaaaccatgaggtttcggattccatcctggccttgctcagtgggttaaagatccggcattgccgtgagctgtggtgtaggttgcaacacggctcggatccataataaatttagggtgaaggg

SEQ ID NO: 722764 - DNA, 997 bp, Homo sapiens
cgctcgccctcgcccctgcccgtggacaccctgcccgcacctgcccgatccccgtcggctgctgccggtggccagtcagctgacaaggctgggcacaggggagcggctggatggggatggcggggctggcgcactctgtgggccagaggccgagctcgtggtcatgcggcggatgcacctgtccgagcgccgatgactctcttcaagaatgcatggagtgccgtgcaggaggttagcttcgatgatccgcaggaggaggccatatggggctgcgccacctctagttgcctatgatgatcgccggttgtgaggtgcgatggaagcctgtgccagttatctctcgggcccaccgtgaagagactgattccctcgtgccatggtctctccctggcatcaaagttagcgcgttttcttgtagcaactgttttattccgtaaagtcagtgcctggactggggacctgagccatccatgcgctgacgacccgagtaggccgagaatgccatctcggtccttgctggaacggtgtgcagacatcgcttgtgttctggtgtcaatcagggtggctggatggggcaagaatggcggacaagggtggcgtttggtaaatagcgaggcaaatcccatgcaaacttaatttattcagctttttccttatattattgcaattttgaaaacgagaagttttcaactcttgtttgcccgggggcatggcagttgcaggggcgggtgatcctcgaggtcaacgttggaacccgtccgggctcgccagagtccaagccgaattgatccgtgtgccctacagcgatcaccgcaaaacgtgtgggcgtgggagattttaccgggggtgcccagaagccacaatataatgcccccaggcatgaaatatgtaggggataataacatagcataacctgaacgcgggggggttaccacccaatgtgttgaggatcaagggggacagggttcatccgaaacctcgctgaagcccgagtgaa

SEQ ID NO: 722765 - DNA, 277 bp, Homo sapiens
  misc_feature (79)..(79): n is a, c, g, or t
gctgctctggtggggccttggagaacctggtggtcgaaactcctgatctaactaatctgatggggacgtggagaacctntgtatctagctcagggattgtaaacgcaccaatcaacgacctgtcaaaacaggccactcggctctaccaatcagcaggatgtgggtggggccagataagagaataaaagcaggctgcccgagccagcattggcaactcgctcgggtccccttccacgctgtgggagctttgttctttgcaataaatcttgctactgct

SEQ ID NO: 722766 - DNA, 663 bp, Homo sapiens
  misc_feature (505)..(505): n is a, c, g, or t
ggtatataaatatatattatatataagtatatataaagtatacgtttactttatatatatctatccttatttagattatccaggtacttactaaattctttgcacatcttgaattcttctctttctaggttcaattttcctctttctaaacatcatttaggagttcccgtcgtggcgcagtggttaacgaatccgactaggaaccatgaggttgcgggttcggtccctgcccttgctcagtgggttaacgatccggcgttgccgtgagctgtggtgtaggttgcagacgctcggatcccgcgttgctgtggctctggcgtaggccggtggctacagctccgattcgacccctagcctgggaacctccatatgccgcgggagcggcccaagaaatagcaacaacaacaacaaaaaaacaaaaacaaaacaacaacctaaaaaaaaattttaaagtcaagagacaaattagccggttgctcttagatttagaaaagtctctggagtntccatgttgtggcgcagtggttaacgaatccgactagaaaccatgaggtttcggattccatcctggccttgctcagtgggttaaagatccggcattgccgtgagctgtggtgtaggttgcaacacggctcggatccataataaatttagggtgaaggg

SEQ ID NO: 722767 - DNA, 583 bp, Homo sapiens
  misc_feature (469)..(469): n is a, c, g, or t
  misc_feature (471)..(471): n is a, c, g, or t
ctcggtacccgcgaacatgcggcatgcggcaatgatataatacttttaactctcacggcaaattagtcacttgtcaagtccattgagagaccaatggagtcttgtttcatcattttatatcctgtataatttttttctaacttgagcgaagttttatactgtatttagttcaatattctacgttaaataaaaccagggagttcccgtcgtggcgcagtggttaacgaatccgactaggaaccatgaggttgcgggttcggtccctgcccttgctcagtgggttaacgatccggcgttgccgtgagctgtggtgtaggttgcagacgcggctcggatcccgcgttgctgtggctctggcgtaggccggtggctacagctccgattcgacccctagcctgggaacctccatatgccgcgggagcggcccaagaaatagcaacaacaacaacaaaaaaacaaaaacaaaaananataaataaatttgtcacttagcttgtcatcagagagttctgcaagtttaatcttttgttaaaaacacagcttatcattaatacttcctgtgaaacggagcgtccacttaggc

SEQ ID NO: 722768 - DNA, 677 bp, Homo sapiens
  misc_feature (519)..(519): n is a, c, g, or t
ggcgatctagaggatcccggaaaattagcgacgatgcctctactcctatgcacttccaccttgcccccaccaatgagagatcgcctgtgtgacaaccactgtgtgatgatggaaggtgaccataaaaatcagttttctgtgttagtttaaattattgtcaagagttgtcctttggagttcccgtcgtggcgcagtggttaacgaatccgactaggaaccatgaggttgcgggttcggtccctgcccttgctcagtgggttaacgatccggcgttgccgtgagctgtggtgtaggttgcagacgctcggatcccgcgttgctgtggctctggcgtaggccggtggctacagctccgattcgacccctagcctgggaacctccatatgccgcgggagcggcccaagaaatagcaacaacaacaacaaaaaaacaaaaacaaaacaacaacctaaaaaaaaattttaaagtcaagagacaaattagccggttgctcttagatttagaaaagtctctggagtntccatgttgtggcgcagtggttaacgaatccgactagaaaccatgaggtttcggattccatcctggccttgctcagtgggttaaagatccggcattgccgtgagctgtggtgtaggttgcaacacggctcggatccataataaatttagggtgaaggg

SEQ ID NO: 722769 - DNA, 569 bp, Homo sapiens
  misc_feature (411)..(411): n is a, c, g, or t
agaatcccgcgcgcagtatcggaatattcctaactgtactctttgacatcagaggtgcagaagtgggagttcccgtcgtggcgcagtggttaacgaatccgactaggaaccatgaggttgcgggttcggtccctgcccttgctcagtgggttaacgatccggcgttgccgtgagctgtggtgtaggttgcagacgctcggatcccgcgttgctgtggctctggcgtaggccggtggctacagctccgattcgacccctagcctgggaacctccatatgccgcgggagcggcccaagaaatagcaacaacaacaacaaaaaaacaaaaacaaaacaacaacctaaaaaaaaattttaaagtcaagagacaaattagccggttgctcttagatttagaaaagtctctggagtntccatgttgtggcgcagtggttaacgaatccgactagaaaccatgaggtttcggattccatcctggccttgctcagtgggttaaagatccggcattgccgtgagctgtggtgtaggttgcaacacggctcggatccataataaatttagggtgaaggg

SEQ ID NO: 722770 - DNA, 599 bp, Homo sapiens
  misc_feature (441)..(441): n is a, c, g, or t
cggtcatggggcataatgtttatatagatgcagtgtgtgcaaaacataatagtgacaaaagcaggaaggaggacgggaattaaaaaggagcagcaggagttcccgtcgtggcgcagtggttaacgaatccgactaggaaccatgaggttgcgggttcggtccctgcccttgctcagtgggttaacgatccggcgttgccgtgagctgtggtgtaggttgcagacgctcggatcccgcgttgctgtggctctggcgtaggccggtggctacagctccgattcgacccctagcctgggaacctccatatgccgcgggagcggcccaagaaatagcaacaacaacaacaaaaaaacaaaaacaaaacaacaacctaaaaaaaaattttaaagtcaagagacaaattagccggttgctcttagatttagaaaagtctctggagtntccatgttgtggcgcagtggttaacgaatccgactagaaaccatgaggtttcggattccatcctggccttgctcagtgggttaaagatccggcattgccgtgagctgtggtgtaggttgcaacacggctcggatccataataaatttagggtgaaggg

SEQ ID NO: 722771 - DNA, 249 bp, Homo sapiens
tagctccactggaacgacgccacagaatcgaacatcaccgagcggcacggcgcgcctggggcaggcgcgcggcattgcggaccacgcgactagacacagatcgacatgctccctggaagtacatgagcgagcataaagcctccggttctcaagcttatgttgttatgcgcgtcattaagcgcgcatgtgcgcccacggacatgggcaccctgaccaaagccatgcattgagacgcacgcggatgaactt

SEQ ID NO: 722772 - DNA, 177 bp, Homo sapiens
ccagcctgctgcttcctaactattgcctgggcagtgcccaccactgcacccctgatgttcgccgtctggcgagggttaacagtaaaatattgtatattattaaatagctagaagagaggcttttgaatattctcaccacaaagaaatgataaatgcatgaagtgatggatacactaa

SEQ ID NO: 722773 - DNA, 645 bp, Homo sapiens
gcggttttgttttttttgttttgggtgcccctcagattgggggggtagaaaggggaagagaaccccgggcccaacgggcccactaggggagacgcccacggaagacacggcaccggggacaaacaaaaaaacagcccgcaaagagcgcgcgtggacggacacccgggcaaccgggggcccgggcgaacatgcgggacgcatgcaaaccgcggagaactcgtaaaacacggcgccgtgctctacgccaacacaccgcgcgaagagcccgacgggcaacacgcgggaaccccgcgcagcggccaccggggacaaccacgcgaacgcgacttccgcgcccacccccgcgcctcggcgacggccacggagcgcgcgcgcgggagccgccaagggcccaccacaagggaccgggcgcaagcccgcggcgaacaccgggcacgcgcggaactatgggcggacgccgcccaaccgcgcccaccccacccagacgccagcccatacgggggcgcgccgcggggccccgcacgaggggcgcacaccccacaccacgcggggcacccatccccgcccggcaccccggcgcgcgcacccccgcgcgccgcggcccgtcgaacaaccccacgcgcgcggcagaggacggccgcgccg

SEQ ID NO: 722774 - DNA, 377 bp, Homo sapiens
cgtccagagtccgagtagcagcggggatacaggcatccacgcaccacacacggctaaatttcacgtactttcagcacagacggggttcaccatgtaggtcagggccggtctcgaactcctgtcctcacatgatccacctgccttggcctcccaaagtgctggaattataagcataagccaccgcgcccagtttcatcactatatcttttgggtaataatttccatcttcctaactcaaagatgaaatgcgtacagagctgtgtatttttatggtcccatttcatcttcatcaaagtcttctgaggaattccaagaggttctccattgataatgcacagcaaaatttcttagtgtccactttccttgtctttccctct

SEQ ID NO: 722775 - DNA, 285 bp, Homo sapiens
ttttttttaacaaaacccccaaaaaggggcttttttgggtggctagggggggccccttccccaattttgaaggttctggggttgaaagccccctttttttttgtttaccctttttgggttgggggggcccctttttgggccaaaaaatttgggattttttttcaaaaaaaggttttttttcccttgccaaaacccggctttgggttgggggtataggggggatttttttgtttgggatttttaaaatggccctttcctaaaaaggaataaattttttgattttga

SEQ ID NO: 722776 - DNA, 173 bp, Homo sapiens
tgaagggaaacaaaaaagtgtttgatggggccagagaggggctgctttccagaaagctaaaatttaatttcttttttcctttgggttttggacttcaaccagcctacaagggggcccttgctaacaaatcagaaatttgcccattaatgattaaaggctgtggttgcccccca

SEQ ID NO: 722777 - DNA, 412 bp, Homo sapiens
ctttgttgcgtcaacgaccctagccggagactcaagctgccccctgtgataagtgccttctcgtctttctggtgtgattcaggactttaggggtcagtaaagaccgaggagcctttattgtaataagaaacagacataatgccccttcttcacaagccctgtaacaacagctaattttttttttttgatctcccctttctcccttgaaattaatccagtctgggcaatagatgcagtctgaccctttggatgtaactaacaatttttttataattaattttttcttccattcacccaatttttcctggggggagcctttgatggccctgaatttttacaccgacccaagtttttcgggcccttggaacccaatgggggttccagaaaaccttttacgcctgttcacagaccg

SEQ ID NO: 722778 - DNA, 116 bp, Homo sapiens
gtgctgttctagaggatccagaagatcccaagaagaagaacctgatagtaagaaggtggaggaagacttaaaggcagacgaaccatcaagcgaggaaggtgatcttctgcacgata

SEQ ID NO: 722779 - DNA, 166 bp, Homo sapiens
aatagagacaggggtctcagtatgttgcccaggctggtcttgaactcctgggctcaagatatcgtccctgcttgttctcttcaagtgctgagattacaggcatgagctaccatgcctggctgaaaatttatgatgccagatcaaattgcccttctgtcgtcttctc

SEQ ID NO: 722780 - DNA, 383 bp, Homo sapiens
agtacgaatcgagctcggaccggatatcatagaaaccatattctcacttcaatctgtttgaaagagtaggtatcatgtaaattatatttttaaaaatgctgcggataaaccagggcgtatgtgcaggtgccgtcgcctcatctctcctcatttgtagtctgcacttgtggattcaatctgatggtatcaacagtgtcctcatctcccagttccattatccatgtcttctgattagccgatgacatgtagttgcttcggatttatttcccagtgctctctaatacctcattacactaaataagtgtcaccacattagcatgaaaatatagtcgtaattattaaagaggttccccgaaagtaccgatgtctataaccgtaagaga

SEQ ID NO: 722781 - DNA, 316 bp, Homo sapiens
atcatatatctgagctcctcccgcccaattggcccaatctatcaccctatagaagtgctaatgttagtatcagtagcatgaatacagtctcctccgcataagccgcgtagtcagatcgagccgcgtagtcagatcgagccgcgtagtcagatcgagccgcgtagtcagatcgagccgcgtagtcagatcgagccgcgtagtcagatcgagccgcgtagtcagatcgagccgcgtagtcagatcgagccgcgtagtcagatcgagccgcgtagtcagatcgagccgcgtagtcagatcgagccgcgtagtcagctcg

SEQ ID NO: 722782 - DNA, 135 bp, Homo sapiens
agaagatgatgaaaccgttaacagcatgtacgtccccgtacagagcagctaagaggaacctttaaatgagggaaatcaaaatcttctttcctgggggaagattcgatgtcacactgtgattaagtaacgcggggt

SEQ ID NO: 722783 - DNA, 397 bp, Homo sapiens
gtaaaatcaattttacaaaatttaagggttttttaactaaagggtcgcctttttaaggtattttgaatattagggtcatttggcacttttccgcaagtagggtacttttcatgttttggaaatatttggatttgggaaaaaatggctttaggcccgcgtctctgtttgaccttgtttgggtgaccctttggggtaactgttttcatttaccgaaatgcatttttgcttttaaaggggttttttaatgggacttgggatcccccttttggggggacctgcatatatacccgtccttatctgtttgggccctaaaccggtttaacctactttggttttttttagttaagccctaagttcaacgtgttaactttttttccttaaagaatttttttttcca

SEQ ID NO: 722784 - DNA, 505 bp, Homo sapiens
gaactgacgacgcggctgggacagaaccagaactacttgtagaaagagaatctagctccaaagtagggaaaggccaggaaagaagccagggggagcagagggagcagaaaggcggcgcagagactcgctttctctcaacgtgacgactggggagactaacacattctctccccaaaaaagtcaactataaaactggacaaaactgtcaaaagcaaccatttcagaacagtagaaactgaccaaactttgataagaacaagcagagcttggggatcatgcctgggctgtccccagcctcctcctagcaatgctgaccggtagttcgagccgcgtagtcagatcgagccgcgtagtcagatcgagccgcgtagtcagatcgagccgcgtagtcagatcgagccgcgtagtcagatcgagccgcgtagtcagatcgagccgcgtagtcagatcgagccgcgtagtcagatcgagccgcgtagtcagatcgagccgcgtagtcagctcg

SEQ ID NO: 722785 - DNA, 515 bp, Homo sapiens
ggccccccgggttttcccttttatgtttcgggttggaatgtggggggaaattgtaagggaaaaacattttcccccgggaaacagttatgcccatgtttcccccaagttggaaattacccctcataaaagggaaaaaaagtgggggttcccccgggggggggcccgtttaaaaaaaaggggttccccggggttgaagaaattgggcaaaaggaaaagttttaaacaatggggttttggtcacaggagtttttgaaaggttggaacagttaaggtaaaggcccccggtttgggctttttttttttttttatttaaaattaaaaggttggggaacccgggggggaatttttattttccggggacggttttggtttggttttttcccttttccccccccttggccccaattaaggtttttccccattaggcccaaattaaatttcccctacaaacccctaaaaatgttttgggaaaaaggtccccagtttaaccccaccaaaaaatcttttactttcca

SEQ ID NO: 722786 - DNA, 417 bp, Homo sapiens
ctggggccagatttgtcttttcttttcttttcttttcttttttgagatggagtctcttgctctgtcacccaggctggagtgcagtggcacgatcttggctcactacaacctccgcctcccaggttcaagccgttctcctgcctcagcctcccgagtagctgggactacaggcgcctgccaccacgcccagctaatttttttgtattttcagtagagacggggttttgccatgttggccaggctagtctcaaactcctgacctcaagtgatccagccgcctcggcctcccaaagtgctgggattacaggtgtcagccactgcttggggcctggcttttctgactcggcttaggaattcggcggatgtggctgggatgctcatggcctagaactcaccttgctccttgtagacctgaag

SEQ ID NO: 722787 - DNA, 414 bp, Homo sapiens
accttctcagtggggaacaagggcaacgcgtggagtcctgagaaacagatcattcaggacagtgtctagcgggtcaattctagggctgtgtgatgacatggactccctcattcctctcctattaaaaagagcagagtaggctgggtgtgatggctcatgcctgtaatcccaacactctgggaggccaaggtgggtggattacctgaggtcaggagttcaagaccagcctgaccaacatgaagaaacctcgtctctaccaaaaatacaaaattaccccaggtgtggtggcgcatgcctatcatcccagctactcgggaggctgaggcaggagaatcacatgaacccaggaggcagaggttgcagtgagctgagaacacgccattgcactccagccagggtgacagagtctgtctc

SEQ ID NO: 722788 - DNA, 326 bp, Homo sapiens
ctaccggatttgactacgcggctggaggagtcacccctgttgcactacctgatggagccgcaactctggccccggtccgaggggccgcacctgtctccccgggctgaggagcctgcgtagttagatctagccgcgttgtctgatcgagccgcgtagtcagatcgagccgcgtagtcagatcgagccgcgtagtcagatcgagccgcgtagtcagatcgagccgcgtagtcagatcgagccgcgtagtcagatcgagccgcgtagtcagatcgagccgcgtagtcagatcgagccgcgtagtcagatcgagccgcgtagtcagctcg

SEQ ID NO: 722789 - DNA, 751 bp, Homo sapiens
gggtggtgggaaatcggctgtggtagagaggctatgcctacttgaggagcgcgaatccggcgggtatcagagccatcagaaccgctgccatgaccggtgtgcgcaaggcagcagcaagatgctgcgagcaatattgattacaggatgaggtgtcatcctgcaggcactggtgcggagtctttctagttgggctacctatcaaggctttatgaccaggcatcgcgaggatatttagtataccctactgttgaactagtggatgcaggttccgggcaccaggatccacagaccatacagaaaactgcgcgaacacaaagccacgaaaaagggacagagcaaagccgtagttctctccgcggtcttggtcgacttcgtcatgtcggcagcgcgagagtacagtcgtggtcttcaaagttgacaccgtatgagggtgacccgtcccttcccgaaacgaatatcgttgcggtacttgggtacacgaaggtatccgacgtgttgcattgtcgaagcgctcgtacgggagggcccccattgggaatcgtgcgcatagcgagactagcctttgggcacatgtattgagacaatcgccccatgcgtaggttagggtttccgctaatagcccgcacaagggggcttcccgttgcgagagaacgtatggcattcgtggcccaagtcacgaggtagggcggcgcttgggcaggaggcaaatccccgaagatcagggatgaaatgagcccccgatcaatggact

SEQ ID NO: 722790 - DNA, 451 bp, Homo sapiens
aaagcaggggctccggctcaggtgattatcctgaatcatccaggccaagataagcgccgtggtatgccccttggtgttggattgcctactacggctcacatttgcgtgcaagcttagcgtgaggctgaaggataagattgatcgccgttcatggtaaaaagctggatgatggccctacattcttgcaggtctggtgatgctgccatatggtgatatggttgcgggcaagcccatgtgtgttgagagcttctcagactatccaccgttgggtcgctttgctgttcgtgatatgagacagacagtggcggtgggtgtcatcaaagcagtggacaagaaggctgctggagctggcaaggtcaccaagtctgcccagaaagctcagaaggctaaatgaatattatccctaatacctgccaccccactcttaatcagtggtgggtcagaacataag

SEQ ID NO: 722791 - DNA, 140 bp, Homo sapiens
caggttccggtcgctcggcacaccattcagatgttggagaaatgtagtccatgtggctattctctatgcatgtcgctcctaggttcatagcgcagtgtggtctggcggagttctctacccgacctgccactcagcgcaat

SEQ ID NO: 722792 - DNA, 334 bp, Homo sapiens
ctacgcggctgggcgtggtggctcatgtcccagtgctttgggaggcgaaggcaggtggatcatctgagcccaggagtttgagaccagcctaggcaacgtggcaagagcctgtctctccaaaacctactaaatttagccaagcttggtggtgtcgagccgcgtagtcagatcgagccgcgtagtcagatcgagccgcgtagtcagatcgagccgcgtagtcagatcgagccgcgtagtcagatcgagccgcgtagtcagatcgagccgcgtagtcagatcgagccgcgtagtcagatcgagccgcgtagtcagatcgagccgcgtagtcagctcg

SEQ ID NO: 722793 - DNA, 540 bp, Homo sapiens
  misc_feature (30)..(30): n is a, c, g, or t
  misc_feature (342)..(342): n is a, c, g, or t
tgggttataagaaaaaaaaagttacaaggnttcttccgtttcatgtccctgcaaaagttagggcaaaaagtgttccaggcccaaccccaatttaaagggggggggcccccccccagtttgtcctttcccaaaggggaaagaatcccccaagggttggggaagggccttaaccaggaggccttttcccccaaaagggtttttttttttaaaaaaaaaaccccccagggggggcgggggcccaaaaaccccgggagcccgttttagaaggaagggcaaaagtagggtttttaacccaaacggggggggcccccggggcgaagggcgccctttttttttaacccntttaaggaaaagcaccaaaggaaaattgggttttccctttttaggggggggggcattccccaaaaagggttttggccctttcccccccgggcctgtaaaaaagttttttaaaaaggcgggggtttggaggccggggggagccccccccccttttaagggggggtccccccccccccaaaaaattttgtttggggggga

SEQ ID NO: 722794 - DNA, 306 bp, Homo sapiens
ccctctgtctacgcggctacacaaagactgctgaaaggaacacacatactgttttctacagcagctacaccattttacattcccctcagcaatgcacaaggtttccaatttttccatatccactcgagccgcgtagtcagatcgagccgcgtagtcagatcgagccgcgtagtcagatcgagccgcgtagtcagatcgagccgcgtagtcagatcgagccgcgtagtcagatcgagccgcgtagtcagatcgagccgcgtagtcagatcgagccgcgtagtcagatcgagccgcgtagtcagctcg

SEQ ID NO: 722795 - DNA, 622 bp, Homo sapiens
tgaagctgcgaagcgcttttggagcctgtgaatgaaccttcctcctttccctcctccttcttctggttgagtctcctcctgggttttgacggtccagggatataaggatgatgggggtaacaacccgaattggaacttgcaggcaagctgccccgagcctttctggggaagaactccaggcgtgcggacgcaacagccgagaccattaggtgttggggccagaagctggaaccaagatcttgggccagccccgaatcctcccgaattttccagaaccgtccggaaccttccgaatccttccccgggccaccacgcttcctatgggacccgcctgggcaacgccgaacccagtcgcgcagggttgaagtgaattttccccccaaactgcaataagccgccttccaaggccaagatgttcataaatataaggggcatctaatggaggggttcaaccttaatagtaacccatgcgctacataagggtgagtgtgctaacaaattcttggtggttaattgaaataaaaaggaaagtgctgaaggatgaaatggcaatgtggaatcactggaataaaggatggatttttaaaacctattatgctgactatcagtttattttgggccc

SEQ ID NO: 722796 - DNA, 256 bp, Homo sapiens
agagcatcctattctagagtcatatcaacaatagggtttaggagctcgatgtggggtcaggacatcccgatggtcgagccgcgtagtcagatcgagccgcgtagtcagatcgagccgcgtagtcagatcgagccgcgtagtcagatcgagccgcgtagtcagatcgagccgcgtagtcagatcgagccgcgtagtcagatcgagccgcgtagtcagatcgagccgcgtagtcagatcgagccgcgtagtcagctcg

SEQ ID NO: 722797 - DNA, 152 bp, Homo sapiens
ccagaggatcctgaagcatcctaacagaagtactggtcttgaactccagaccttattgatctgccccgccttggcctcccaaagtactgggattacaggcatgagccactgtgcccggcctatttctttttttttaagacacagtcttgctc

SEQ ID NO: 722798 - DNA, 264 bp, Homo sapiens
ttaactacgcggctgggcgtggccgctcacgctatatcccagcacttttgggaggccgaggcaggcggatcaagaagtcaatcgagccgcgtagtcagatcgagccgcgtagtcagatcgagccgcgtagtcagatcgagccgcgtagtcagatcgagccgcgtagtcagatcgagccgcgtagtcagatcgagccgcgtagtcagatcgagccgcgtagtcagatcgagccgcgtagtcagatcgagccgcgtagtcagctcg

SEQ ID NO: 722799 - DNA, 291 bp, Homo sapiens
gtgataagcagtatagatcaccaagcacgatgtaacaggcccagccctagatgcgggggacacagatggtgaatgagaggtgggcccctgcctgcaatgtagggaacagagcagcaaacaggattccacatctggtggaaggacccaggaaggctcctctggtccagccgcgtagtcagatcgagccgcgtagtcagatcgagccgcgtagtcagatcgagccgcgtagtcagatcgagccgcgtagtcagatcgagccgcgtagtcagatcgagccgcgtagtcagctcg

SEQ ID NO: 722800 - DNA, 273 bp, Homo sapiens
gcgaactacccgcgatcggctgacgttttcatcgatgccactgccggaatcgcgctgcaaagtctcaattaatctgaattcaatatcaccgaatgcagatgtaaatatcattgaacgtcgcgcatttgcatcgaatttacggttgttaatcttcgagctggtcctttcgattatcatccgcgcaaacagcaaaaggcactccctccgtcagtcgagtgaggccgtcggggttgttccatttcagacggggcagggagtgctttcgcatgagac

SEQ ID NO: 722801 - DNA, 275 bp, Homo sapiens
cagttattacggcctgactgccggtcagcctagatttggaaccagccatacccatactagcgggggctatgacagtcttctgttggtcagtcacgactctagctatctccttcttatagacggtccgcacggtcatgaccggtccggccagccgcgtagtcagatcgagccgcgtagtcagatcgagccgcgtagtcagatcgagccgcgtagtcagatcgagccgcgtagtcagatcgagccgcgtagtcagatcgagccgcgtagtcagctcg

SEQ ID NO: 722802 - DNA, 209 bp, Homo sapiens
cgatctgactacgcggctggctcgcccgctcacggggtgctcacagcggcgtgctccagctgcactgaagctggcaatgaggaagccgcgtagtcagatcgagccgcgtagtcagatcgagccgcgtagtcagatcgagccgcgtagtcagatcgagccgcgtagtcagatcgagccgcgtagtcagatcgagccgcgtagtcagctcg

SEQ ID NO: 722803 - DNA, 588 bp, Homo sapiens
  misc_feature (430)..(430): n is a, c, g, or t
cgtccgtcgaccgctcagggaactatatcaaatctcttggtatagaccatgatcgaagataatataagaaaggggcacactaatggagttcccgtcgtggcgcagtggttaacgaatccgactaggaaccatgaggttgcgggttcggtccctgcccttgctcagtgggttaacgatccggcgttgccgtgagctgtggtgtaggttgcagacgctcggatcccgcgttgctgtggctctggcgtaggccggtggctacagctccgattcgacccctagcctgggaacctccatatgccgcgggagcggcccaagaaatagcaacaacaacaacaaaaaaacaaaaacaaaacaacaacctaaaaaaaaattttaaagtcaagagacaaattagccggttgctcttagatttagaaaagtctctggagtntccatgttgtggcgcagtggttaacgaatccgactagaaaccatgaggtttcggattccatcctggccttgctcagtgggttaaagatccggcattgccgtgagctgtggtgtaggttgcaacacggctcggatccataataaatttagggtgaaggg

SEQ ID NO: 722804 - DNA, 662 bp, Homo sapiens
ctgagcatctgggtgtaccgttagcacggagattgcgccggctgtacgttcagctcgaggcctggagaccagtaccttggctcgcctaagcgaggtacgccaatgaatagacgtgtcacgcgctgaaggctgaagatccagtgcagggcagaatcaagtctgaggagaaggaaagacatggcaccagtgaaggcttgatctcgcattaaaggactgactgaagggctgcaagcactccatgttcatgagtttgcggataacacaggcgcctgaaccactgcacgcccttactttagacctctatctagcacggtgggccaacgcatgaagagaggcatgctgcagactcgcgcaacgcgactcggtcgaccaagatggcgcgcccgctcgccctatcgcagattctccgatcccactttcaggcgaccatcgcatcatcggccgtacactgctgcgccatcgacaacgagatgcctcgctcccctctctccctgcccatgccaccagcccgctatccgctgaagctcctcggcctcggcccgctccgtcatcgccctatctcctcctctccaacgcgcccgacatcccctcacccaccccgtacaccctagtcagctcccgtccccctaccatcatccccctctccattcgcggctcgccct

SEQ ID NO: 722805 - DNA, 646 bp, Homo sapiens
  misc_feature (488)..(488): n is a, c, g, or t
cgttgcatatcactttgtctctcactgacattccttctacacgaaggcatgacctggacctcaatctgagagccccaagaaatgaaaggtgttaatgaagtactcttcattccaaaagaaggatcatcaaaatcaatcctggggagttcccgtcgtggcgcagtggttaacgaatccgactaggaaccatgaggttgcgggttcggtccctgcccttgctcagtgggttaacgatccggcgttgccgtgagctgtggtgtaggttgcagacgctcggatcccgcgttgctgtggctctggcgtaggccggtggctacagctccgattcgacccctagcctgggaacctccatatgccgcgggagcggcccaagaaatagcaacaacaacaacaaaaaaacaaaaacaaaacaacaacctaaaaaaaaattttaaagtcaagagacaaattagccggttgctcttagatttagaaaagtctctggagtntccatgttgtggcgcagtggttaacgaatccgactagaaaccatgaggtttcggattccatcctggccttgctcagtgggttaaagatccggcattgccgtgagctgtggtgtaggttgcaacacggctcggatccataataaatttagggtgaaggg

SEQ ID NO: 722806 - DNA, 595 bp, Homo sapiens
  misc_feature (437)..(437): n is a, c, g, or t
gttattttgtgggctttaacatcatgctccttcctcccgactccccgccccaaatcacaaaatacagaaaagctctaagaaaacaaaaatcggagttcccgtcgtggcgcagtggttaacgaatccgactaggaaccatgaggttgcgggttcggtccctgcccttgctcagtgggttaacgatccggcgttgccgtgagctgtggtgtaggttgcagacgctcggatcccgcgttgctgtggctctggcgtaggccggtggctacagctccgattcgacccctagcctgggaacctccatatgccgcgggagcggcccaagaaatagcaacaacaacaacaaaaaaacaaaaacaaaacaacaacctaaaaaaaaattttaaagtcaagagacaaattagccggttgctcttagatttagaaaagtctctggagtntccatgttgtggcgcagtggttaacgaatccgactagaaaccatgaggtttcggattccatcctggccttgctcagtgggttaaagatccggcattgccgtgagctgtggtgtaggttgcaacacggctcggatccataataaatttagggtgaaggg

SEQ ID NO: 722807 - DNA, 657 bp, Homo sapiens
  misc_feature (657)..(657): n is a, c, g, or t
cataacgagtcaacgctgtggaggcaggatgtagccagtgccggcgacatgaccggcttgagccagggagtgctcgaccggcagaagaatctgggcagagagatttgcataaggtacagcgcctggatgacgacatttctgctgacgtgcgaacgcagaggtactcgaggataatgcagcagatgaagtaagaggaggacgagaagaccaggctgcccaagatgctatgagcttttgtgtactaccctttcgcccttcagctgtgcgcctggagccaggcctatcatgctagctactcatgatgctgagctcacaggaatctagtagcagatggcatgtcactgtgtcgtgatgagtgtaacatcttgcctgttggactctagttctgctcgacaagccgagtattctgcttgaccacctcacgagggtcgaggagattatcctgatcgcgagggtcgtgcaacctgtgtctcagctaactcgggctgagacagaagattcgattgaaccaagagatggaggttgcagttagccgagattgtaccaccgcactgcagatttagcctgagagtcacagcgagtattctgatgcaagacaacatagagctcacttggccttcgccctatcatggggggcattatagtccagtggctctn

SEQ ID NO: 722808 - DNA, 603 bp, Homo sapiens
  misc_feature (445)..(445): n is a, c, g, or t
gatctggtattgccgtgtctgtggcataggctggcagctgcagctccaatttaacccctagcccctgtgaacttccatatgccttaaaaaaaagagagaggagttcccgtcgtggcgcagtggttaacgaatccgactaggaaccatgaggttgcgggttcggtccctgcccttgctcagtgggttaacgatccggcgttgccgtgagctgtggtgtaggttgcagacgctcggatcccgcgttgctgtggctctggcgtaggccggtggctacagctccgattcgacccctagcctgggaacctccatatgccgcgggagcggcccaagaaatagcaacaacaacaacaaaaaaacaaaaacaaaacaacaacctaaaaaaaaattttaaagtcaagagacaaattagccggttgctcttagatttagaaaagtctctggagtntccatgttgtggcgcagtggttaacgaatccgactagaaaccatgaggtttcggattccatcctggccttgctcagtgggttaaagatccggcattgccgtgagctgtggtgtaggttgcaacacggctcggatccataataaatttagggtgaaggg

SEQ ID NO: 722809 - DNA, 589 bp, Homo sapiens
  misc_feature (431)..(431): n is a, c, g, or t
acatctcatttctgatttgtcagttacttattatgagccaggcactgtttgagaaactggggatgcaataaggaataggacatgaggagttcccgtcgtggcgcagtggttaacgaatccgactaggaaccatgaggttgcgggttcggtccctgcccttgctcagtgggttaacgatccggcgttgccgtgagctgtggtgtaggttgcagacgctcggatcccgcgttgctgtggctctggcgtaggccggtggctacagctccgattcgacccctagcctgggaacctccatatgccgcgggagcggcccaagaaatagcaacaacaacaacaaaaaaacaaaaacaaaacaacaacctaaaaaaaaattttaaagtcaagagacaaattagccggttgctcttagatttagaaaagtctctggagtntccatgttgtggcgcagtggttaacgaatccgactagaaaccatgaggtttcggattccatcctggccttgctcagtgggttaaagatccggcattgccgtgagctgtggtgtaggttgcaacacggctcggatccataataaatttagggtgaaggg

SEQ ID NO: 722810 - DNA, 360 bp, Homo sapiens
tggttagaaatagatgaatttttatttttaaaaaatgccaataagggcgggacgaggtggctcatgcctgtaatcccaggactttgggaggccgaggcgggtggatcacttaaggccaggagttcgagcccggcctggccggcatggcgagaatttgtttgtgcaaaaaaaataaaaatcggccaggggtggttgtgcgcccctgtgatcccagttactcaggaggttgagggggggaattgcttgagcccggtaggtgggggttgcattgagccaagttcatgcccctgccctccagcctgggtgacagagccagaatttgtttcaaattcccctagtaagccaactagaatatgccca

SEQ ID NO: 722811 - DNA, 729 bp, Homo sapiens
cagtcccatgctttgtgtcctttatccatgctgttactgtctcccgttatccttccaacatattgtcacaggggtattcgtcagtgttcacgacgctctttgcaaggactgtggccatctcgctacgaggtggcgactggcaagtttgagcttgatccgtctgtccttcccagagggcgagcctgccgcatagggaatgcctagcactgtaggactctccagtctgccaagggtgtaccatgccggacctgccgcaagcaggttggtgcacagcggtgttgcatactcagccctgcatgccaagctggtatgcgcaaccgagattaagctgaagggtggatcgggcacatgactggcctccatatagtgtctgcatcggctggatgacacaacagcctgcctgtggtacagcaccacaagcttatcatgcctggtcaagaagcaggccttgggcaggttccagctgatcgttggcatctttgcctggtagttcgatgggactgctggtcccttgcatctcctgatatataggcgcagacatctatgaagcaagacttctctcgtaccccagttgccacatagcagcagtcactggcagcgtctaccccgcatcttctgctcttgtccaattggtgagaataaggccccgtcatcagtgggcagcaggtctgagtactctcatatgatgctgcgattttcctggagctgactacacaccggtatatccct

SEQ ID NO: 722812 - DNA, 630 bp, Homo sapiens
  misc_feature (472)..(472): n is a, c, g, or t
ccacagaacacaaaacaaaatgtactctggcagatggctgagacgcctagaaaaagagcagtatgaacatcctccctgtgccttcctggagtatcctcccttgtgtccttaaaaacatcacgttcaggagttcccgtcgtggcgcagtggttaacgaatccgactaggaaccatgaggttgcgggttcggtccctgcccttgctcagtgggttaacgatccggcgttgccgtgagctgtggtgtaggttgcagacgctcggatcccgcgttgctgtggctctggcgtaggccggtggctacagctccgattcgacccctagcctgggaacctccatatgccgcgggagcggcccaagaaatagcaacaacaacaacaaaaaaacaaaaacaaaacaacaacctaaaaaaaaattttaaagtcaagagacaaattagccggttgctcttagatttagaaaagtctctggagtntccatgttgtggcgcagtggttaacgaatccgactagaaaccatgaggtttcggattccatcctggccttgctcagtgggttaaagatccggcattgccgtgagctgtggtgtaggttgcaacacggctcggatccataataaatttagggtgaaggg

SEQ ID NO: 722813 - DNA, 638 bp, Homo sapiens
  misc_feature (480)..(480): n is a, c, g, or t
ccctaattgtgccaacggtcacgtcacgctccatattttcccttatttcaccatcttcatggcacttgcctgaaattcattatttaatatttttactttctggctctgctcacggcatgggaagttcctgagcctgagttcccgtcgtggcgcagtggttaacgaatccgactaggaaccatgaggttgcgggttcggtccctgcccttgctcagtgggttaacgatccggcgttgccgtgagctgtggtgtaggttgcagacgctcggatcccgcgttgctgtggctctggcgtaggccggtggctacagctccgattcgacccctagcctgggaacctccatatgccgcgggagcggcccaagaaatagcaacaacaacaacaaaaaaacaaaaacaaaacaacaacctaaaaaaaaattttaaagtcaagagacaaattagccggttgctcttagatttagaaaagtctctggagtntccatgttgtggcgcagtggttaacgaatccgactagaaaccatgaggtttcggattccatcctggccttgctcagtgggttaaagatccggcattgccgtgagctgtggtgtaggttgcaacacggctcggatccataataaatttagggtgaaggg

SEQ ID NO: 722814 - DNA, 165 bp, Homo sapiens
gctatcgtgcggtgcttttcttcttcgaagtgcccgctcagcaagcagctggcttcctgctggctcgctcagtctccagcatctctaccctggctggagctgtgtgttgttgcagcaagagtggctgcctcttgcttcaaggtttccagctgcaagacatcaccc

SEQ ID NO: 722815 - DNA, 563 bp, Homo sapiens
  misc_feature (405)..(405): n is a, c, g, or t
aatgcggctgactgacttaccttagatgggatgaatgctgtctttaaaaaaggccctgtggagttcccgtcgtggcgcagtggttaacgaatccgactaggaaccatgaggttgcgggttcggtccctgcccttgctcagtgggttaacgatccggcgttgccgtgagctgtggtgtaggttgcagacgctcggatcccgcgttgctgtggctctggcgtaggccggtggctacagctccgattcgacccctagcctgggaacctccatatgccgcgggagcggcccaagaaatagcaacaacaacaacaaaaaaacaaaaacaaaacaacaacctaaaaaaaaattttaaagtcaagagacaaattagccggttgctcttagatttagaaaagtctctggagtntccatgttgtggcgcagtggttaacgaatccgactagaaaccatgaggtttcggattccatcctggccttgctcagtgggttaaagatccggcattgccgtgagctgtggtgtaggttgcaacacggctcggatccataataaatttagggtgaaggg

SEQ ID NO: 722816 - DNA, 158 bp, Homo sapiens
  misc_feature (137)..(137): n is a, c, g, or t
agacgagggagaagggatgaaagggcgacgctcatctaagtggagttcagaagcgagcaaagtgatacggacccacagacaaaggaaacacaagcgggtacccaagcgggtcggatacaacagcagcccatggttgntccggtctgccggatacttac

SEQ ID NO: 722817 - DNA, 583 bp, Homo sapiens
  misc_feature (425)..(425): n is a, c, g, or t
caggaactttgctccctgatgtaccctcagaacctagacttgaacctggcatggatctagaattcaataaacatttgtgggagttcccgtcgtggcgcagtggttaacgaatccgactaggaaccatgaggttgcgggttcggtccctgcccttgctcagtgggttaacgatccggcgttgccgtgagctgtggtgtaggttgcagacgctcggatcccgcgttgctgtggctctggcgtaggccggtggctacagctccgattcgacccctagcctgggaacctccatatgccgcgggagcggcccaagaaatagcaacaacaacaacaaaaaaacaaaaacaaaacaacaacctaaaaaaaaattttaaagtcaagagacaaattagccggttgctcttagatttagaaaagtctctggagtntccatgttgtggcgcagtggttaacgaatccgactagaaaccatgaggtttcggattccatcctggccttgctcagtgggttaaagatccggcattgccgtgagctgtggtgtaggttgcaacacggctcggatccataataaatttagggtgaaggg

SEQ ID NO: 722818 - DNA, 433 bp, Homo sapiens
atggactagtatgtgtagatatagaagagaatctgacagccaggtatatggagtcatagctgaatgggcatttggggacacaagagcagagcacaagtcctctgacagcacattcttggtactcatgtcccatggcatcctggagagagaatctgcggaactgtgcatgatgagaagaaaccagatgtgctgctttatgacaccatcttccagatattcaacaaccgcgactgcctcagtctgaaggacaaacccaaggtcatcattgtccaggcctgcccgaggtggacacaaccccgtggggaactgtgggtcagagactctccagcatcccttggaagtggcctcttcacagtcatctgagaacctggaggaagatgctgtttacaagacccacgtggagaagggattcattgctttctgctcttcaacg

SEQ ID NO: 722819 - DNA, 120 bp, Homo sapiens
  misc_feature (81)..(82): n is a, c, g, or t
gaagccgggaggacttgggtgcgcctgcagggtatcggaaggccggtttggggtgttcaaaagttttctcgctctaggggnnattcttcaaggcaatcactatgtcaaccagacacaagg

SEQ ID NO: 722820 - DNA, 133 bp, Homo sapiens
ttgggaactgagagcactagcctgctgagagttcaggaggggcagattggcacagagggggaagaggaagcagagagacagagtgggcagggaagggtcagtgcccagggtggggccagcatgtggcccaggg

SEQ ID NO: 722821 - DNA, 238 bp, Homo sapiens
cggggaacagccctgggcctgtccaaagtaggaaggacagcatcattaacccctgggtactctcaaaaaagtggttcttgagtaaagacttgagagaggtgcagagtgagccctgcaggtgctgtgagacagttgcccaggattctgctaagagccatggcaggagcttgcctgaaacattggaggaccagaaaggagccatttgggaaagactagagatgacagaagtggtaacaga

SEQ ID NO: 722822 - DNA, 584 bp, Homo sapiens
  misc_feature (426)..(426): n is a, c, g, or t
accgcatactcggggttaggtgaaaactttactttagttattgcctatacttttttctaatgcttaattatatgtatttgggagttcccgtcgtggcgcagtggttaacgaatccgactaggaaccatgaggttgcgggttcggtccctgcccttgctcagtgggttaacgatccggcgttgccgtgagctgtggtgtaggttgcagacgctcggatcccgcgttgctgtggctctggcgtaggccggtggctacagctccgattcgacccctagcctgggaacctccatatgccgcgggagcggcccaagaaatagcaacaacaacaacaaaaaaacaaaaacaaaacaacaacctaaaaaaaaattttaaagtcaagagacaaattagccggttgctcttagatttagaaaagtctctggagtntccatgttgtggcgcagtggttaacgaatccgactagaaaccatgaggtttcggattccatcctggccttgctcagtgggttaaagatccggcattgccgtgagctgtggtgtaggttgcaacacggctcggatccataataaatttagggtgaaggg

SEQ ID NO: 722823 - DNA, 349 bp, Homo sapiens
caaagcaaaaaattgaaatataccatcagactcattacaaattcaaattaaaaagtgggtgactagggggcgcagtggctcacgcctgtaatcctagcactttgtaaggccaaggcagttggataacctgaggtcagaagttcgagaccagcctgaccaacatggtgaaaccccatctctactaaaaaaaaatgcaaaagttagccgggcatggtggcgggcgcctgtaatcccagctactcggggcgctgaggcaagagaaccgcttgaacctgggaggcggaggttgcagtgagccgagatcgtgccaccgcactctagcctgagtgacagagcaagactctgcctc

SEQ ID NO: 722824 - DNA, 802 bp, Homo sapiens
gatacagctagggccagtccgcatctgactgcgagttaccagttgtgtcagggagaaagatgagcatttcatactctggtcatgtgagagaggcctatggcatctgaatatagttgacgtgtaacagctagtagctactacgcagtgtccagcatacaggatatggcaaagttcaggaagacgtggtcccaactaactactcaggtgtctgctatacagtgtcgggacaaaccaggtggtacgagagccccttggatactgcttagcacagtcgccaagattaagaaacaagggcattcattctgagggagacagggataacatcctgactgagtagctaatagtgcgtagggaaactccccaaagggccaggttacgatatccccgtgaggaaagcaaaccagatggcatcttttggtcgggcgcttcaacggagaggaaaggcacaactaacaagggtgtgagactattagattaagcccttaattctttcataataacaggttacctaaccatggagtcaagttaaattggcccagttgacgctataaattggatttccaccaaaaagcagacacacatggtccgtcaagtgcacttttaatagaaagaggtagtaacgcaagtcctcttttagttaggattcgttcgagtaccaacccaagaagatttcacgattccactggagagttgaccttggaactaggaacataatttgggactggggcaggtcccttgaattttacaaaacctacagacttggctttgggggtgaaaccttgcaatagtgtccaggttacag

SEQ ID NO: 722825 - DNA, 906 bp, Homo sapiens
gcgtgtgccacttctttgtcggggcgcccctatgtgtgtaggcatgctttagtgttgtccgtgcccgttccgcaaatatgtctcgggttgtccactaaccccggggtgttgttgacacggggcctacttttaaaggagcccccctgaagcttttcgcggccccctctttagggggggatctgcccctgcaccacgagtcttcccctcctagctggtgggaccggttacaatggcgaccccgacggttctccacgcgcattcccctccgggggttttattactcgtgttcccccgctgcgagtatcagaaccgctccggggttgtttgctaccacgaggtcagcctcacaaaatgtttactataacatcgcacctttgggtgaaccaacaacctctccctggactcgataataaatgcttcatccacgcccactgtcccacaatgaagacctatccatggccaacacaattatttttcccgcaaccaaaaacatctggcgtcatcgaatttgttcaactatcgacttgatccgcctctcctctggagcctatttacaatacatacccactcagaaccgtctttttaaacaagtgggcgccccagatttgtatctctttcaccccctgacgtgctggggcacccctcgtccgaccagttctttagtgttgtcgcgggtgcagtccagtgtattataagctcctggggcggcgccctcttctgtcctccctgtgatgcggccgctctgcccccctctgttttaggcctcctcgcgtctgccccgtgatgtgtttcttctgcggggaatggggagtcaacccccatactcacagggccgttgcccctgtggtggagcctgctttttcaagcccccgggtattccttatttgtgtattacttcctcttaca

SEQ ID NO: 722826 - DNA, 227 bp, Homo sapiens
  misc_feature (105)..(105): n is a, c, g, or t
  misc_feature (116)..(117): n is a, c, g, or t
  misc_feature (139)..(139): n is a, c, g, or t
cccaggagttggaaagtgcccctgggcaacacagtgagaaaccccattctcctccaaaaaatgaaagtaattaatcctgagccatggtggtacacccctgtggtncccagctactnnggaggtctgaggtgggaggatncacttgagccccaggagatcggaggctgcagtgagccgagatcgcgccactgcagtccagcccagggtgacagaacgagactccatct

SEQ ID NO: 722827 - DNA, 866 bp, Homo sapiens
caggttatcttgtagaatagcaactatcggatttcactcgtacccggagagttttccgcttggttgaacacattggcctcagtgaagagacgctcttctggctcttccgtgacgcattacaacagccatccaggccggtgcagttacgctgcattccttacctccttcccatgtcgggggacctgcatccagcttgcagactagcagagttgaatcgatattcacttaagttaggaatggattggtgtgtcctaacatgagcctcagtcacaccgagagggagtcttgttgtcttaaaaagagcgaacgatactgggcgtggtcgtgggcctgtaggtcccagctgcgtcaaggctagtggatctcttgagtccaaggccaagtgtgagcaacatagcaagagcccagtctcagagacaacatagagggtaccatagagtaactaagtaaaagagaccctcggttcaccttagacagatctatgatttatagaatgtaaagcacgcaaatattcaggccatacttaaggacagatttttgggcaagactggggcagtccgaggtgcccttgatgggcaagggccaggagtgttaacacagtcctggctgagtaagtttctttcccttctttccaaggtcttgtcggagtaatctaacaggtcccgggttttgtcgcgagaaatgtcccttgcattctgcagctggcacgggtggtgacatctcctgttgccttttttaccattcgccggtttgtgcattgggcgaaccgcgtagactttgggaatttcccggggtgccgactaacctggcgtgggtaatggcccgcacatttgttggccccggcttgttggggctccgtcttccgg

SEQ ID NO: 722828 - DNA, 149 bp, Homo sapiens
cgtcatcgcccacgacattcatcttatcacgaagggattcatcatagaggatcaacatgcccgcatgtattccttggacatgtctgccatcatacaatttcaatgataacttcttgtccataaattttttcaactcgagagggtgagct

SEQ ID NO: 722829 - DNA, 132 bp, Homo sapiens
gctgattacaggatcttaaagacagacactcgggggggaggggcggattgctgcaccacccagccttctcttaattttcagtgcttttggtttgggcctccctgcccccatgttttctgggctgggagctcc

SEQ ID NO: 722830 - DNA, 231 bp, Homo sapiens
gaactcttctttgctgcattcctttttcttcacttacaagaaaggcctgaattgaggacttttctgtaaccaggaacattttttaggggtcaaagtgcttataatttactcaaccagggctactttttaattgctttcataacaacttactcattaggtttcccatcaattcaattcattccgatattgaccttgggctctggagggtgggggattgttaaaacacatgca

SEQ ID NO: 722831 - DNA, 226 bp, Homo sapiens
atcagtgggaaggggtgggggagggggcccccagctgcctttcctccctcacaggagccccccccagccccctttcaggagaagccaaaggccctggccaaaaataggaggaaaaaaaagaactctccatagaatgtaatttataaatggggggatatgtatataaatctttttatatgtaaataggcatatatgaagatatatatatatatagtttcctttttta

SEQ ID NO: 722832 - DNA, 690 bp, Homo sapiens
  misc_feature (358)..(358): n is a, c, g, or t
  misc_feature (440)..(440): n is a, c, g, or t
tgcaattggaaagcaggtacggtttataaaccaaccagcttaaaaaaataatctgggtaaacaccttagttacattcttctaataagccggtggatcgggtcctcccggtggccagatctccaccttctacaaaagggggggtctttttcttcatgccacctcgggggaaaagacaattggaggggccacgaggaagtaattggcctcttgtgaagcgtttctccaccagtatagactctcagtgaatcaaatcctccagtgcagatgatgccgtatttaccaagagatcgagcaatacaaaggcggtaactctggtgcaaagcaatcccggttctatatgggatttgtggcgcatanacacacgctggtaagattgagtcacattatacgtggagcttcagattgggggtacccccatggcaatatatgggtctacaantccgtcagagtggttaatcagaaagcctggttggacgcttccacaagggtcccatggaacgatcggccgacgggcgaagaagctggaaacaccttgcgacagccttatatactactgtagggacccctctgtggcccaggattatctaaaagccaagtcttacattagccacgatgtggttacccaagggaacccacctcggctgaaccgtctgatcccaggagcctggttgttgtcgtccccagtagga

SEQ ID NO: 722833 - DNA, 856 bp, Homo sapiens
gagggtctcttcatctgggaaagacatccagggagagagcaatggagaagagtgccacattaatgtcttgatatcggatatgtacgtggtcaaagaaggtttgcgctttttctagctatctgagaatctgtatctgtagtgagatagcatttgtgacacctgacaggcagcctggacatagagagggagaagaagtcagagaggtgtgacaagatagagagctatttaacggctcggctggaaatgtctgggtctgacaggtgcagtctgtggtgctcagcccacttgtcccactatctagcggtgcatgatcctcgagcaagattccgtcatggtgtctgcatttctcacagttgtaaagccacaaggactgttgcactgggcataatgaacgatcatatacgtgaaaattatttgaagacacataaagcactatacagattcgaaactccacttgagtcattataccttgctatgaatgatggtgtctttggggactgagagggtgctatccatttctcatgttttccattgtttgaaacaaagaaggttaccaagaagcctttcatgtagcgttctgtaggaattcattctctggggaagtgaggaagccaggtccacggtactgttcttgaagcagtagcttaacacactccaagatatggacatcacgggagccgctggcagaagggactgtcacgaagtgtggcatggatgttattagccagttgttggctttccctgtatcaaagcttgggcccttcccttcattggtttccaaaggcattatatgagcttgagttatatgttcactgtccccctaatattagggataacaccggaggcaagtgattta

SEQ ID NO: 722834 - DNA, 104 bp, Homo sapiens
gatcaaggtgtcagcacaggtcactgtctggatgagggctctctcctgggttgcaaacagacaccttcttgcttgtgtgttcacatggccactcaactacgggt

SEQ ID NO: 722835 - DNA, 790 bp, Homo sapiens
agccctccccccccccccccccccccccccccccccgccccccccccccccccccccgcccccccctcttaacttcggcaggtcgaggcctgggttttgcgcgcccagtctgggaagtgccctttctctcttagtgtgtgacaaggcaagcgtccggcattgcggagagaactgtggcctgctgtgcttgagtgtgcccatgtgtgtgctggttcatcttcactgctggtctggtgtggcacatttccccgctgctggtgtgcctgtgagaaacttgggcatcctgtgtgtgttggacacactgccatgagtgtcactggcctgtctttgcttgcttgattgctatgtgccctgcctgtcctgtggactggtgtggctgtggctgtgcagtgacagcatgtgccctggcctcaccaacacggtgactgcggtgaagaattgctcagattggctcagtccccaatccttgcttcttgggttgggtgcttgccaagcactcttgcttgcatgaacctggggtgctgctccagtgctgttgatcagctgtcccttttcctggccactctgtaaagttattgtagttgtcttgtgctggagtggtgctgggacattgtgcccaccctgaggtgccgcgatggcttgccgcccagtcgggcaccccaggtccggtgtttgtggagcttgcccgttgacgtgctgtacccctacttcatggtccagaaggagatggtgccagccaagccacccaagggcctcgtgggccgagtggtctcctggtatttagagaatt

SEQ ID NO: 722836 - DNA, 221 bp, Homo sapiens
agtcgagcgccacggtatcaccacgattgttcctcttgaggtggccttctgacacagacttggtgtgcaggctggtttcgcgagccggcggcgttccatttactactctggtgagcctgtattggtataactcgtattgtaaggcttttgagatatcttgtgaccttctgattttccccgtctttggtgcttttgccccctcgaatctgcaggttggagaa

SEQ ID NO: 722837 - DNA, 195 bp, Homo sapiens
tgtgctgggtgactctgaggatccctcagacagcggaccccctgctgggctgtcgtgagggaggagggcgcttcgtcggctgctcgtaccgcgacggtccaaagaagtgttgcgcagccgtgttgtttacctgagggtgtcctggcgacgcccagcccttggcgccttggtgcccgggcgggcccggctgtctga

SEQ ID NO: 722838 - DNA, 504 bp, Homo sapiens
ggggtcctcttgttccctgctggcctgccccttgggaacaagaggacccctctttctcccatgctgcacttactccttttgctagtaaaaggggttcgtagatgtcaaaaaaaaataaaaaaaaaaaaaaaaaaaaatgtgttgtgtgggcgccgcccggggcgccccgtggaaaacgctttttaagacaccatcgcgcgtgggggcgcgcggggccccagaggggtaaggtggaaaccgtgtggcacccaagagcgggtctaccaccaaagagagagagaacgcgggggaccagacgaactagagggccggggattactctgcaccacaaataaagaaaaacgccccccggggggggaacacaggcgacggtcttgcgagaaacaaaattcgcccaggaggaggcgttcgcggagcgacgcacacaacaggggatctatcaaacaaacggaggagtcccacgaggaggactcgcaattaccattgaacgccccgacagagaga

SEQ ID NO: 722839 - DNA, 1467 bp, Homo sapiens
  misc_feature (964)..(964): n is a, c, g, or t
  misc_feature (1030)..(1030): n is a, c, g, or t
ggtgattctgagtacacactgcacggtgtggtgcacccacataatacacctcagctcgcgcactcgttgtgcacgatcgcaagtgagcgaccgtgtgtggagcaaccaaaccacctttgtgtcccgcccagatgattaaagatatacggctcgtatatatgtataattggttgaacaccccgggggcgcccacaaatagagaaagtaatttggtcttcccccccaactaggggggaaaaagaagtgagaaacaatattttaattctccccccgcggcccgatataatattatttccctacaaggggggttttattacccgcccccctgatataacgcgttgtgcgagcgaaaaaaatgggaaagtgtacagtcttaagaaaaaaatcagagcctttggcgcaaaaggggagagagccccccaaaagcctcttaaaagaacccccctccccgggtagaaccctcagatagccggagcgcctatcctccttatatgagaacccaaggcttaaaaaaaggaaggctaaccacacccccgctgcttctaaagatggtgagggcacagaaaaaatatggtggggggagaacaaactttatataataaaggttataagagggcccgaaacaacaaaaacgccttatccccggaaagcccctttgggtagaaatataggcttgggttgtggtccccacaaggagtataggaaatatccctttaaggtgtcacaacaggtgtgtgaaagaaatgttgtggcccccaccccacgggaaagcccccgttctgtagagattgccccccctgtggtgaaaaagattttatacactcgctatatagtcccgcacacaaagagaggagacacacagtcttgtcttctgtggggacacaacacatagagggagaaaaacaacccctctgttatagagagagagagatgtatatataaaaaatgtttaagaacacacccnactaaagtaagcgtcctataaaaagacacgctcacccactatttaaagagagaggcgttttcaaangtgttcacaacaacaccccaccttacactcttataagaatttcccacaaacatatataatctggaaactctcctctcacacacacccacattgtggagccacaatctattcacccctatatatgagagaaactaaatggttatgataataaagtaaacactgagaaacactttctcctccgcaatataagctctgggtacaagagattaaaacacacctgagacactgaacacattaacagcccaataattctacacatcaaccacacaagtcattattaccctcacctgtcaaacccaaacacacacggcaagctacataaggaaaggttaaaaaaagtaaaaggaaactcggcaaattcttaccccgcctgtttacccaaaacatcacctttagcatcaccagtattagaggcaccgcctgcccagtgacacata

SEQ ID NO: 722840 - DNA, 1382 bp, Homo sapiens
ggtccagatcggcggtcccgcgggtctgatctcgtagccttcaaccacgctcgtaatgagtacggagagaacaagatactcggggtacttcatcgtatccaacgcctctcgaatacgtccacttccgcatttactctcgtctcgcctaagctaactcgtcctgggcgactcatccttcatacgagtccatcatccatgacttcatggtgaactcatgcacagatactcgagatgcgtcgggtaagactatcgactatcctggtcctgaaccatatcattgacgccgtcccatgcattcgtatgcatgcaatctaattggcgcacctcgaacgttgggcatgaggcacgctcgctttaaacaggtacactgggtatcaaagtgttgctaacccatgtcacggtccctttctatacaattcttaaccttcatctgcgtggcagcccttacttgagtttatccggaacaccgtcggactggaagttgatggcccatgcatggtgaacaggggcggttggaatgaccctacttttcatttcactccgcctgaaccattagggtctccgcacgcgcaaagtaaaggtctgcccgtaaggggagaccttcaacgggacggcagtcctttgcgcgtaggaaacgccatgttgcaacgggatacgcgccacggacagttcgggacaggtgacgctgaacgtacctccctggcgatgtttccgcaaagggaaccaactccaatatggcagaacggcctcccagagtccaaggtaacacgcaattgcaaaggctaaggcggggaaggcttgataataaccgcgcctacagatggcaaatctggccacgacgtgggagataaagcgccgctaagggcccgctatatgaggggcaccctttgggggcaaaggaacacaaaaaaatgggctaggagatatacccacagggggcaccgtttgcttgaggagacgtccatattacagctttaggctatctttgggaggcgtatttccgttaaggcaccccgggacctgcccgggggagagacgatcactataacgttcaatccggtggggttcgaaaagtttgttccctccttggggacagggaaatcctgttcgggagtgtttgttacgccctacaggaaacttctgaacggagggaactatcgtttgatgaggccccactatatatccaggaaggccataaggaaacatagggtgtgaatatggatatcccacacctcccttttgtgaagcacaacagatcctacttttagcgcaaagacaagagtatgcgtgttggtgcagtccttgtggtagcgctctatggggcacgacggtatcatttggaggagccattggcccgccgcgggtacggttattactttcat

SEQ ID NO: 722841 - DNA, 513 bp, Homo sapiens
cgtgcgggaaaggtgttaaaaaaaagggtttttttttaaaaaaaaataaaaaccgtttcggaaaaagtgaatatgggaaaaggaaagccgaattcccctcttcgcccaatgcgccaccatgtttacaataccctgtcccggtttaaaaatagggaaaatgcaaaaaagactgtgcccccgccaaagaagggtacataatccacttgaggttatatttaaaaagagaatgcccgcccacggtttaaagattgttctgggcaaccaggtgccacatttgtcttcaaatggcaaaggtaggcagtaggagatctttagggcccaaaaactcaaagcagtgttccaacgaaagatttgtgaaattattcatctgtactttttgaattgtatgtagccttggcaaaattgcctaagacaatgagttagactccatcttgcaaagagtcacgtgcagctaagccaagggtgtggccatgtacatcatgctgtgaaaaaattaaaggcagcaataaacag

SEQ ID NO: 722842 - DNA, 336 bp, Homo sapiens
  misc_feature (150)..(150): n is a, c, g, or t
agtcctctcactccccattcccctttctgtgtaaaactggttggaagaaatgatctgacctaccgtgtttgactgtcgtagatacccattcagagagggtcccacccggcccaaaggaggactgccaaagccacacatcacaagccttgntgggtttcccctctcagtctattactattagatcatacccttcttgtccaatcatatttctacacagtccatagtctgttgaacctaaacataaaaatggacaattcccctgtatcttggggtcttcattctgagggctcacatacaattatgatcaaataaatttgtttgctttttctcctgtta

SEQ ID NO: 722843 - DNA, 247 bp, Homo sapiens
gcgtcgacgtagttatgagggagaacagagatagagacatctgggaggatccagagtgaatgtgaccagcagtctgagccaggccgggtgaggagaggggagaggaggggggaagggagaggagagggtagaggggggcgatgggagaggggagagagggaaggagagggatgagaaggagagaagaaagagaggtaagtccttaaggtctcaaacctacacaaaggtcgacgcggccgcgaattta

SEQ ID NO: 722844 - DNA, 192 bp, Homo sapiens
atttatatggtttttagggaaaaaaaatgctataaactgcaaatttgaaattcaaatgggttgttcccctgagaccaaaaaaaaaaaaggagttttaaaagggataatttgttggagccaataaagctttttgttgatgaacaaaaaccaatactgctgggccctgagaataaaaactcatgcccccttgta

SEQ ID NO: 722845 - DNA, 285 bp, Homo sapiens
atcaagaacgcttgcaacggtcagtgcctaccgtacagtgggagaaccgcttcgtgtctgtgtacagtaaggacaaccccaacctgctgtatcaacagtgtgtggcttcgcagtgccgcatcctgcctcaagtgccgcaccagctcatgaggcgttcacccacaaggcacggggtatggaacctgccgacatgaggttactaaggagcgcacagatcagtgtttcctgcgtgtggacgatgagtcaatgcagcgcttccacaaccgcgctgcgtcagattctcat

SEQ ID NO: 722846 - DNA, 202 bp, Homo sapiens
gtgttcgcctactgtaggatcctcgtgctgtaggggtgtgtggtccgtttaccccactatgtgaagatgtcagaccaggctagctggctcagcctcatcaagtacgtcctctatcgtgttacaatcctcttcttcttcgtcgctcggcagccggatcttctgcttcggcatctggatcctccttgccaagaccagcctcgtg

SEQ ID NO: 722847 - DNA, 579 bp, Homo sapiens
  misc_feature (421)..(421): n is a, c, g, or t
acgtcatgatgagctaatctgacaatttttttttttctcacagtttggtaaatgtcaataatttaaaaagacatgggagttcccgtcgtggcgcagtggttaacgaatccgactaggaaccatgaggttgcgggttcggtccctgcccttgctcagtgggttaacgatccggcgttgccgtgagctgtggtgtaggttgcagacgctcggatcccgcgttgctgtggctctggcgtaggccggtggctacagctccgattcgacccctagcctgggaacctccatatgccgcgggagcggcccaagaaatagcaacaacaacaacaaaaaaacaaaaacaaaacaacaacctaaaaaaaaattttaaagtcaagagacaaattagccggttgctcttagatttagaaaagtctctggagtntccatgttgtggcgcagtggttaacgaatccgactagaaaccatgaggtttcggattccatcctggccttgctcagtgggttaaagatccggcattgccgtgagctgtggtgtaggttgcaacacggctcggatccataataaatttagggtgaaggg

SEQ ID NO: 722848 - DNA, 575 bp, Homo sapiens
  misc_feature (417)..(417): n is a, c, g, or t
aacaaaaactacttgaactgattaataaattcagcaaagtagcaggatacaagattaaccttcagaaatcaggagttcccgtcgtggcgcagtggttaacgaatccgactaggaaccatgaggttgcgggttcggtccctgcccttgctcagtgggttaacgatccggcgttgccgtgagctgtggtgtaggttgcagacgctcggatcccgcgttgctgtggctctggcgtaggccggtggctacagctccgattcgacccctagcctgggaacctccatatgccgcgggagcggcccaagaaatagcaacaacaacaacaaaaaaacaaaaacaaaacaacaacctaaaaaaaaattttaaagtcaagagacaaattagccggttgctcttagatttagaaaagtctctggagtntccatgttgtggcgcagtggttaacgaatccgactagaaaccatgaggtttcggattccatcctggccttgctcagtgggttaaagatccggcattgccgtgagctgtggtgtaggttgcaacacggctcggatccataataaatttagggtgaaggg

SEQ ID NO: 722849 - DNA, 568 bp, Homo sapiens
  misc_feature (410)..(410): n is a, c, g, or t
ctcaatgcagtggtaaggatcaggcattgccatgagctgtgctataggtcaaagatgcaactggggagttcccgtcgtggcgcagtggttaacgaatccgactaggaaccatgaggttgcgggttcggtccctgcccttgctcagtgggttaacgatccggcgttgccgtgagctgtggtgtaggttgcagacgctcggatcccgcgttgctgtggctctggcgtaggccggtggctacagctccgattcgacccctagcctgggaacctccatatgccgcgggagcggcccaagaaatagcaacaacaacaacaaaaaaacaaaaacaaaacaacaacctaaaaaaaaattttaaagtcaagagacaaattagccggttgctcttagatttagaaaagtctctggagtntccatgttgtggcgcagtggttaacgaatccgactagaaaccatgaggtttcggattccatcctggccttgctcagtgggttaaagatccggcattgccgtgagctgtggtgtaggttgcaacacggctcggatccataataaatttagggtgaaggg

SEQ ID NO: 722850 - DNA, 178 bp, Homo sapiens
ggtaccctttcacgcatcaataaggtctgcgcactgtagctataggcagcgtcaagtgaggcgctttccgtcgcatagttgacggtgcattccacgcccgcaagtttattgagagtgcgtggacgtggttggcacagttagcgcaggagagccccaggagggcaagttctacatgcct

SEQ ID NO: 722851 - DNA, 903 bp, Homo sapiens
  misc_feature (355)..(355): n is a, c, g, or t
ggaccagagaagctgaggagcatggaccagacccgcagtgctggcaccatgacgctcggccgcttcgtgctagccctgatgttgaggggcgctccccggaagatggtcggctttgattctgtcctcaatgattccgctccacggccacatgcaccgggcattctgacccctgtcgtgcggtccgcactacccctattaccttgcgccacactcagcatgctggtctcccgacgacgcggtcctgctgtcgtctctccacgtgcttgcccgtgctcgccctcgcagggcgctcccttgaccctcgaggttgcacactgcactgccactccaaggcctggtgagacacgcgtcgggnccggtctccctgagggcttggcccggcgcgctgatggcatgggtcagggtgacggacttcgtgccgccccgtgtctgccgtggagccggaggtgcacaccccttcctgtgatagcggtcgcccacatgagatcctggggcatctaggctgatgatagacggggccacaaagtgtaagtctggagacgcccgacagggcgcgggcacgaccccgtgggtgtatctagcggagacgccccgtgagaaaggttggactggggctactgcgactgcggaccacgggatcaggtaccgacttcgttggagggcaaaaacatgagtttgagaggcacacgcggaagtatatgcaaagctggagttggggcaacagactgctagcagccactgggatgaatcctgatgaagtcaacccattgaacagcaagttgcacgcatgcagagtgaagggaagaggcaaaacaaacccggggcgggacatgggccctatcccattaagtggagcatgcccgttgccgagaatgaagaaataagatcgtggtgacaagacac

SEQ ID NO: 722852 - DNA, 500 bp, Homo sapiens
  misc_feature (386)..(386): n is a, c, g, or t
  misc_feature (388)..(388): n is a, c, g, or t
gagataccgtcaactggccagaaccaggaaatattttaagaaaatgtagaaacagtcataataaataatttttaatattgataattagaggaagactctaaaatatgaggtgaggagttcccgtcgtggcgcagtggttaacgaatccgactaggaaccatgaggttgcgggttcggtccctgcccttgctcagtgggttaacgatccggcgttgccgtgagctgtggtgtaggttgcagacgcggctcggatcccgcgttgctgtggctctggcgtaggccggtggctacagctccgattcgacccctagcctgggaacctccatatgccgcgggagcggcccaagaaatagcaacaacaacaacaaaaaaacaaaaacaaaaananataaataaatttgtcacttagcttgtcatcagagagttctgcaagtttaatcttttgttaaaaacacagcttatcattaatacttcctgtgaaacggagcgtccacttaggc

SEQ ID NO: 722853 - DNA, 513 bp, Homo sapiens
  misc_feature (18)..(18): n is a, c, g, or t
  misc_feature (21)..(21): n is a, c, g, or t
  misc_feature (24)..(24): n is a, c, g, or t
  misc_feature (339)..(339): n is a, c, g, or t
  misc_feature (342)..(343): n is a, c, g, or t
  misc_feature (349)..(349): n is a, c, g, or t
  misc_feature (353)..(353): n is a, c, g, or t
  misc_feature (475)..(475): n is a, c, g, or t
  misc_feature (477)..(477): n is a, c, g, or t
  misc_feature (481)..(482): n is a, c, g, or t
  misc_feature (484)..(484): n is a, c, g, or t
aagcaggatcccccccgngangcntgagaacttcttataaaggcaaattctcagcgcttgtaccagacctactgaatctaaaactctggccatggggcccaggaatctattttaaaaagctctccagggagttcccgtcgtggcgcagtggttaacgaatccgactaggaaccatgaggttgcgggttcggtccctgcccttgctcagtgggttaacgatccggcgttgccgtgagctgtggtgtaggttgcagacgcggctcggatcccgcgttgctgtggctctggcgtaggccgtggcagatacagcttcgattcgacccctagcctgggaacctncanntgccangggnacatgatgtaaaagacatctatataaagtactaattatagaactgtgtggggagttcccatcgtggcgcagtggttaacgaatccgactaggaaccatgaggttgcgggttcgtcccccgcntnatcnntnggataaggatctggcattgttatgagctg

SEQ ID NO: 722854 - DNA, 319 bp, Homo sapiens
agttggttagagcgcacctttgataagggtgaggtcggcagttcgaatctgccgagacccaccaatcttgtgcgggaaaagcctgtagaaatacggggccatagctcagctgggagagcgcctgccttgcacgcaggaggtcaacggttcgatcccgtttggctccaccatttacgttgtgatggttgttggctgtagttgcttctgcgttagagtttagaaatgagcattccatcatgcgatggtgaatgttgatttctagtctttgattagatcgttctttacaaatttgggtatgtgatagaaagatagactgacc

SEQ ID NO: 722855 - DNA, 414 bp, Homo sapiens
cattctcttgcttgcatccttgctgttatagggcatctcctccggctcctgctcttgggttgcatggtgccacatctgtgcagtaggtttaggagaagctgtgatgccttctgactgcagcagtcctgacaaagcactttgtgaacccctccgggacataagggcatcaaactaggaacaaaaacacagtcttgactgtgatttggtgattttaccacatacaaggcccgaaagccaattgaagacgagaaaagaagacaaatctcttgccagcaggagtaagattgtacaggagtctgagtatacatcagggcaagccaagagacagggacaaacagagagaaaaggttcatgcaattatgaatataacctggagggggctttggaattagattacaacagtaacagagagtt

SEQ ID NO: 722856 - DNA, 335 bp, Homo sapiens
tgctacctcagggacaaagtggtcgtggggactctgttatggaacatctataaccgaataccaattgcaaggaagatcattatggacggtgagcagcatgaagatatcaatgatgtagccaagcttgtcaacactcatgaagaatgaagccccactgtggaattggcaaacgcagtacgtctcctgagaggaggttgaatggataaaggagcatcttctttttcagcagactgtctctgtgtatgagtgtgaataatcaagtcctttgtgaatattcacaaatgtgtaggtaaattgttaatgttgacattgtgaaataaattatgcttgttcta

SEQ ID NO: 722857 - DNA, 674 bp, Homo sapiens
  misc_feature (500)..(500): n is a, c, g, or t
  misc_feature (503)..(504): n is a, c, g, or t
  misc_feature (510)..(510): n is a, c, g, or t
  misc_feature (514)..(514): n is a, c, g, or t
  misc_feature (636)..(636): n is a, c, g, or t
  misc_feature (638)..(638): n is a, c, g, or t
  misc_feature (642)..(643): n is a, c, g, or t
  misc_feature (645)..(645): n is a, c, g, or t
agccaatcaaatctatgtagtaccttctgatatattattagagaattttaaaatatcaatgtaataataggaagcacatataatttcatagctgaaattatataggtgcaatttttagctgtcaaagtggtaataatcaacatcaataaaactacaaggaggagttcccgtcgtggcgcagtggttaacgaatccgactaggaaccatgaggttgcgggttcggtccctgcccttgctcagtgggttaacgatccggcgttgccgtgagctgtggtgtaggttgcagacgcggagttcccgtcgtggcgcagtggttaacgaatccgactaggaaccatgaggttgcgggttcggtccctgcccttgctcagtgggttaacgatccggcgttgccgtgagctgtggtgtaggttgcagacgctcggatcccgcgttgctgtggctctggcgtaggccgtggcagatacagcttcgattcgacccctagcctgggaacctncanntgccangggnacatgatgtaaaagacatctatataaagtactaattatagaactgtgtggggagttcccatcgtggcgcagtggttaacgaatccgactaggaaccatgaggttgcgggttcgtcccccgcntnatcnntnggataaggatctggcattgttatgagctg

SEQ ID NO: 722858 - DNA, 917 bp, Homo sapiens
agccaatcaaatctatgtagtaccttctgatatattattagagaattttaaaatatcaatgtaataataggaagcacatataatttcatagctgaaattatataggtgcaatttttagctgtcaaagtggtaataatcaacatcaataaaactacaaggaggagttcccgtcgtggcgcagtggttaacgaatccgactaggaaccatgaggttgcgggttcggtccctgcccttgctcagtgggttaacgatccggcgttgccgtgagctgtggtgtaggttgcagacgcggagttcccgtcgtggcgcagtggttaacgaatccgactaggaaccatgaggttgcgggttcggtccctgcccttgctcagtgggttaacgatccggcgttgccgtgagctgtggtgtaggttgcagacgtccctgcccttgctcagtgggttaaggatccggcgttgccgtgagctgtggtgtaggttgcagacgcggctcggatcccgcgttgctgtggctctggcgtaggctggtggctacagctccgattcgacccctagcctgggaacctccatatgccgcgggagcggcccaagaaatagcaacaacaacaacaaaaaaacaaaaacaaaaagataaaaagtgcaaaaacaactttctagcatgtcacgctcagaccttcagcttcaacgttagatgagaggagtataagctttctgattagatggtctccactttcaaaggttaccatgtccttacttttccatgtgtacctgtaagatttttctgtcatctgtcaaaagtaaaggcaaaacagaaaaggaaaaaaagaattatccttcacttctcatcacagcagatccaagttaccaaggcttaccgaatctgctccatggcttccctcgtcagggtcctgggcggg

SEQ ID NO: 722859 - DNA, 312 bp, Homo sapiens
gtggaaccgtaatcacaggtcgtcgtaggtactcatataacgtggaacatatgaggtcggtcctttggggtctggctcaccaacttagcaggttttcaaggttggttcatgtcgtagccggtttcagaatctcattccttacttttttgtttgggagacggggtctggctcggccacccaggcgggaggaggtgcaagggtgtgatcagggctcacggcagtctcaaactccggggctctagtgatatttcttcctcagcctccgtgagttagctgggactacagtggtgtgccacgacatgtgggtgataa

SEQ ID NO: 722860 - DNA, 227 bp, Homo sapiens
cggacagagtcatgtgatactttttgattataaccagtgtagcagggtgaagtggttatctcatcatggctttgattttcatctccctgatggctaatgatgtttaacatcttttcatgtgcctcttggcaattttatgctgtctctggagcaatgtctgttcagatcctttgcccatttttaaataggattatttgtccttttattgtattgtgagagttctgtgt

SEQ ID NO: 722861 - DNA, 147 bp, Homo sapiens
  misc_feature (78)..(78): n is a, c, g, or t
gaaatcctgcgaagaaaaaaacttctgatgtaataaatatgattatctcttatcgaatgcctttttggacatgaagtntgtggtggccttggtatgtactttctcgttttacatcactccatcattggtatatggttagtgtgtagg

SEQ ID NO: 722862 - DNA, 652 bp, Homo sapiens
gcttgatccagagtctgtctgaattaaatccctgcccctcacctcatttcatggtttgttattcctccgtgccattaagaaacaccctccaggagttcctgtcgtggcgcagtggttaacgaatccaactaggaaccatgagcgttgtgggtttggtccctgcccttgctcagtgggttaaggatccggcgttgccgtgagctgtggtgtaggttgcagacgcggctcggatcccgcgttgctgtggctctggcgtaggctggtggctacagctccgattcgacccctagcctgggaacctccatatgccgcgggagcggcccaagaaatagcaacaacaacaacaaaaaaacaaaaacaaaaagataaaaagtgcaaaaacaactttctagcatgtcacgctcagaccttcagcttcaacgttagatgagaggagtataagctttctgattagatggtctccactttcaaaggttaccatgtccttacttttccatgtgtacctgtaagatttttctgtcatctgtcaaaagtaaaggcaaaacagaaaaggaaaaaaagaattatccttcacttctcatcacagcagatccaagttaccaaggcttaccgaatctgctccatggcttccctcgtcagggtcctgggcggg

SEQ ID NO: 722863 - DNA, 1058 bp, Homo sapiens
  misc_feature (224)..(224): n is a, c, g, or t
  misc_feature (243)..(244): n is a, c, g, or t
  misc_feature (248)..(248): n is a, c, g, or t
  misc_feature (468)..(468): n is a, c, g, or t
  misc_feature (480)..(481): n is a, c, g, or t
  misc_feature (492)..(492): n is a, c, g, or t
  misc_feature (502)..(502): n is a, c, g, or t
  misc_feature (507)..(507): n is a, c, g, or t
  misc_feature (515)..(515): n is a, c, g, or t
  misc_feature (518)..(519): n is a, c, g, or t
  misc_feature (541)..(541): n is a, c, g, or t
  misc_feature (555)..(556): n is a, c, g, or t
  misc_feature (559)..(560): n is a, c, g, or t
  misc_feature (577)..(577): n is a, c, g, or t
  misc_feature (588)..(589): n is a, c, g, or t
  misc_feature (594)..(594): n is a, c, g, or t
  misc_feature (601)..(601): n is a, c, g, or t
  misc_feature (617)..(617): n is a, c, g, or t
  misc_feature (634)..(634): n is a, c, g, or t
  misc_feature (641)..(641): n is a, c, g, or t
  misc_feature (653)..(653): n is a, c, g, or t
  misc_feature (656)..(657): n is a, c, g, or t
  misc_feature (673)..(673): n is a, c, g, or t
  misc_feature (676)..(676): n is a, c, g, or t
  misc_feature (678)..(679): n is a, c, g, or t
  misc_feature (684)..(684): n is a, c, g, or t
  misc_feature (688)..(688): n is a, c, g, or t
  misc_feature (691)..(691): n is a, c, g, or t
  misc_feature (721)..(721): n is a, c, g, or t
  misc_feature (726)..(727): n is a, c, g, or t
  misc_feature (730)..(730): n is a, c, g, or t
  misc_feature (732)..(732): n is a, c, g, or t
  misc_feature (744)..(744): n is a, c, g, or t
  misc_feature (753)..(753): n is a, c, g, or t
  misc_feature (760)..(760): n is a, c, g, or t
  misc_feature (780)..(780): n is a, c, g, or t
  misc_feature (790)..(790): n is a, c, g, or t
  misc_feature (795)..(795): n is a, c, g, or t
  misc_feature (797)..(797): n is a, c, g, or t
  misc_feature (800)..(800): n is a, c, g, or t
  misc_feature (829)..(829): n is a, c, g, or t
  misc_feature (854)..(854): n is a, c, g, or t
  misc_feature (1043)..(1043): n is a, c, g, or t
ggctcttttaaatgaccccaggcgtcgtgtattgaatcctagactcacgtccgtctcgccggcgcccgagccagtccgcgcgcaccgcgtctgcgtccccgaaagccccgcccgcaagggctgccctgcctacctggtctccgacgtgctcgtctggagggcggtgcgaggggccgagccgacgagatgttcttgctgcctcttccggctgcggggcgagtagncgtccgacgtctggccgtnnacgnttcgggatccggagtcttccacgcagacatgacgaagggccttgttttaggaatctattccaaagaaaaagaagatgatgtccacagtcacaagtgcaggagagaattttgataaattgttagctggaaagctgagagagactttgaacatatctggaccacctctgaaggcagggaagactcgaaccttttattgggcttgcatcaggaccttccccangccgtggtgccnngttggccctcnggcaaaacanggcangcctggantcnncgaacacggaaaacctggcctnatggcaaaaaaaanntcnnagctgctgttgccccgnggtgccggccnnttcanaacctgnggctctcgtctgtggnggtggatccctgtgggnacgctcnggctgctgcggnggnngcggtgcttggtctcnctnanncggtngccnaangcaaaaaaaaaaaatggctgtgtcggcaangctcnntgnangtggggatccgnaggcctggncaaaagnagtcctgtttgcttctgggncaaacttggnccgcnanttnatgaaaacgcacgcaaataaaataacgcnaacacaatttgccgaaataattganagaatctcaaaagtgctagtagtaaaaccgaggtccatatcagacccaagtcttggattgaggaacaggcaatgggatcattcctcagtgtggccaaaggatctgacgagcccccagtcttcttggaaattcactacaaaggcagccccaatgcaaacgaaccacccctggtgtttgttgggaaaggantacctttgacagtgg

SEQ ID NO: 722864 - DNA, 329 bp, Homo sapiens
gatggatcttcatccgaagaggtgtggtccctcgcaaaggagtagatccggatgaatgagcgaagctctatctcacatatgagctaacacaacgctgaccctaactagagaggaggtggacgagtatatatagtctagggccacgaatgggtaagttggggatatcctctctgcgtcatcgaaaccctatacaagtagaccactacagccatttatttggggggccttcttatattgctttccgcagggttcaccgacggaagcaatagggtttcgatgagggtttgatgacagggtttgatgaaaggtttgatgacagggtttgatga

SEQ ID NO: 722865 - DNA, 485 bp, Homo sapiens
agccaatcaaatctatgtagtaccttctgatatattattagagaattttaaaatatcaatgtaataataggaagcacatataatttcatagctgaaattatataggtgcaatttttagctgtcaaagtggtaataatcaacatcaataaaactacaaggaggagttcccgtcgtggcgcagtggttaacgaatccgactaggaaccatgaggttgcgggttcggtccctgcccttgctcagtgggttaacgatccggcgttgccgtgagctgtggtgtaggttgcagacgcggagttcccgtcgtggcgcagtggttaacgaatccgactaggaaccatgaggttgcgggttcggtccctgcccttgctcagtgggttaacgatccggcgttgccgtgagctgtggtgtaggttgcagacgacggctcggatcccgagttgctagctagctatggcgtatggccactggctacagctccgattca

SEQ ID NO: 722866 - DNA, 643 bp, Homo sapiens
  misc_feature (74)..(74): n is a, c, g, or t
  misc_feature (79)..(79): n is a, c, g, or t
atatgtgacacatgttccacataccacataccagcaaatggtttctttttctttccttttcttttttaaaaganttttnaggagttcccgtcgtggcgcagtggttaacgaatccgactaggaaccatgaggttgcgggttcggtcctccctgcccttgctcagtgggttaaggatccggcgttgccgtgagctgtggtgtaggttgcagacgcggctcggatcccgcgttgctgtggctctggcgtaggctggtggctacagctccgattcgacccctagcctgggaacctccatatgccgcgggagcggcccaagaaatagcaacaacaacaacaaaaaaacaaaaacaaaaagataaaaagtgcaaaaacaactttctagcatgtcacgctcagaccttcagcttcaacgttagatgagaggagtataagctttctgattagatggtctccactttcaaaggttaccatgtccttacttttccatgtgtacctgtaagatttttctgtcatctgtcaaaagtaaaggcaaaacagaaaaggaaaaaaagaattatccttcacttctcatcacagcagatccaagttaccaaggcttaccgaatctgctccatggcttccctcgtcagggtcctgggcggg

SEQ ID NO: 722867 - DNA, 186 bp, Homo sapiens
cgaggatctcaagctccaacaagaaaatcgcagatgtatttaacgcatctgagaataaatacaaagattgtaaagcaattggcttgtctaagtaagtctaaatatctgctcaaggtattaaattgaattaggaattcaatcctcttatttaaagggatgtattgtggcttctttgcagcattcaca

SEQ ID NO: 722868 - DNA, 178 bp, Homo sapiens
tgtgatgtgactctgagctgtcgccatataagtggaatgactgagagtcgggtacaattgctcacgcttgtaattccagcactttgggaggccgaggcaggcggatcacctcagatcgggagttcaagaccagcctgaccaacatggagaaaccctgtctctcctaaaaatacaaaaa

SEQ ID NO: 722869 - DNA, 242 bp, Homo sapiens
tggtctctacatggtatcatcctccaaaagggaacgcggtttcatttggaacagaatggtctatgccacaggttacacacatttcttgaattaaccacatcctttcttccatttcatgacgctctttataaatggactcggccaggtggctggattacaaagataagaaataaaggggccaggcgtagtgggctaacaccggtaatcccagcactggggctcgtgcgggggtaccgagctcg

SEQ ID NO: 722870 - DNA, 709 bp, Homo sapiens
tttttttataattattttattttttttgcctttgccaaaataaggttttattttgaaagtcatttgatgaaagtcatttgaaagacactgaggagggaaggaggcctaagacccaacagatgtaggatccagatctggattcgtgccagccccaccaatggtctgtcaggccaagaaggtgctttctttggtaattcatgttttttaacttcctggagaagagatcttttcccacaagccatcttcattttttttgtagagtagggctttatttccagaaaacagtgtgtgagctggagatgggtgtttttttaaaaacatcaaggtagatctaatatgttcaacaaagtggggtggctcagccagaggcgaagtggaaagattctctagtatttgcttgtcatcttggtgcaaccagaaatccacatgtggaaatggtgtccaggagtacggtcctatacgaagttgttctgtctctgcatcataaatgctaatcattggtcctcctgctaaagttcgcgcagcacgaagctgctcctccggaccccgatcttgaaaggatgctctgtaaatctctgcagtcttaatgttgacagcaatgccatatattaccggaaagtgggttttcgttttcttcccggtcatttaattctgtcacacataatgtcactaagtgaatgtcatcttcttgcctgtcaaattccctaag

SEQ ID NO: 722871 - DNA, 192 bp, Homo sapiens
ttaaaaacactagtcaggagcacgtggtacatgtctgtagtcctagctactcgggagagctgacgtgggaggatcacttgagccccagaagttgaagctacagtgaactatgatcacaccctgtactcccagcctaaagtgacagagtgaaacccctgtctctaaacagaaagttggttgggcgtacgggga

SEQ ID NO: 722872 - DNA, 148 bp, Homo sapiens
actatgaacctgctgacaggagagacatgaagcggatccagacatgatcacgagtggctgaggaatatggtgcctgtggaggtgatctcccattgtcaccccaacatcaccatcaacatcgtggacgaccacacgctgtgtataacgg

SEQ ID NO: 722873 - DNA, 801 bp, Homo sapiens
tttttttataattattttattttttttgcctttgccaaaataaggttttattttgaaagtcatttgaaaaacactgaggaaggaaggagaagacctaagacccaatggatgtaggttccaaatttggattcttgctggccccaccaatggtctctgtcaggccaagaaggttctgctttctttggtaattcctatttttttaacttcctggagaagagatcttttcccacaagccatcttcattttttttgtagagtagggctttatttccagaaaacagtgtgtgagctggagatgggtgtttttttaaaaacatcaaggtagatctaatatgttcaacaaagtggggtggctcagccagaggcgaagtggaaagattctctagtatttgcttgtcatcttggtgcaaccagaaatccacatgtggaaatggtgtccaggagtacggtcctatacgaagttgttctgtctctgcatcataaatgctaatcattggtcctcctgctaaagctcacgcggcacgcagctgctcctctggacctcgatcttgaaaggaggctctgtaggccaggcacggtggcttatgcctgtaatctcagcattttgggaggctgaggtgggcagatcacttgaggtcaggagtttgagaccagcctggccaacatggtgaaacgctgtctctactaaaaatataaaaattagccaggtgtggcagtgggcgcctgtaatcccagctacttgggaggctgaggcaggagaatggcgtgaacccagggggcagagcttgcagcaagccgagat

SEQ ID NO: 722874 - DNA, 331 bp, Homo sapiens
ggattcattgctatggctgaaggcagcgagagtggagagacctagtagatggctgtgggtccactgagagcatccactagtaaaagccaatacaagctcgcacctacccctcaggatgggctccaaaaccttctagcatgtctattgctaatgataacccctagcagagaataattggttagaattagggggtaagggaacaagccagaatatggttatcagtacaagctaatgacacatggcacgcactgaatcatgcacctaggagagtgactgctggagagctggaacccagttgcaccaagaatgagagttgggatctccaagaaag

SEQ ID NO: 722875 - DNA, 178 bp, Homo sapiens
atctgatctgatgtactagtagcgacccgcagcagttatcggaaggaatgatagaggttgggcgaaagatctaactatctcaactttaatggtaagagccggtcgtgcgtgagcgggcgtgatgagtgctagtgggcattttggtagcgcaactgtacgggggggtacgagctgaatc

SEQ ID NO: 722876 - DNA, 397 bp, Homo sapiens
catattgcctaagagggagtggttgttgagggttatgagagtattggtccgaccggaccaagtggaaagattctctagtatttgcttgtcatcttggtgcaaccagaaatccacatgtggaaatggtgtccaggagtacggtcctatacgaagttgttctgtctctgcatcataaatgctaatcattggtcctcctgctaaagttcgcgcagcacgaagctgctcctccggaccccgatcttgaaaggatgctctgtaaatctctgcagtcttaatgttgacagcaatgccatatattaccggaaagtgggttttcgttttcttcccggtcatttaattctgtcacacataatgtcactaagtgaatgtcatcttcttgcctgtcaaattccctaag

SEQ ID NO: 722877 - DNA, 2430 bp, Homo sapiens
  misc_feature (39)..(39): n is a, c, g, or t
aagctgagggcacgtgtttgcggttcagccctttgatgnccgcagcagttttaggaactcggggagaggatgtggatcagctcgtagcctgcatagaaagcaaactgccagtgctgtgctgtacgctccagttgcgtgaagagttcaagcaggaagtggaagcaacagcaggtctcctatatgttgatgaccctaactggtctggaataggggttgtcaggtatgaacatgctaatgatgataagagcagtttgaaatcagatcccgaaggggaaaacatccatgctggactcctgaagaagttaaatgaactggaatctgacctaacctttaaaataggccctgagtataagagcatgaagagctgcctttatgtcggcatggcgagcgacaacgtcgatgctgctgagctcgtggagaccattgcggccacagcccgggagatagaggagaactcgaggcttctggaaaacatgacagaagtggttcggaaaggcattcaggaagctcaagtggagctgcagaaggcaagtgaagaacggcttctggaagagggggtgttgcggcagatccctgtagtgggctccgtgctgaattggttttctccggtccaggctttacagaagggaagaacttttaacttgacagcaggctctctggagtccacagaacccatatatgtctacaaagcacaaggtgcaggagtcacgctgcctccaacgccctcgggcagtcgcaccaagcagaggcttccaggccagaagccttttaaaaggtccctgcgaggttcagatgctttgagtgagaccagctcagtcagtcacattgaagacttagaaaaggtggagcgcctatccagtgggccggagcagatcaccctcgaggccagcagcactgagggacacccaggggctcccagccctcagcacaccgaccagaccgaggccttccagaaaggggtcccacacccagaagatgaccactcacaggtagaaggaccggagagcttaagatgagactcattgtgtggtttgagactgtactgagtattgtttcagggaagatgaagttctattggaaatgtgaactgtgccacatactaatataaattactgttgtttgtgcttcactgggattttggcacaaatatgtgcctgaaaggtaggctttctaggaggggagtcagcttgtctaacttcatgtacatgtagaaccacatgtttgctgtcctactacgacttttccctaagttaccataaacacattttattcacaaaaaacacttcgaatttcaagtgtctaccagtagcacccttgctctttctaaacataagcctaagtatatgaggttgcccgtggcaactttttggtaaaacagcttttcattagcactctccaggttctctgcaacacttcacagaggcgagactggctgtatcctttgctgtcggtctttagtacgatcaagttgcaatatacagtgggactgctagacttgaaggagagcagtgattgtgggattgtaaataagagcatcagaagccctccccagctactgctcttcgtggagacttagtaaggactgtgtctacttgagctgtggcaaggctgctgtctgggactgtcctctgccacaaggccatttctcccattatataccgtttgtaaagagaaactgtaaagtctcctcctgaccatatatttttaaatactggcaaagcttttaaaattggcacacaagtacagactgtgctcatttctgtttagtatctgaaaacctgatagatgctacccttaagagcttgctcttccgtgtgctacgtagcacccacctggttaaaatctgaaaacaagtacccctttgacctgtctcccactgaagcttctactgccctggcagctcgcctgggcccaactcagaaacaggagccagcagagcactctctcacgctgatccagccgggcaccctgcttaagtcagtagaagctcgctggcactgcccgttcctacttttccgaagtactgcgtcactttgtcgtaagtaatggcccctgtgccttcttaatccagcagtcaagcttttgggagacctgaaaatgggaaaattcacactgggtttctggactgtagtattggaagccttagttatagtatattaagcctataattatactctgatttgatgggatttttgacatttacacttgtcaaaatgcagggggttttttttggtgcagatgattaaacagtcttccctatttggtgcaatgaagtatagcagataaaatgggggaggggtaaattatcaccttcaagaaaattacatgtttttatatatatttggaattgttaaattggttttgctgaaacatttcacccttgagatattatttgaatgttggtttcaataaaggttcttgaaattgtta

SEQ ID NO: 722878 - DNA, 190 bp, Homo sapiens
acgccagaggatcacttctgagtactgtggactacaggcgcacgcacatgcccagctaatttttgtattttcagtagagatggggtttcaccagtgttgaccatggatggtctcctacctccttgacctcgatgatcctgcctgcctctggcctcccgaaagtgctgcgggggtacctgagctctgaatt

SEQ ID NO: 722879 - DNA, 452 bp, Homo sapiens
gaagtaagataaaactaccatatgaaccagcaatctcactactgagtattcttccataaggaaaggaaatcagtgggatcctgcaaccccatgttgactgcagcactattcacaatagcaaagatatggaaccaacctaagtgtctcccaacagatgaatgaataaagaaaacgtggtatatatgcacaatgaaatattattcagccataaaaaaagcaatgaaatcttgcatccgcaacaacatgaatggaattggaggtcattttgtcaagtgaaatcagccaggcacagaaagtcaaataccctatgttctcatatacgtgagacgttgatgtcaaggaggtaccagagttcgaatgatgattaccagagctgagaagggtcacggtatgatagggaaataacgggagagggtcagttaacggctacaaacaacaagtcagatagaatg

SEQ ID NO: 722880 - DNA, 2288 bp, Homo sapiens
  misc_feature (39)..(39): n is a, c, g, or t
aagctgagggcacgtgtttgcggttcagccctttgatgnccgcagcagttttaggaactcggggagaggatgtggatcagctcgtagcctgcatagaaagcaaactgccagtgctgtgctgtacgctccagttgcgtgaagagttcaagcaggaagtggaagcaacagcaggtctcctatatgttgatgaccctaactggtctggaataggggttgtcaggtatgaacatgctaatgatgataagagcagtttgaaatcagatcccgaaggggaaaacatccatgctggactcctgaagaagttaaatgaactggaatctgacctaacctttaaaataggccctgagtataagagcatgaagagctgcctttatgtcggcatggcgagcgacaacgtcgatgctgctgagctcgtggagaccattgcggccacagcccgggagatagaggagaactcgaggcttctggaaaacatgacagaagtggttcggaaaggcattcaggaagctcaagtggagctgcagaaggcaagtgaagaacggcttctggaagagggggtgttgcggcagatccctgtagtgggctccgtgctgaattggttttctccggtccaggccagaagccttttaaaaggtccctgcgaggttcagatgctttgagtgagaccagctcagtcagtcacattgaagacttagaaaaggtggagcgcctatccagtgggccggagcagatcaccctcgaggccagcagcactgagggacacccaggggctcccagccctcagcacaccgaccagaccgaggccttccagaaaggggtcccacacccagaagatgaccactcacaggtagaaggaccggagagcttaagatgagactcattgtgtggtttgagactgtactgagtattgtttcagggaagatgaagttctattggaaatgtgaactgtgccacatactaatataaattactgttgtttgtgcttcactgggattttggcacaaatatgtgcctgaaaggtaggctttctaggaggggagtcagcttgtctaacttcatgtacatgtagaaccacatgtttgctgtcctactacgacttttccctaagttaccataaacacattttattcacaaaaaacacttcgaatttcaagtgtctaccagtagcacccttgctctttctaaacataagcctaagtatatgaggttgcccgtggcaactttttggtaaaacagcttttcattagcactctccaggttctctgcaacacttcacagaggcgagactggctgtatcctttgctgtcggtctttagtacgatcaagttgcaatatacagtgggactgctagacttgaaggagagcagtgattgtgggattgtaaataagagcatcagaagccctccccagctactgctcttcgtggagacttagtaaggactgtgtctacttgagctgtggcaaggctgctgtctgggactgtcctctgccacaaggccatttctcccattatataccgtttgtaaagagaaactgtaaagtctcctcctgaccatatatttttaaatactggcaaagcttttaaaattggcacacaagtacagactgtgctcatttctgtttagtatctgaaaacctgatagatgctacccttaagagcttgctcttccgtgtgctacgtagcacccacctggttaaaatctgaaaacaagtacccctttgacctgtctcccactgaagcttctactgccctggcagctcgcctgggcccaactcagaaacaggagccagcagagcactctctcacgctgatccagccgggcaccctgcttaagtcagtagaagctcgctggcactgcccgttcctacttttccgaagtactgcgtcactttgtcgtaagtaatggcccctgtgccttcttaatccagcagtcaagcttttgggagacctgaaaatgggaaaattcacactgggtttctggactgtagtattggaagccttagttatagtatattaagcctataattatactctgatttgatgggatttttgacatttacacttgtcaaaatgcagggggttttttttggtgcagatgattaaacagtcttccctatttggtgcaatgaagtatagcagataaaatgggggaggggtaaattatcaccttcaagaaaattacatgtttttatatatatttggaattgttaaattggttttgctgaaacatttcacccttgagatattatttgaatgttggtttcaataaaggttcttgaaattgtta

SEQ ID NO: 722881 - DNA, 142 bp, Homo sapiens
agtgtaaactaccggtaaaagtcaaaataggaatggcaaagactcatatcaacattgtcgtcattcgacacgtagaatcgggcaagtccaccactactggccatctgagctataaatacggtggcatcgacatagtatcaat

SEQ ID NO: 722882 - DNA, 2488 bp, Homo sapiens
  misc_feature (39)..(39): n is a, c, g, or t
aagctgagggcacgtgtttgcggttcagccctttgatgnccgcagcagttttaggaactcggggagaggatgtggatcagctcgtagcctgcatagaaagcaaactgccagtgctgtgctgtacgctccagttgcgtgaagagttcaagcaggaagtggaagcaacagcaggtctcctatatgttgatgaccctaactggtctggaataggggttgtcaggtatgaacatgctaatgatgataagagcagtttgaaatcagatcccgaaggggaaaacatccatgctggactcctgaagaagttaaatgaactggaatctgacctaacctttaaaataggccctgagtataagagcatgaagagctgcctttatgtcggcatggcgagcgacaacgtcgatgctgctgagctcgtggagaccattgcggccacagcccgggagatagaggagaactcgaggcttctggaaaacatgacagaagtggttcggaaaggcattcaggaagctcaagtggagctgcagaaggcaagtgaagaacggcttctggaagagggggtgttgcggcagatccctgtagtgggctccgtgctgaattggttttctccggtccaggctttacagaagggaagaacttttaacttgacagcaggctctctggagtccacagaacccatatatgtctacaaagcacaaggtgcaggagtcacgctgcctccaacgccctcgggcagtcgcaccaagcagaggcttccaggccagaagccttttaaaaggtccctgcgaggttcagatgctttgagtgagaccagctcagtcagtcacattgaagacttagaaaaggtggagcgcctatccagtgggccggagcagatcaccctcgaggccagcagcactgagggacacccaggggctcccagccctcagcacaccgaccagaccgaggccttccagaaaggggtcccacacccagaagatgaccactcacaggtagaaggaccggagagcttaagatgagactcattgtgtggtttgagactgtactgagtattgtttcagggaagatgaagttctattggaaatgtgaactgtgccacatactaatataaattactgttgtttgtgcttcactgggattttggcacaaatatgtgcctgaaaggtaggctttctaggaggggagtcagcttgtctaacttcatgtacatgtagaaccacatgtttgctgtcctactacgacttttccctaagttaccataaacacattttattcacaaaaaacacttcgaatttcaagtgtctaccagtagcacccttgctctttctaaacataagcctaagtatatgaggttgcccgtggcaactttttggtaaaacagcttttcattagcactctccaggttctctgcaacacttcacagaggcgagactggctgtatcctttgctgtcggtctttagtacgatcaagttgcaatatacagtgggactgctagacttgaaggagagcagtgattgtgggattgtaaataagagcatcagaagccctccccagctactgctcttcgtggagacttagtaaggactgtgtctacttgagctgtggcaaggctgctgtctgggactgtcctctgccacaaggccatttctcccattatataccgtttgtaaagagaaactgtaaagtctcctcctgaccatatatttttaaatactggcaaagcttttaaaattggcacacaagtacagactgtgctcatttctgtttagtatctgaaaacctgatagatgctacccttaagagcttgctcttccgtgtgctacgtagcacccacctggttaaaatctgaaaacaagtacccctttgacctgtctcccactgaagcttctactgccctggcagctcgcctgggcccaactcagaaacaggagccagcagagcactctctcacgctgatccagccgggcaccctgcttaagtcagtagaagctcgctggcactgcccgttcctacttttccgaagtactgcgtcactttgtcgtaagtaatggcccctgtgccttcttaatccagcagtcaagcttttgggagacctgaaaatgggaaaattcacactgggtttctggactgtagtattggaagccttagttatagtatattaagcctataattatactctgatttgatgggatttttgacatttacacttgtcaaaatgcagggggttttttttggtgcagatgattaaacagtcttccctatttggtgcaatgaagtatagcagataaaatgggggaggggtaaattatcaccttcaagaaaattacatgtttttatatatatttggaattgttaaattggttttgctgaaacatttcacccttgagatattatttgaatgttggtttcaataaaggttcttgaaattgttaaaaaaaaaaaagaccactcccaacaactctactacaagaccaaccacacgacaggcgg

SEQ ID NO: 722883 - DNA, 464 bp, Homo sapiens
tacaagctttgtgtcatcaagcattaagctaagtagattacaacgcaacacactgggaaaattctacgtggcagctcaaagttcggcccaatcttgcactaattcatattcaacatctgctaactgcaaataatattatctaatcgatctttatatggattagtcgagcgtggtgaaggcagatagttcagaattaactctggcacatatataaatctctccagaggtataaggcagctactgggtttataaaataaaactgggaaagccttatttttgtggataaacggttaatccttgacacaagtgataacttgcaacaatcctgctccctgccctcaggttatgaaactgtccatctgggcacaaatcaggtaaacaggcttaggtctcacttaaaataagtaacacaagtgtcaaaagtgtattctgtataccactcaaagcagctctgtcttttccag

SEQ ID NO: 722884 - DNA, 124 bp, Homo sapiens
agaagctgagttcatgagggttgctccagttctgatccgagagatcaccaggctgggttcaccatggagggcgatcttcctaagcagtttacacttgccggggtggtacatacaagagcccgtt

SEQ ID NO: 722885 - DNA, 312 bp, Homo sapiens
ctccagcccttgtttttgccagggtaaacacctctgtttgccccactgtcctggggtcgcttttgggaggcacaggcatgggtgtgtttggcctcattttgtatcagtccagtgtgttcctgtcatagtttgtgtctcccagggaggcccatggtaggggcctcccaggggccattggggagcacagggccaggctggggtgaggaaagctcccctgttttttgtttaattgatgagcctgggaaaggagtgtgttttgcctgcccgttacagtggagggttccgtgtccataaaacgttttttaactggga

SEQ ID NO: 722886 - DNA, 2376 bp, Homo sapiens
  misc_feature (39)..(39): n is a, c, g, or t
aagctgagggcacgtgtttgcggttcagccctttgatgnccgcagcagttttaggaactcggggagaggatgtggatcagctcgtagcctgcatagaaagcaaactgccagtgctgtgctgtacgctccagttgcgtgaagagttcaagcaggaagtggaagcaacagcaggtctcctatatgttgatgaccctaactggtctggaataggggttgtcaggtatgaacatgctaatgatgataagagcagtttgaaatcagatcccgaaggggaaaacatccatgctggactcctgaagaagttaaatgaactggaatctgacctaacctttaaaataggccctgagtataagagcatgaagagctgcctttatgtcggcatggcgagcgacaacgtcgatgctgctgagctcgtggagaccattgcggccacagcccgggagatagaggagaactcgaggcttctggaaaacatgacagaagtggttcggaaaggcattcaggaagctcaagtggagctgcagaaggcaagtgaagaacggcttctggaagagggggtgttgcggcagatccctgtagtgggctccgtgctgaattggttttctccggtccaggctttacagaagggaagaacttttaacttgacagcaggctctctggagtccacagaacccatatatgtctacaaagcacaaggtgcaggagtcacgctgcctccaacgccctcgggcagtcgcaccaagcagaggcttccaggccagaagccttttaaaaggtccctgcgaggttcagatgctttgagtgagaccagctcagtcagtcacattgaagacttagaaaaggtggagcgcctatccagtgggccggagcagatcaccctcgaggccagcagcactgagggacacccaggggctcccagccctcagcacaccgaccagaccgaggccttccagaaaggggtcccacacccagaagatgaccactcacaggtagaaggaccggagagcttaagatgagactcattgtgtggtttgagactgtactgagtattgtttcagggaagatgaagttctattggaaatgtgaactgtgccacatactaatataaattactgttgtttgtgcttcactgggattttggcacaaatatgtgcctgaaaggtaggctttctaggaggggagtcagcttgtctaacttcatgtacatgtagaaccacatgtttgctgtcctactacgacttttccctaagttaccataaacacattttattcacaaaaaacacttcgaatttcaagtgtctaccagtagcacccttgctctttctaaacataagcctaagtatatgaggttgcccgtggcaactttttggtaaaacagcttttcattagcactctccaggttctctgcaacacttcacagaggcgagactggctgtatcctttgctgtcggtctttagtacgatcaagttgcaatatacagtgggactgctagacttgaaggagagcagtgattgtgggattgtaaataagagcatcagaagccctccccagctactgctcttcgtggagacttagtaaggactgtgtctacttgagctgtggcaaggctgctgtctgggactgtcctctgccacaaggccatttctcccattatataccgtttgtaaagagaaactgtaaagtctcctcctgaccatatatttttaaatactggcaaagcttttaaaattggcacacaagtacagactgtgctcatttctgtttagtatctgcccacctggttaaaatctgaaaacaagtacccctttgacctgtctcccactgaagcttctactgccctggcagctcgcctgggcccaactcagaaacaggagccagcagagcactctctcacgctgatccagccgggcaccctgcttaagtcagtagaagctcgctggcactgcccgttcctacttttccgaagtactgcgtcactttgtcgtaagtaatggcccctgtgccttcttaatccagcagtcaagcttttgggagacctgaaaatgggaaaattcacactgggtttctggactgtagtattggaagccttagttatagtatattaagcctataattatactctgatttgatgggatttttgacatttacacttgtcaaaatgcagggggttttttttggtgcagatgattaaacagtcttccctatttggtgcaatgaagtatagcagataaaatgggggaggggtaaattatcaccttcaagaaaattacatgtttttatatatatttggaattgttaaattggttttgctgaaacatttcacccttgagatattatttgaatgttggtttcaataaaggttcttgaaattgtta

SEQ ID NO: 722887 - DNA, 104 bp, Homo sapiens
ctttcttcctgggcccccctccgggtttttgggggggtttttttttttgtgcgttcccctggggttggggggccctgcgcgccatgtggaaaatagggaataca

SEQ ID NO: 722888 - DNA, 220 bp, Homo sapiens
tataggcgctaggtgccgcagatcgctccagtgccttatgggcgacggcctcttgaaggcagcgaccattctgatcacagacagcgggcggcgcttgcaaattggcggtgaagttagccgatgcggcgttgagtgctacctcgacaacccaatagggaacagagacgaagcgtgcaatctcgcgatcgcgatcaatgaccagtttcaacgttgggcgtct

SEQ ID NO: 722889 - DNA, 910 bp, Homo sapiens
  misc_feature (908)..(908): n is a, c, g, or t
ggccatggtctgacattcttgtaaatcttaatgtctagcttatagaagccagctagattcttatatctgctttacgtcagtctgtgtgacatgtgttggttgaagtgtatgaaaacaatttgcctcacacaggtagctggaaaagggaggagtattttaatagtatttaaaaataatgtgatattctcatttgatactatgccaaaatttgacaaatgatactgtttcttaaagataatatggaaatcaaaacatataaatgaacttttagtacttgcattacaaccatttgttctgtcgtgcaatttaaatagataatttccccatgcatgattttgtgataacacatgcattcagtcattgtggaaacatacctggttcactggatggctacagatcctccaaaatattgacatatctcatcatatatatattttccattatattcatgaatatcaccaccaatcccatgagaaatatttctcaggtatgagaagccggccaggttcaagaatagcaacattacaagttttcacaaattctatttctgttaaaaccttgattgtctccttggggacaaacgacgaatggtccttttggacgtgacaggctaaacttggtcttaggagaacagtctgacgattccaaggtcggaatacagaggtggaatccttcctttcaataaaatggtttcatgaaaaatgagttacccccgacacacagttgcaaggtgtttccctacaacaccatggcttgtgcgcgatgaagggctatgcactccatctcttggcacagtgggccataccataaacgaagaggtcagaacataggaaggtacggagaggagagaagtgggaaaggacacttttgatccacatcttaaacctcggtgtcttctgtctcttggngt

SEQ ID NO: 722890 - DNA, 2232 bp, Homo sapiens
  misc_feature (39)..(39): n is a, c, g, or t
aagctgagggcacgtgtttgcggttcagccctttgatgnccgcagcagttttaggaactcggggagaggatgtggatcagctcgtagcctgcatagaaagcaaactgccagtgctgtgctgtacgctccagttgcgtgaagagttcaagcaggaagtggaagcaacagcaggtctcctatatgttgatgaccctaactggtctggaataggggttgtcaggtatgaacatgctaatgatgataagagcagtttgaaatcagatcccgaaggggaaaacatccatgctggactcctgaagaagttaaatgaactggaatctgacctaacctttaaaataggccctgagtataagagcatgaagagctgcctttatgtcggcatggcgagcgacaacgtcgatgctgctgagctcgtggagaccattgcggccacagcccgggagatagaggagaactcgaggcttctggaaaacatgacagaagtggttcggaaaggcattcaggaagctcaagtggagctgcagaaggcaagtgaagaacggcttctggaagagggggtgttgcggcagatccctgtagtgggctccgtgctgaattggttttctccggtccaggctttacagaagggaagaacttttaacttgacagcaggctctctggagtccacagaacccatatatgtctacaaagcacaaggtgcaggagtcacgctgcctccaacgccctcgggcagtcgcaccaagcagaggcttccaggccagaagccttttaaaaggtccctgcgaggttcagatgctttgagtgagaccagctcagtcagtcacattgaagacttagaaaaggtggagcgcctatccagtgggccggagcagatcaccctcgaggccagcagcactgagggacacccaggggctcccagccctcagcacaccgaccagaccgaggccttccagaaaggggtcccacacccagaagatgaccactcacaggtagaaggaccggagagcttaagatgagactcattgtgtggtttgagactgtactgagtattgtttcagggaagatgaagttctattggaaatgtgaactgtgccacatactaatataaattactgttgtttgtgcttcactgggattttggcacaaatatgtgcctgaaaggtaggctttctaggaggggagtcagcttgtctaacttcatgtacatgtagaaccacatgtttgctgtcctactacgacttttccctaagttaccataaacacattttattcacaaaaaacacttcgaatttcaagtgtctaccagtagcacccttgctctttctaaacataagcctaagtatatgaggttgcccgtggcaactttttggtaaaacagcttttcattagcactctccaggttctctgcaacacttcacagaggcgagactggctgtatcctttgctgtcggtctttagtacgatcaagttgcaatatacagtgggactgctagacttgaaggagagcagtgattgtgggattgtaaataagagcatcagaagccctccccagctactgctcttcgtggagacttagtaaggactgtgtctacttgagctgtggcaaggctgctgtctgggactgtcctctgccacaaggccatttctcccattatataccgtttgtaaagagaaactgtaaagtctcctcctgaccatatatttttaaatactggcaaagcttttaaaattggcacacaagtacagactgtgctcatttctgtttagtatctgaaaacctgatagatgctacccttaagagcttgctcttccgtgtgctacgtagcacccacctggttaaaatctgaaaacaagtacccctttgacctgtctcccactgaagcttctactgacctgaaaatgggaaaattcacactgggtttctggactgtagtattggaagccttagttatagtatattaagcctataattatactctgatttgatgggatttttgacatttacacttgtcaaaatgcagggggttttttttggtgcagatgattaaacagtcttccctatttggtgcaatgaagtatagcagataaaatgggggaggggtaaattatcaccttcaagaaaattacatgtttttatatatatttggaattgttaaattggttttgctgaaacatttcacccttgagatattatttgaatgttggtttcaataaaggttcttgaaattgtta

SEQ ID NO: 722891 - DNA, 2314 bp, Homo sapiens
  misc_feature (39)..(39): n is a, c, g, or t
aagctgagggcacgtgtttgcggttcagccctttgatgnccgcagcagttttaggaactcggggagaggatgtggatcagctcgtagcctgcatagaaagcaaactgccagtgctgtgctgtacgctccagttgcgtgaagagttcaagcaggaagtggaagcaacagcaggtctcctatatgttgatgaccctaactggtctggaataggggttgtcaggtatgaacatgctaatgatgataagagcagtttgaaatcagatcccgaaggggaaaacatccatgctggactcctgaagaagttaaatgaactggaatctgacctaacctttaaaataggccctgagtataagagcatgaagagctgcctttatgtcggcatggcgagcgacaacgtcgatgctgctgagctcgtggagaccattgcggccacagcccgggagatagaggagaactcgaggcttctggaaaacatgacagaagtggttcggaaaggcattcaggaagctcaagtggagctgcagaaggcaagtgaagaacggcttctggaagagggggtgttgcggcagatccctgtagtgggctccgtgctgaattggttttctccggtccaggctttacagaagggaagaacttttaacttgacagcaggctctctggagtccacagaacccatatatgtctacaaagcacaaggtgcaggagtcacgctgcctccaacgccctcgggcagtcgcaccaagcagaggcttccaggccagaagccttttaaaaggtccctgcgaggttcagatgctttgagtgagaccagctcagtcagtcacattgaagacttagaaaaggtggagcgcctatccagtgggccggagcagatcaccctcgaggccagcagcactgagggacacccaggggctcccagccctcagcacaccgaccagaccgaggccttccagaaaggggtcccacacccagaagatgaccactcacaggtagaaggaccggagagcttaagatgagactcattgtgtggtttgagactgtactgagtattgtttcagggaagatgaagttctattggaaatgtgaactgtgccacatactaatataaattactgttgtttgtgcttcactgggattttggcacaaatatgtgcctgaaaggtaggctttctaggaggggagtcagcttgtctaacttcatgtacatgtagaaccacatgtttgctgtcctactacgacttttccctaagttaccataaacacattttattcacaaaaaacacttcgaatttcaagtgtctaccagtagcacccttgctctttctaaacataagcctaagtatatgaggttgcccgtggcaactttttggtaaaacagcttttcattagcactctccaggttctctgcaacacttcacagaggcgagactggctgtatcctttgctgtcggtctttagtacgatcaagttgcaatatacagtgggactgctagacttgaaggagagcagtgattgtgggattgtaaataagagcatcagaagccctccccagctactgctcttcgtggagacttagtaaggactgtgtctacttgagctgtggcaaggctgctgtctgggactgtcctctgccacaaggccatttctcccattatataccgtttgtaaagagaaactgtaaagtctcctcctgaccatatatttttaaatactggcaaagcttttaaaattggcacacaagtacagactgtgctcatttctgtttagtatctgaaaacctgatagatgctacccttaagagcttgctcttccgtgtgctacgtagcacccacctggttaaaatctgaaaacaagtacccctttgacctgtctcccactgaagcttctactgccctggcagctcgcctgggcccaactcagaaacaggagccagcagagcactctttctggactgtagtattggaagccttagttatagtatattaagcctataattatactctgatttgatgggatttttgacatttacacttgtcaaaatgcagggggttttttttggtgcagatgattaaacagtcttccctatttggtgcaatgaagtatagcagataaaatgggggaggggtaaattatcaccttcaagaaaattacatgtttttatatatatttggaattgttaaattggttttgctgaaacatttcacccttgagatattatttgaatgttggtttcaataaaggttcttgaaattgttaaaaaaaaaaaagaccactcccaacaactctactacaagaccaaccacacgacaggcgg

SEQ ID NO: 722892 - DNA, 1886 bp, Homo sapiens
  misc_feature (39)..(39): n is a, c, g, or t
aagctgagggcacgtgtttgcggttcagccctttgatgnccgcagcagttttaggaactcggggagaggatgtggatcagctcgtagcctgcatagaaagcaaactgccagtgctgtgctgtacgctccagttgcgtgaagagttcaagcaggaagtggaagcaacagcaggtctcctatatgttgatgaccctaactggtctggaataggggttgtcaggtatgaacatgctaatgatgataagagcagtttgaaatcagatcccgaaggggaaaacatccatgctggactcctgaagaagttaaatgaactggaatctgacctaacctttaaaataggccctgagtataagagcatgaagagctgcctttatgtcggcatggcgagcgacaacgtcgatgctgctgagctcgtggagaccattgcggccacagcccgggagatagaggagaactcgaggcttctggaaaacatgacagaagtggttcggaaaggcattcaggaagctcaagtggagctgcagaaggcaagtgaagaacggcttctggaagagggggtgttgcggcagatccctgtagtgggctccgtgctgaattggttttctccggtccaggctttacagaagggaagaacttttaacttgacagcaggctctctggagtccacagaacccatatatgtctacaaagcacaaggtgcaggagtcacgctgcctccaacgccctcgggcagtcgcaccaagcagaggcttccaggccagaagccttttaaaaggtccctgcgaggttcagatgctttgagtgagaccagctcagtcagtcacattgaagacttagaaaaggtggagcgcctatccagtgggccggagcagatcaccctcgaggccagcagcactgagggacacccaggggctcccagccctcagcacaccgaccagaccgaggccttccagaaaggggtcccacacccagaagatgaccactcacaggtagaaggaccggagagcttaagatgagactcattgtgtggtttgagactgtactgagtattgtttcagggaagatgaagttctattggaaatgtgaactgtgccacatactaatataaattactgttgtttgtgcttcactgggattttggcacaaatatgtgcctgaaaggtaggctttctaggaggggagtcagcttgtctaacttcatgtacatgtagaaccacatgtttgctgtcctactacgacttttccctaagttaccataaacacattttattcacaaaaaacacttcgaatttcaagtgtctaccagtagcacccttgctctttctaaacataagcctaagtatatgaggttgcccgtggcaactttttggtaaaacagcttttcattagcactctccaggttctctgcaacacttcacagaggcgagactggctgtatcctttgctgtcggtctttagtacgatcaagttgcaatatacagtgggactgctagacttgaaggagagcagtgattgtgggattgtaaataagagcatcagaagccctccccagctactgctcttcgtggagacttagtaaggactgtgtctacttgagctgtggcaaggctgctgtctgggactgtcctctgccacaaggccatttctcccattatataccgtttgtaaagagaaactgtaaagtctcctcctgaccatatatttttaaatactggcaaagcttttaaaattggcacacaagtacagactgtgctcatttctgtttagtatctgaaaaccaggatagaaaaagctccatgagcagagcagcccatgtaacctttattatggctcaggccttgcaagaagggctatagagtgtggagtgacaaagccaggatttaggt

SEQ ID NO: 722893 - DNA, 311 bp, Homo sapiens
gacaacctagggtcagttttgcagcgtggtaagccatttaccaagatagttgtaggtaagaagggcagatttattagagaaattgtgaaaatatgttgcagtgggcagctcagcagagaaggggctacctgcaaagaggcaagggctggaggaaagttttatagggtcctgctgaagggtgctacgtgtggaatgaggtcattgtgcccgcaggttgtttgtgattagctgtttctaacaattgttcatacaataattgttcattattgttctcaacttggggctctccccaacctggggacccttcctta

SEQ ID NO: 722894 - DNA, 446 bp, Homo sapiens
ggatccaacaaagaggtgacttgcctaagttctaggcttctgcagtaaatttttttttattttttaatttctaatttttgtgggtacatagtaggtgtacatatttatggggtgtatgagatgttttgatacaggcatgcaatgtaaaataataaacttatggaaaatggagtaaccatcccctcaagcacatatcctttgtgtaacaaacaatccaattatactctgttattttaaaatgtacaattacgttttattgattatagtcaccttgttgtgctatcagacactaggccttattcattcattctaactattttttgtacccattatccctccccaactccccttcactacctttcccagtcattggtaaccatctttctactccctatctccataggttcaattgttttgatttttagatcccccaaataaatgaaacc

SEQ ID NO: 722895 - DNA, 498 bp, Homo sapiens
  misc_feature (11)..(11): n is a, c, g, or t
  misc_feature (13)..(13): n is a, c, g, or t
  misc_feature (15)..(15): n is a, c, g, or t
  misc_feature (17)..(18): n is a, c, g, or t
aattcgcggcngngncnncggtccttctcttaccgccatcttggctcctgtggaggcctgctgggaacgggacttctaaaaggaactatgtctggaaggctgtggtccaaggccatttttgctggctataagcggggtctccggaaccaaagggagcacacagctcttcttaaaattgaaggtgtttacgcccgagatgaaacagaattctatttgggcaagagatgcgcttatgtatataaagcaaagaacaacacagtcactcctggcggcaaaccaaacaaaaccagagtcatctggggaaaagtaactcgggcccatggaaacagtggcatggttcgtgccaaattccgaagcaatcttcctgctaaggccattggacacagaatccgagtgatgctgtacccctcaaggatttaaactaacgaaaaatcaataaataaatgtggatttgtgctcttgtatttttaagtggattaaaaaacttactaccttaaa

SEQ ID NO: 722896 - DNA, 323 bp, Homo sapiens
tacaagcacaagatacgagaccctggtgcttcagggcagacaagccccagcggcgagcatgtcaggagaggcccgaggacctaaacctgcccaatgccgatgatcaccaggatcatcaaggaggcgctacccgtgacaggtgtcaacatctccaagtgaggccctggagctgccatctccctgctgccgccagctgtcttcgtgctgtacgccacatccatgtgactaacaaccttttgcacatgaaatggaaatgcggaagacgctgaatgccatgtgatgtgctctcatgccatgtgaagagatggagttccagcggttcg

SEQ ID NO: 722897 - DNA, 391 bp, Homo sapiens
  misc_feature (232)..(232): n is a, c, g, or t
aagatgctaacgcatcggtatgtgaagacgggtggggagcatccggcagcgagggtagtgcccaaagccacagtgcacgcttcctgaagcagagtgcagttgggggctgagtcccgaagtttgtccttggttccagactgggcagcactactcgtgtcagtggtgagacgactacgaccagtacgcgctgtgtacagccaggcagcaaggccctggggaggattccgcatgncaccctctacagtcgaacccagacccccaggtctgagtaaaaggagaaattcaccgccttctgcaaggccagggcttcacagaggataccattgtcttcctgccccaaaccgataagtgcatgagggaacaataggactccccagggctgaagctggga

SEQ ID NO: 722898 - DNA, 464 bp, Homo sapiens
  misc_feature (11)..(11): n is a, c, g, or t
  misc_feature (13)..(13): n is a, c, g, or t
  misc_feature (15)..(15): n is a, c, g, or t
  misc_feature (17)..(18): n is a, c, g, or t
aattcgcggcngngncnncggtccttctcttaccgccatcttggctcctgtggaggcctgctgggaacgggacttctaaaaggaactatgtctggaaggctgtggtccaaggccatttttgctggctataagcggggtctccggaaccaaagggagcacacagctcttcttaaaattgaaggtgtttacgcccgagatgaaacagaattctatttgggcaagagatgcgcttatgtatataaagcaaagaacaacacagtcactcctggcggcaaaccaaacaaaaccagagtcatctggggaaaagtaactcgggcccatggaaacagtggcatggttcgtgccaaattccgaagcaatcttcctgctaaggccattggacacagaatccgagtgatgctgtacccctcaaggatttaaactaacgaaaaatcaataaataaatgtggatttgtgctcttgta

SEQ ID NO: 722899 - DNA, 531 bp, Homo sapiens
tcctgtggaggtgagtgaagggtctgctgctgaaatttgggggcaaataaccggagtaggtttgttcctgtgccttggcgagtcgccggcctgctgggaacgggacttctaaaaggaactatgtctggaaggctgtggtccaaggccatttttgctggctataagcggggtctccggaaccaaagggagcacacagctcttcttaaaattgaaggtgtttacgcccgagatgaaacagaattctatttgggcaagagatgcgcttatgtatataaagcaaagaacaacacagtcactcctggcggcaaaccaaacaaaaccagagtcatctggggaaaagtaactcgggcccatggaaacagtggcatggttcgtgccaaattccgaagcaatcttcctgctaaggccattggacacagaatccgagtgatgctgtacccctcaaggatttaaactaacgaaaaatcaataaataaatgtggatttgtgctcttgtatttttaagtggattaaaaaacttactaccttaaa

SEQ ID NO: 722900 - DNA, 646 bp, Homo sapiens
  misc_feature (11)..(11): n is a, c, g, or t
  misc_feature (13)..(13): n is a, c, g, or t
  misc_feature (15)..(15): n is a, c, g, or t
  misc_feature (17)..(18): n is a, c, g, or t
aattcgcggcngngncnncggtccttctcttaccgccatcttggctcctgtggaggcctgctgggaacgggacttctaaaaggaactatgtctggaaggctgtggtccaaggccatttttgctggctataagcggggtctccggaaccaaagggagcacacagctcttcttaaaattgaaggtgtttacgcccgagatgaaacagaattctatttgggcaagagatgcgcttatgtatataaagcaaagaacaacacagtcactcctggcggcaaaccaaacaaaaccagagtcatctggggaaaagtaactcgggcccatggaaacagtggcatggttcgtgccaaattccgaagcaatcttcctgctaaggccattggacacagaatccgagtgatgctgtacccctcaaggatttaaactaacgaaaaatcaataaataaatgtggatttgtgctcttgtatttttaagtggattaaaaaacttactaccttaaaaaaaaaacaaataactggccggcggttacaacgtcgggactggaaaaaccctggcgttaccacaattaaaggccttgcagaaaagtccccttgcgaaagcggtggaaaagggaggcccggacggacggcctttcccgtgggcgaccgg

SEQ ID NO: 722901 - DNA, 441 bp, Homo sapiens
tcgtgccgaattcggcacgagctcctgtggaggcctgctgggaacgggacttctaaaaggaactatgtctggaaggctgtggtccaaggccatttttgctggctataagcggggtctccggaaccaaagggagcacacagctcttcttaaaattgaaggtgtttacgcccgagatgaaacagaattctatttgggcaagagatgcgcttatgtatataaagcaaagaacaacacagtcactcctggcggcaaaccaaacaaaaccagagtcatctggggaaaagtaactcgggcccatggaaacagtggcatggttcgtgccaaattccgaagcaatcttcctgctaaggccattggacacagaatccgagtgatgctgtacccctcaaggatttaaactaacgaaaaatcaataaataaatgtggatttgtgctcttgta

SEQ ID NO: 722902 - DNA, 638 bp, Homo sapiens
  misc_feature (72)..(72): n is a, c, g, or t
ctggaccgacatcataccacgacacactttgagaacaggtacagcagatgtacaaatgactaaagatctggncttggagttcccgtcgtggcgcagtggttaacgaatccgactaggaaccatgaggttgcgggttcggtcctccctgcccttgctcagtgggttaaggatccggcgttgccgtgagctgtggtgtaggttgcagacgcggctcggatcccgcgttgctgtggctctggcgtaggctggtggctacagctccgattcgacccctagcctgggaacctccatatgccgcgggagcggcccaagaaatagcaacaacaacaacaaaaaaacaaaaacaaaaagataaaaagtgcaaaaacaactttctagcatgtcacgctcagaccttcagcttcaacgttagatgagaggagtataagctttctgattagatggtctccactttcaaaggttaccatgtccttacttttccatgtgtacctgtaagatttttctgtcatctgtcaaaagtaaaggcaaaacagaaaaggaaaaaaagaattatccttcacttctcatcacagcagatccaagttaccaaggcttaccgaatctgctccatggcttccctcgtcagggtcctgggcggg

SEQ ID NO: 722903 - DNA, 841 bp, Homo sapiens
  misc_feature (269)..(269): n is a, c, g, or t
ggggtgggcgctcgggaattcgcccattatggccgggctgccaagtcagttggataggtgcggccccatggtgggcgggcgaggactgggagcgctgaaaccgcggaagggggtgaacactatgccccactcatcatctcaatcgcaactatacttatgtcgtcgtgttgctgtgatgcgtttggcagacgctctctacaggggatcaagagaagggggagtggtcgacgcaggggagcagttatgttattaaataacaaataaactanagccgccacacaacccctaaaacccaacaacacgagacgatcgtggtgttgttctgtggggcggctcttctagagcgctcaacggatcagcagatgcagctgcgatttcaccaatttaaatgggaatagtgttctaactcagacgaagggcgacaaggacgatgactagctcagaattttatataatgtgtgcgatggggtggcgggacgccgtcgtctccgaccaagcgcggacgagcgcttccgtgctgtcctcgctgctgcgcgccacgcctcctgtagcggcgtgatgtaagccggccgacgcacccagccacccccgagtgccgcgtgccgacgagttgtatgtcggtacgggacaccgctcacacgccctatgtccgctttatcaatacacacctcacgacgtatgtaaccatatacataaacagaacacgctgagcccctgctcagtgcgcggccaggacggcatattcctgatacccacactgattcatcatataaacggccacccctttaatattcactgagagtgggtttgagggggcgcgaacggcgagcggtggagagag

SEQ ID NO: 722904 - DNA, 610 bp, Homo sapiens
  misc_feature (23)..(24): n is a, c, g, or t
  misc_feature (31)..(31): n is a, c, g, or t
gctattgaatgtggcttatatcnngtgcgancgagtttccgaggattgtttttctggcgtttggagaagatgcctaaattgagggcggagtcgaaagatgtttaatcccacaaggccacgcggcggggcctcgtccttctcttaccgccatcttggctcctgtggaggcctgctgggaacgggacttctaaaaggaactatgtctggaaggctgtggtccaaggccatttttgctggctataagcggggtctccggaaccaaagggagcacacagctcttcttaaaattgaaggtgtttacgcccgagatgaaacagaattctatttgggcaagagatgcgcttatgtatataaagcaaagaacaacacagtcactcctggcggcaaaccaaacaaaaccagagtcatctggggaaaagtaactcgggcccatggaaacagtggcatggttcgtgccaaattccgaagcaatcttcctgctaaggccattggacacagaatccgagtgatgctgtacccctcaaggatttaaactaacgaaaaatcaataaataaatgtggatttgtgctcttgtatttttaagtggattaaaaaacttactaccttaaa

SEQ ID NO: 722905 - DNA, 697 bp, Homo sapiens
tgttagaggatcccggaacacaaaagcggctgagtttacatgttagaggctatcattaagaacacagtcctggagttcccgtcgtggcgcagtggttaacgaatccgactaggaaccatgaggttgcgggttcggtccctgcccttgctcagtgggttaacgatccggcgttgccgtgagctgtggtgtaggttgcagacgtccctgcccttgctcagtgggttaaggatccggcgttgccgtgagctgtggtgtaggttgcagacgcggctcggatcccgcgttgctgtggctctggcgtaggctggtggctacagctccgattcgacccctagcctgggaacctccatatgccgcgggagcggcccaagaaatagcaacaacaacaacaaaaaaacaaaaacaaaaagataaaaagtgcaaaaacaactttctagcatgtcacgctcagaccttcagcttcaacgttagatgagaggagtataagctttctgattagatggtctccactttcaaaggttaccatgtccttacttttccatgtgtacctgtaagatttttctgtcatctgtcaaaagtaaaggcaaaacagaaaaggaaaaaaagaattatccttcacttctcatcacagcagatccaagttaccaaggcttaccgaatctgctccatggcttccctcgtcagggtcctgggcggg

SEQ ID NO: 722906 - DNA, 329 bp, Homo sapiens
gaggtacttttccttttaattgtgggggatattccagatgttctttttctcttctcttctcttctcttgtcgtttctttgttgagacaggggggtgttctgtcacccaggctggagagcagaggcacgatcatggctcactgcagcctcaactttccaggctgaagtgatcctcttgtttcagcttcctgaatagctgggactacaagcatgagttcctacacccggctaatttttgtatttttagtagagacagggtttcaccatgttggccagactgggctcaaactcctggcctcaagtgatctgcccactttggtgctgggatta

SEQ ID NO: 722907 - DNA, 500 bp, Homo sapiens
  misc_feature (25)..(25): n is a, c, g, or t
ggaccacttaggctagtacgagctnggtgtaatcggtcgaccttggctcctgtggaggcctgctgggaacgggacttctaaaaggaactatgtctggaaggctgtggtccaaggccatttttgctggctataagcggggtctccggaaccaaagggagcacacagctcttcttaaaattgaaggtgtttacgcccgagatgaaacagaattctatttgggcaagagatgcgcttatgtatataaagcaaagaacaacacagtcactcctggcggcaaaccaaacaaaaccagagtcatctggggaaaagtaactcgggcccatggaaacagtggcatggttcgtgccaaattccgaagcaatcttcctgctaaggccattggacacagaatccgagtgatgctgtacccctcaaggatttaaactaacgaaaaatcaataaataaatgtggatttgtgctcttgtatttttaagtggattaaaaaacttactaccttaaa

SEQ ID NO: 722908 - DNA, 814 bp, Homo sapiens
acgaaccgaggcgttacccggtaagagcggctgtgtgtttatacacatatcatacacacacacacacacatacacacacacacacacatctcctgaaccagaagaatatttatctggggaaacaacattctttctagaggtctgtgagtttcctttatcactcaagatttcaaaccttggagttatcctagaatttgccctttctctggcaaggtcctgttgattcactcttcatagtttttattggagggcttcgggagttcctgttgtggcatagctgaaatgaatccgaccaggaaccatgaggttgcaggtttgtccctgcccttgctcagtgggttaaggatccggcgttgccgtgagctgtggtgtaggttgcagacgcggctcggatcccgcgttgctgtggctctggcgtaggctggtggctacagctccgattcgacccctagcctgggaacctccatatgccgcgggagcggcccaagaaatagcaacaacaacaacaaaaaaacaaaaacaaaaagataaaaagtgcaaaaacaactttctagcatgtcacgctcagaccttcagcttcaacgttagatgagaggagtataagctttctgattagatggtctccactttcaaaggttaccatgtccttacttttccatgtgtacctgtaagatttttctgtcatctgtcaaaagtaaaggcaaaacagaaaaggaaaaaaagaattatccttcacttctcatcacagcagatccaagttaccaaggcttaccgaatctgctccatggcttccctcgtcagggtcctgggcggg

SEQ ID NO: 722909 - DNA, 489 bp, Homo sapiens
ctataatgaacagcgatagtattattccatcttggctcctgtggaggcctgctgggaacgggacttctaaaaggaactatgtctggaaggctgtggtccaaggccatttttgctggctataagcggggtctccggaaccaaagggagcacacagctcttcttaaaattgaaggtgtttacgcccgagatgaaacagaattctatttgggcaagagatgcgcttatgtatataaagcaaagaacaacacagtcactcctggcggcaaaccaaacaaaaccagagtcatctggggaaaagtaactcgggcccatggaaacagtggcatggttcgtgccaaattccgaagcaatcttcctgctaaggccattggacacagaatccgagtgatgctgtacccctcaaggatttaaactaacgaaaaatcaataaataaatgtggatttgtgctcttgtatttttaagtggattaaaaaacttactaccttaaa

SEQ ID NO: 722910 - DNA, 609 bp, Homo sapiens
cccggttgaattagattctctcgaggaacattaagataagaacaagtcaggagtctcgtcgtggcgcagtggttaacgaatccaactaggaaccatgagcgttgtgggtttggtccctgcccttgctcagtgggttaaggatccggcgttgccgtgagctgtggtgtaggttgcagacgcggctcggatcccgcgttgctgtggctctggcgtaggctggtggctacagctccgattcgacccctagcctgggaacctccatatgccgcgggagcggcccaagaaatagcaacaacaacaacaaaaaaacaaaaacaaaaagataaaaagtgcaaaaacaactttctagcatgtcacgctcagaccttcagcttcaacgttagatgagaggagtataagctttctgattagatggtctccactttcaaaggttaccatgtccttacttttccatgtgtacctgtaagatttttctgtcatctgtcaaaagtaaaggcaaaacagaaaaggaaaaaaagaattatccttcacttctcatcacagcagatccaagttaccaaggcttaccgaatctgctccatggcttccctcgtcagggtcctgggcggg

SEQ ID NO: 722911 - DNA, 633 bp, Homo sapiens
ggttcttacagtagtcggcgtagggccttagattatttactgtactcctgtaagaatttagcagcaaatcatgtggatatcagaccaaatcatacaatttatatcaacaatatgaatgacaaaattaaacaagtgaagaatttgaagagatccctcatatgcccatgttttcgtcagtttggtcatgtggtggcacatttgtggctttaaagaccatgaagatgagggtggcaggcctttgtcatatttcaatggacacttgggctcatccacaaatgcctatgcagacatgctacaaggattatccattttatggtaaaccaaatgcgaatacagtatgcaaaatacagattcggatataatatcaaaaatgcgtggaactttatgctgacaaagaacaagaattaaaaaaaaaaaaaaatacggagagcacaatcacacgccggggggcgcgacacaaaacaacaaggacccatataaacggcgcaaatgatgacaaatagaagaaccaacgagaaccacacaaacatataaccaacgtggcacaaagacgcggacaccccaaataagacagccaaaaaaaaaaacaatacgcccaggtaccatggcataatgaaaacgaacacaaacaaa

SEQ ID NO: 722912 - DNA, 475 bp, Homo sapiens
tcgtgccgaattcggcacgagctcctgtggaggcctgctgggaacgggacttctaaaaggaactatgtctggaaggctgtggtccaaggccatttttgctggctataagcggggtctccggaaccaaagggagcacacagctcttcttaaaattgaaggtgtttacgcccgagatgaaacagaattctatttgggcaagagatgcgcttatgtatataaagcaaagaacaacacagtcactcctggcggcaaaccaaacaaaaccagagtcatctggggaaaagtaactcgggcccatggaaacagtggcatggttcgtgccaaattccgaagcaatcttcctgctaaggccattggacacagaatccgagtgatgctgtacccctcaaggatttaaactaacgaaaaatcaataaataaatgtggatttgtgctcttgtatttttaagtggattaaaaaacttactaccttaaa

SEQ ID NO: 722913 - DNA, 669 bp, Homo sapiens
gagataccgtcactcagtggtccgcagagtgtcctggcggtccctacccttcaccactccactgctctctcacttgacagtctcctaaacacaaatttctcttcttggagttcccgtcgtggcgcagtggttaacgaatccgactaggaaccatgaggttgcgggttcggtcctccctgcccttgctcagtgggttaaggatccggcgttgccgtgagctgtggtgtaggttgcagacgcggctcggatcccgcgttgctgtggctctggcgtaggctggtggctacagctccgattcgacccctagcctgggaacctccatatgccgcgggagcggcccaagaaatagcaacaacaacaacaaaaaaacaaaaacaaaaagataaaaagtgcaaaaacaactttctagcatgtcacgctcagaccttcagcttcaacgttagatgagaggagtataagctttctgattagatggtctccactttcaaaggttaccatgtccttacttttccatgtgtacctgtaagatttttctgtcatctgtcaaaagtaaaggcaaaacagaaaaggaaaaaaagaattatccttcacttctcatcacagcagatccaagttaccaaggcttaccgaatctgctccatggcttccctcgtcagggtcctgggcggg

SEQ ID NO: 722914 - DNA, 188 bp, Homo sapiens
  misc_feature (137)..(138): n is a, c, g, or t
aaaggggggggggggaaaaaaaatcccccccccgggggggggggggggggaggaatttccccccccccccccccccccccccgggtttttttggggggggggtttttccccctttttttttggttttcccccacaannggggggggggggcccccccacctgtttttttttttttttttttggggggg

SEQ ID NO: 722915 - DNA, 497 bp, Homo sapiens
tcctgtggaggtgagtgaagggtctgctgctgaaatttgggggcaaataaccggagtaggtttgttcctgtgccttggcgagtcgccggcctgctgggaacgggacttctaaaaggaactatgtctggaaggctgtggtccaaggccatttttgctggctataagcggggtctccggaaccaaagggagcacacagctcttcttaaaattgaaggtgtttacgcccgagatgaaacagaattctatttgggcaagagatgcgcttatgtatataaagcaaagaacaacacagtcactcctggcggcaaaccaaacaaaaccagagtcatctggggaaaagtaactcgggcccatggaaacagtggcatggttcgtgccaaattccgaagcaatcttcctgctaaggccattggacacagaatccgagtgatgctgtacccctcaaggatttaaactaacgaaaaatcaataaataaatgtggatttgtgctcttgta

SEQ ID NO: 722916 - DNA, 666 bp, Homo sapiens
acacggaacacttcatggcctctttcaaattcatcttgcatgtacatcgtttcttccctttagtctaagagtgggatctattctcttaagaaatcagcaccatggagttcccgtcgtggcgcagtggttaacgaatccgactaggaaccatgaggttgcgggttcggtcctccctgcccttgctcagtgggttaaggatccggcgttgccgtgagctgtggtgtaggttgcagacgcggctcggatcccgcgttgctgtggctctggcgtaggctggtggctacagctccgattcgacccctagcctgggaacctccatatgccgcgggagcggcccaagaaatagcaacaacaacaacaaaaaaacaaaaacaaaaagataaaaagtgcaaaaacaactttctagcatgtcacgctcagaccttcagcttcaacgttagatgagaggagtataagctttctgattagatggtctccactttcaaaggttaccatgtccttacttttccatgtgtacctgtaagatttttctgtcatctgtcaaaagtaaaggcaaaacagaaaaggaaaaaaagaattatccttcacttctcatcacagcagatccaagttaccaaggcttaccgaatctgctccatggcttccctcgtcagggtcctgggcggg

SEQ ID NO: 722917 - DNA, 117 bp, Homo sapiens
cgatcgtacaactaacggtcatgacagcctcaactccattcattctccacagcgcctcttcatgacgcactgcatgctcaatcctctgtgctgggaaggtgcatgataggagggggg

SEQ ID NO: 722918 - DNA, 679 bp, Homo sapiens
atcaaagtatgtttattgaaacgataagttcagtgtgttggctctaatcactgttaaaacatttaatactatttggtaacattgaagatgttcaagtctcttcaagaagttaatcaggagttcccgtcgtggcgcagtggttaacgaatccgactaggaaccatgaggttgcgggttcggtcctccctgcccttgctcagtgggttaaggatccggcgttgccgtgagctgtggtgtaggttgcagacgcggctcggatcccgcgttgctgtggctctggcgtaggctggtggctacagctccgattcgacccctagcctgggaacctccatatgccgcgggagcggcccaagaaatagcaacaacaacaacaaaaaaacaaaaacaaaaagataaaaagtgcaaaaacaactttctagcatgtcacgctcagaccttcagcttcaacgttagatgagaggagtataagctttctgattagatggtctccactttcaaaggttaccatgtccttacttttccatgtgtacctgtaagatttttctgtcatctgtcaaaagtaaaggcaaaacagaaaaggaaaaaaagaattatccttcacttctcatcacagcagatccaagttaccaaggcttaccgaatctgctccatggcttccctcgtcagggtcctgggcggg

SEQ ID NO: 722919 - DNA, 443 bp, Homo sapiens
actaggctgcggaagacgggtggatcccctgagggcaggagttcgagaccagcctgaccaacatggagaaatccggtctccactaaaaatacaaaattagccaggggtggtggcacatgcctgaaatcccggctactcgggaggctgaggcaggagaattgcttgaacctgggaggtggaggttgcggtgaggcaggatcacgccactgcactctagcctgggcaataagagtgaaactctgtctcaaaaaaaaaaaaaaggaaaggaaaaattttttggggggtttcattaaaggccggttggctgttggggggttttttcctcggtttggaaatatgggggagccattttatggaccttggaatagctaagcgcttggttgtcggggcctccttaacaattcccccgtttttcaaaagcttagggacccggcctagaatcc

SEQ ID NO: 722920 - DNA, 314 bp, Homo sapiens
ggcccgagaggggcctgtaggacggtgggatccgtagtagctagcagacgcactctcaggtgcttatgctcttcctgctggatgaggaggtggtggtgttcttaatggtggaactgccgcctccaacagagctgaggccaccccccatgggctcctgccactgctggaactgaagccacctccgacgcccagaccactgccataggagtagctgcttcctccaccctggcctgagtcagtgacgacaccactggcaccgccatagcccctggagacggtggacagcaccatagagatgttgcctttcggagaag

SEQ ID NO: 722921 - DNA, 1042 bp, Homo sapiens
tggcaggtaaccggaaccttaaatttatattatgtggaatgcttaatgcacagttaataggggctaaaggtggctagaaaaggggactactgaaataaataacggggaagacagtaatggagtcacatgtggattagggggggctgcaaaacagggaaaataggggcagatatagctacatacttatattcaaataccactgggaggcaagggtgtacgaggcaatggcgcagaattgtacagggtcaggattctagtggtctaacagccgtgccgacagcaaccggggtgctgggcccgtgtgtcaccgtggagccaagggtaagggcctgagcagcttgtcactctcgggaaagcccagggagtggggctgactgaccaggggccaataaagccctagataagggacaagggagctggacaaggtagcccagggaagcggaggccctaggagaatggcacatcgggatcccttaccgaggagacccctgccctcgaaaacacaccgtgggaaagacgctcatcacaaggctcaatacggagagtagaagggcgacggaggaacttgagggagccagaacacacctccacgaaccaaacgacacgggagggtaaatggggccagcaagaaactcgggagcatacaagggggcgcactctggtcgccaaaacaacccatcagcctggccctaatcacaaacaagcgcgcaagggggcacaatatacaaagggaatagaagaacctccgacgataacagtccccaacgaaaaccacccccacaaaagcacccccaaagatagaagggaccccccccacaagaggatgaccctcctccagcaaggcacacgccagaatgatgggcgaacaacacaacgcgaccaccgctcccaggagcaaacaccggccatacaggggagtgacggccatacagcccctaacagggcacatggtggaaaaatagaggagagcaaatgggagactggcacagcaccctgacactaccaagtaggaaaacagagacaacagggaagcactaggaag

SEQ ID NO: 722922 - DNA, 1381 bp, Homo sapiens
  misc_feature (288)..(288): n is a, c, g, or t
tatctggctgggctgggaaaggagactaaagtatctagttttaagtattaaaactacttttaattgatttatattggatactctctggataaatggcgggtgagttaaagaatagattggtgactcagttcctttatggaggttgggtggacctcaaaccatggtgttttatttcttaacccggactaacaggtaacttccaatatgggccactataaagataagggcgagggatatattcacataagggtgaacgcaggagaattttatcactatgggggtcaccangacgctaaaatctgggaaacacccactattgtggggatatggcaggctctcccacacacttcagagtcttaaaatatactcacacccgaacacttatatgggcgtaactatatatctttcctacaagttctccccccccctaagttctccactttgcgtgggcaaagtgagaaaccgagtgtttcttacaaatatcctctaaagatggtgttatcacatatccccttagagcggagaaaatattattccccctcacaaaacactcagagatgcacagaacagagtggccccaatattgcccacactctatctctaaaccgagggggtaacattacatcagcgcgggtcgtaaacatagcgccttaaaagggcccaggtgggcacaacacaccgtctcgaggctctaaacgggggacccgaggcccacaaggacagacaaatgcgtccgtacaagaggaaaaacaattccccccgagggacacaaggggcgtcccccccctccttagtatccacctccccctttgggtcgtttacccccacttcatctccaactttaaaccacaaccagtggggggccttaagaacataccacccactccttaaaaacagactccttcaacactcacaggggggagacgggggccaacacaatggtgggttgcgccccaatatacaccaacagggacacccacaacagcgcgctctttcgagacgtattaggggccccctcgaaacattgctagaaacttattccaaggcgtcacaaacccaccacgacgcggggacatacaaacaggggaggcaggagggcggccccccattccacgagcccccccacaatcgtcccccaccacattatacggacaaccagcggcgggaaaacaacgaacatcaacacaccacataccactacaagagagtacaacaaggggggggaagcaacaaaggccacgatacaacacaacagaccataagtaacccacaaccgcaggaccagagggacgtaacacaagaagaccccacacacaacaatactgaggcagagcaacacacacactcgcacgagcagcactaggcataacacaaccacaca

SEQ ID NO: 722923 - DNA, 263 bp, Homo sapiens
agatagctagtactcagtgctgtaggagaatacaaagaaattatctctctcctaccctggtggtggcacatcagacagatacccagagttgtctagcaaaggtaaaggtgttgataggcagctcccataatgaggtgttaaaagactataggaggaggagccagaagatgtgtgtttagggtcccagctccatcaggctttggctatgtgatacttggcaactcctgatcctgagttttctcaagtacagagtgaagctagaa

SEQ ID NO: 722924 - DNA, 588 bp, Homo sapiens
  misc_feature (59)..(59): n is a, c, g, or t
cacgccgatgggtagcataactaaactatatccaaatccctatttttattgctgatatntgttttacttaaaaatattacacctggtggcattccctgcccttgctcagtgggttaaggatccggcgttgccgtgagctgtggtgtaggttgcagacgcggctcggatcccgcgttgctgtggctctggcgtaggctggtggctacagctccgattcgacccctagcctgggaacctccatatgccgcgggagcggcccaagaaatagcaacaacaacaacaaaaaaacaaaaacaaaaagataaaaagtgcaaaaacaactttctagcatgtcacgctcagaccttcagcttcaacgttagatgagaggagtataagctttctgattagatggtctccactttcaaaggttaccatgtccttacttttccatgtgtacctgtaagatttttctgtcatctgtcaaaagtaaaggcaaaacagaaaaggaaaaaaagaattatccttcacttctcatcacagcagatccaagttaccaaggcttaccgaatctgctccatggcttccctcgtcagggtcctgggcggg

SEQ ID NO: 722925 - DNA, 812 bp, Homo sapiens
gtatgagtttcctatcgctgtgtgaaaaattatgccaagttgaggagtgtaaatgacaatacccatagcagttgtgtagctcatgagtctggcacagtgtggctggattctctgctcagggtcttaaaggtctagacaaccataacgggtggtcaggacaacattccttcatggaggctctggggaagaatctgcttcctaagttcgttcaggtcgttggcggaattaccagttctgttgtgctaggctctcagacttgggaggtccctctctcacctcaagggttgacttgcatcattctgatggggccccctgccagcttcaaaccaggcctgcctgctcttgtctcatgcttcatatctctctcccgtgctcctgtagtaggggcatatgattagctcaagcccacggatctcttttcaggttcgatggtgcgatagaacataattgcgaggagtactgttgctcgatctcatcatatgcacgggtcctggagattagctcattgaaagtgggaggggcatttgtcaaattctgcctagccacgaggcaataacgtgactcagtctggcagtgtaggtggaattttcacgccagaaaggatgggcctagaaggcgtcatttcttttctccatggtgaaaggatggccctcgtgcttgaggttcaacttgtgtgtttacttgcgatgagtgaactacagaaataggtgtgacttccgtaaaggggtttgtctacattgtgaagttgtggttaatgaaagattgaattatgttgtgtatgggccttaataggaaatgcattatttggactg

SEQ ID NO: 722926 - DNA, 641 bp, Homo sapiens
  misc_feature (3)..(3): n is a, c, g, or t
  misc_feature (68)..(68): n is a, c, g, or t
  misc_feature (88)..(88): n is a, c, g, or t
  misc_feature (119)..(119): n is a, c, g, or t
  misc_feature (125)..(125): n is a, c, g, or t
  misc_feature (137)..(137): n is a, c, g, or t
  misc_feature (139)..(139): n is a, c, g, or t
  misc_feature (158)..(158): n is a, c, g, or t
  misc_feature (170)..(170): n is a, c, g, or t
  misc_feature (187)..(187): n is a, c, g, or t
  misc_feature (192)..(192): n is a, c, g, or t
  misc_feature (209)..(209): n is a, c, g, or t
  misc_feature (226)..(226): n is a, c, g, or t
  misc_feature (239)..(239): n is a, c, g, or t
  misc_feature (241)..(242): n is a, c, g, or t
  misc_feature (245)..(245): n is a, c, g, or t
  misc_feature (247)..(248): n is a, c, g, or t
  misc_feature (256)..(257): n is a, c, g, or t
  misc_feature (378)..(378): n is a, c, g, or t
ggnaccagttgtaggtggagggagtttagggctgaggctccgcgtggccctgtcgcttcgccttcatntgcaggtaccgccctttgcnttcctcaaagcgcttcttctcgtcctcggtntcgggnaccagctggggnanaggcagcgacctgccttcntggctcagcganacgtaggtgaagaaggnactgncggcccggtagcgcttntgagagctgtccacaanagggtcggggtcnannaananntcgatttnnatggacttattgttcgtgaaggtaatgcgtcccgagatggtgatgacgcagccttttttgattttgttatgaaaattaatggcgtccacggaagctgtgacgatgttggtcttgcagtggngtgaagaagatttaaggagacctcatccatgagcttcatggtcacacctccgtgcacaaagccgtgcagggtgcagtctgaaggccccaccaggtggatcaagctggactggctgtagctgacagtgttcggctctgggttgaggactggctggacgatgtccccgttcctccacttggtctccatgcgctccagcttctgggcttcataccgcttccggccctcctcctcctccccctgccgggaatacacaacaggaggca

SEQ ID NO: 722927 - DNA, 688 bp, Homo sapiens
  misc_feature (29)..(29): n is a, c, g, or t
taacagcggcgtagtacttctaaatattnggaattttaaaatttttcctttggaatacaaatgaatatatgcaaaattccttcatcttatgattcgaactattactaactcagtaaaactcttttccggagttcccgtcgtggcgcagtggttaacgaatccaactaggaaccatgagcgttgtgggtttggtccctgcccttgctcagtgggttaaggatccggcgttgccgtgagctgtggtgtaggttgcagacgcggctcggatcccgcgttgctgtggctctggcgtaggctggtggctacagctccgattcgacccctagcctgggaacctccatatgccgcgggagcggcccaagaaatagcaacaacaacaacaaaaaaacaaaaacaaaaagataaaaagtgcaaaaacaactttctagcatgtcacgctcagaccttcagcttcaacgttagatgagaggagtataagctttctgattagatggtctccactttcaaaggttaccatgtccttacttttccatgtgtacctgtaagatttttctgtcatctgtcaaaagtaaaggcaaaacagaaaaggaaaaaaagaattatccttcacttctcatcacagcagatccaagttaccaaggcttaccgaatctgctccatggcttccctcgtcagggtcctgggcggg

SEQ ID NO: 722928 - DNA, 160 bp, Homo sapiens
cgaggacagcgttctcactatgagtcatcagcgactaacgcttattttaattcaggcttaaaacacatcacaaacccaattacttgtatatgcagaacactgataacaaccctcacattaacatcagcacgcttgatatagaccaacttttcagggctca

SEQ ID NO: 722929 - DNA, 479 bp, Homo sapiens
  misc_feature (266)..(266): n is a, c, g, or t
ctgaaaggtaaatccttccgggggggatgctttcaccaaattaagacttttcctccttttagttcctggcgccagcccctaagtcaacttagcattttttgcatctcacttggcattagctaaaacctccattgtcagatttcaggtagtggccaaaaatgcaggtgcaaggaaccctttaacagttgcccagcatttcaggtcattttccctgccccctggatttgcaaacatttttcaagatcccatttgaattttttaggggntaaacccttgggccttttaaagggcaaaaatttatattttgcctgttaaaaaaaaaatgagcagggttagcttagttttttttttatgtagggtattaagattaactttgtccctgtttccctactcagcatgggaacaaaatgaaattccctttgtaggtagtgagaccaaatttatgatcccttaagttaacaataaaagtgtccctttta

SEQ ID NO: 722930 - DNA, 467 bp, Homo sapiens
  misc_feature (354)..(354): n is a, c, g, or t
  misc_feature (358)..(358): n is a, c, g, or t
  misc_feature (361)..(363): n is a, c, g, or t
  misc_feature (367)..(367): n is a, c, g, or t
  misc_feature (369)..(369): n is a, c, g, or t
ggatatttttcaataataaataccacagaactacatggttggtgattggttgaaccctcagatatggaggaaccggggatacaaagggccaactggggagttcccgtcgtggcgcagtggttaacgaatccgactaggaaccatgaggttgcgggttcggtccctgcccttgctcagtgggttaacgatccggcgttgccgtgagctgtggtgtaggttgcagacgttgctgtggctctggcgtaggctggtggctacagctccgattcgacccctagcctgggaacctccatatgccgcgggagcggcccaagaaatagcaacaacaacaacaaaaaaacaaaaacaaaaaanaaanggnnnttcntnggccttaaattaaaaacaaaaaaattaaaaaagagtcttcaaacccataaagtgtgcgcagggaattgtcaggaggttaaatacccctttttggtttt

SEQ ID NO: 722931 - DNA, 1575 bp, Homo sapiens
gttatctgtaaaatcagacttaaaactacaaatatgtagacctgaaaggagcatagcaggcctatctagcttaagtctgattttacagataactatttgcattgagacaaagaaagataggcctgctatgctcctttcaggtctacatatttgtagttttaagtaggtttatgtataggctagaaatgattttcatagctgctacgtgtgtttcatatttacataatgcttgtaatttgaaaaatatataaacgcatgcatattactaattaattaatatggttacctagctcagaattcagcatttattcattcaacagtaatttcaagtgtccactctgtgtcagtacattaccatgtaatgctgaaagtgaaagaatttttaaacattactattcattcagtaaggcccccaagtgatggttttcaaattgtgcttccaagaatcctaagattttaggcatatttgaaatccttttgccacaaacttaacctatttaattgttttgattttttttttaagacgttgatgggagttgtgaggagtcttcctgtgttgcccaggccagcctcctgaactgaactcaaatgatccttccacctcagaatagctgggattataggtgtgcaccactgcacctggctagttgttttgattctaaatttagttttgttaaaatgaatcacatttgctttaaaaataatgatgttttcaaaatacagtgatataggccgggcacaatgactcatgcctgtaatcccagcgctttaggaagctgacgcaggaggatcacttcagcctaggagtttgagcctgggcaacaaagtgagaccctgcctatacaacagaattaaaaattagccaggcatggtggcatgtgcctgtggtcccagctacactggaggctgaggcaggaggatcccttgaacccaggaagttgaggctgcagtgagccgtgttcatgccactgcactgcagcctgggtgacagagcaagactctgtctcaaaaacagaacaaaaacaaaagcaaaatacaatgatacaggtaaaatatttcaaagccaactttagttactaagtgaaaaatgtgatgttaagcccagtacattaaagatgaaggaagatgttaatcaccaccaccacccctcctccccacataccttctctgaactggatcttttgaacgatatatatagggaactaaattagcaagaaaaaatgtaaagaaattaaagggtaatttgtgacttgacaagataaaagtagaaatgtttcagaaaaattttagggcatagggaatacagttgcattaaaattaccatttgaggtttcaaaattgttatttgcctaagctgtacatctgagctttctgattcagtgtgcgtggaaggggcccaggcatatatatttggacaaaactcacaggtatgtatacctctgaagaagaaccatggttgtacaatgaaatgtgttatcttgaggctattaagtttctttctcatcaatcatttgatctttgtgtctctgtaggtttttcaataaaatgggcttgacattaactctctgcctacat

SEQ ID NO: 722932 - DNA, 2031 bp, Homo sapiens
  misc_feature (2024)..(2024): n is a, c, g, or t
gttatctgtaaaatcagacttaaaactacaaatatgtagacctgaaaggagcatagcaggcctatctagcttaagtctgattttacagataactatttgcattgagacaaagaaagataggcctgctatgctcctttcaggtctacatatttgtagttttaagtaggtttatgtataggctagaaatgattttcatagctgctacgtgtgtttcatatttacataatgcttgtaatttgaaaaatatataaacgcatgcatattactaattaattaatatggttacctagctcagaattcagcatttattcattcaacagtaatttcaagtgtccactctgtgtcagtacattaccatgtaatgctgaaagtgaaagaatttttaaacattactattcattcagtaaggcccccaagtgatggttttcaaattgtgcttccaagaatcctaagattttaggcatatttgaaatccttttgccacaaacttaacctatttaattgttttgattttttttttaagacgttgatgggagttgtgaggagtcttcctgtgttgcccaggccagcctcctgaactgaactcaaatgatccttccacctcagaatagctgggattataggtgtgcaccactgcacctggctagttgttttgattctaaatttagttttgttaaaatgaatcacatttgctttaaaaataatgatgttttcaaaatacagtgatataggccgggcacaatgactcatgcctgtaatcccagcgctttaggaagctgacgcaggaggatcacttcagcctaggagtttgagcctgggcaacaaagtgagaccctgcctatacaacagaattaaaaattagccaggcatggtggcatgtgcctgtggtcccagctacactggaggctgaggcaggaggatcccttgaacccaggaagttgaggctgcagtgagccgtgttcatgccactgcactgcagcctgggtgacagagcaagactctgtctcaaaaacagaacaaaaacaaaagcaaaatacaatgatacaggtaaaatatttcaaagccaactttagttactaagtgaaaaatgtgatgttaagcccagtacattaaagatgaaggaagatgttaatcaccaccaccacccctcctccccacataccttctctgaactggatcttttgaacgatatatatagggaactaaattagcaagaaaaaatgtaaagaaattaaagggtaatttgtgacttgacaagataaaagtagaaatgtttcagaaaaattttagggcatagggaatacagttgcattaaaattaccatttgaggtttcaaaattgttatttgcctaagctgtacatctgagctttctgattcagtgtgcgtggaaggggcccaggcatatatatttggacaaaactcacaggtatgtatacctctgaagaagaaccatggttgtacaatgaaatgtgttatcttgaggctattaagtttctttctcatcaatcatttgatctttgtgtctctgtaggtttttcaataaaatgggcttgacattaactctctgcctacataagttggagttgtgggctctttcctccatctctcttcgtattacttatatactcctcttctgatttcaggctaaatttattgtgaagaaatcagaagatgaagaagacgccgctaaagatacttatattattgaatgccaaggaattgggatgacaaatccaaatctatagagtatttgcctcttaaatgatacctcattgatatattgcactatttcataaatactataaaataatgactaggaagtaacttattaaaggctatgacttaaatttgaagatgaagtacagtgttctaggtttgctgagaaggcttcattaaattaatctcactttgaatatctcctgagagatggacaatgaaatatcagttggtggatatgtgtgatagctgatttcaatattgaagtattgaaataaaatattctttacacctgaaaaaaaaaaanctatata

SEQ ID NO: 722933 - DNA, 324 bp, Homo sapiens
accccgggcccctgcggggctgccacggtcagcacagaattcccaagaacaggcggctactcctgggggcagccaacattccagggagcctgtgtaacccgctccgtcctcagggcccagggaggctgtgggtgaggactgtgtgtgtgaggacaggagcggagacaggcctgcggccagcttccctatcccctccccagcgcccgggtacgagtctgtaaatcagcctgcgctgcatggcgtcttcacggggagaggcaggctcactcctcagctagttcattagctcacacgctggaaaaataaaaccaaacatcacacgtt

SEQ ID NO: 722934 - DNA, 596 bp, Homo sapiens
tgatccatccgcctcggcctcccaaagcatgggattacaggcgtgagccaccgcactgagccaaattctttaattctgatggaattacctgcagactaatgtaacacgcatgcttttctaggattgggaggggaattgttgttggtagatggcgtctagctatgttgcccaggccagccttgaattcctggcctcaagcaattcttacaccttagcttctcaaagtcctgggattacaggcatgagccaccatgcctggctgcaagttttaatttttgaaattgaggcatagcattatagggtcataacttaacttataaactggctttataaattagtacattttaaataggactaatgaagcctatattttcctccactagtatatttaaaggtataagacttgtgtatcccaaacactcagaatattaaataactaaagatcttattctaaaaggtgcattgagtgggtttttgaggcctaaaaattgtataccagtgctaattgggatataccaaactttttgtctcggagcaagcagttttggcgtgttcaggcgctctgcaaggatgcagggcagtgtctcatctatcaa

SEQ ID NO: 722935 - DNA, 560 bp, Homo sapiens
agcggaggcgctctggtgcttgccgaggacgcttccttcctcatatgcaccgatcttcccgatactgcctttggagcgcgctagattgctagccttggtgtgctccattggcctgcatagccccttacctgccgattgcatatagaactctcccttactgtctgtacatcgtcgtcgtcggagtcttcgcgatccgtccgtggcgctagtgtgatgcgccttcgtccgtctctaggagtacgttgtagttcagcttacggggccaagcgaatgaacgacaagaatcacgcgacttacgtagcagagtatgctaggaggtggtcaggttactagacgctagagtaagtatagcggagcgtaacaagatgccaacacctatcgcgccgatggctccctccattcctctccctccgccgaggcgcgaggttgcggcgcgcagcgtctgggcagtctcagcgtcagccgatctgccgcgggctcctgttgggcgattgcagccgagtccgttcctcgtctatgctgccgctcgctggtgaccgtctgcctggtcttcctcccgg

SEQ ID NO: 722936 - DNA, 1104 bp, Homo sapiens
ggactgtggagcgtagcatacgctgctctatgcgttagggcgggtctccagtagccttctctctcctgtgccaaatggcaactcttaaggaaaacactcattgcagccagttgcggaacgaagaggcaacagttccaaacaataagatcacgtgtagtgggtgtcaggacaacgtgtgggctatggcgtgtgctattcaggcacttctgggaaacgtctctggctgatgaactctgctcttgtggaatgtatcgggacagactacgcttaacaggacgaaatgatggatctgcagcactgggagactatattctcttcagacaccgtaaaacttgtgcgcaagagtcacgactcacttctgatgaccgccaacttctaagcatgtgtagctggctaacctgcatggcagatccctgttcaagccctaaagtaacgcgggccagcagcgtcagcgacctccaaacttcttaggttgctagcacagccaacactggtccaacatggtctcttctccaaaaaacttctccacttatcaatttccccttccacgcaaataccggatcaaaacgcttaacaaaaggcaagacgccctcgggaactcgcgacggatttcgaattacaccattaggcatggcggatacactcaccagaaactccccaatgcctggcatacccaaatttgaacatccgtaacccggcgataaactggcctttcaaaacccccatggtggacaaatagcacatttaacataggcttgtcgacaccttccaaccacctcatcacacataccaacacaccgggacccggattatgaaaccctcagagggacacaacagaagggcgggcaacttgccctaaaaaccatctctccaagggccacaaaatagatacccatctgcagccccctacacgcacacacctaaccaacaacgacaacccaacaccacacctaacaaactgggcgccccctcggcgaaccccaaaacacaacacacacgagcagcacacccacaacacctagacccaaaccacaaccacccaccccaaagcaaacaacccaaacaaaccacggagaccccacaaaacgccggcaaaccgcacca

SEQ ID NO: 722937 - DNA, 882 bp, Homo sapiens
  misc_feature (1)..(1): n is a, c, g, or t
  misc_feature (66)..(66): n is a, c, g, or t
  misc_feature (69)..(72): n is a, c, g, or t
  misc_feature (77)..(79): n is a, c, g, or t
  misc_feature (110)..(110): n is a, c, g, or t
  misc_feature (113)..(114): n is a, c, g, or t
  misc_feature (122)..(122): n is a, c, g, or t
  misc_feature (144)..(144): n is a, c, g, or t
  misc_feature (228)..(228): n is a, c, g, or t
  misc_feature (254)..(254): n is a, c, g, or t
  misc_feature (875)..(875): n is a, c, g, or t
ntccgaatgtcaccagtaaaacaattgaaccctataaatttaactgagcgtggctgtgtgaataanaannnnggaannnctttcgttgctggtgttttgcccttttaaantgnncaaaagtntagggcagcggcagcatttagnggcatcagaaaggagacccgggatttgtatgttaacatccagcctgttcaagaacctaaagaccaagcatttggcaatggaaanggaataataattattgctgacacccncactggctgtttgtttgctggatcatcgcttggtaaacgaggtgtaaatgcagacaaagttggaattgaagctgccgaaatgctattagcaaatcttagacatggtggtactgtggatgagtatctgcaagaccagctgattgttttcatggcattagccaatggagtttccagaataaaaacaggaccagttacactccatacgcaaaccgcgatacattttgctgaacaaatagcaaaggctaaatttattgtgaagaaatcagaagatgaagaagacgccgctaaagatacttatattattgaatgccaaggaattgggatgacaaatccaaatctatagagtatttgcctcttaaatgatacctcattgatatattgcactatttcataaatactataaaataatgactaggaagtaacttattaaaggctatgacttaaatttgaagatgaagtacagtgttctaggtttgctgagaaggcttcattaaattaatctcactttgaatatctcctgagagatggacaatgaaatatcagttggtggatatgtgtgatagctgatttcaatattgaagtattgaaataaaatattctttacacctgaaaaaaaaaaanctatata

SEQ ID NO: 722938 - DNA, 431 bp, Homo sapiens
ctgaaaaatactttaacttattctcaacaattttctgtttatagatgtcgagaaatttttaaggcataaaatctaactacaagtggattactaacattaattaataccctgatctgtggacagattgcctataataatgtatgtgactgcctggctaacctagtctgattaaaaattaacctaaattgacaacataaacttatgttagagagtgttggactttttttccctccaagtgaactttagccctggtgaaaggttccctgcagcagaaaattcattgagcatgtaaagcttgttggcattttttgtttattcccatggatttttggatttttttttttttttttttttttgaggagagtaaggttccagtattcgtatctgttctttaagcttcttgaatttgccataacgtgtttccaggactc

SEQ ID NO: 722939 - DNA, 1173 bp, Homo sapiens
  misc_feature (1166)..(1166): n is a, c, g, or t
tgatccatccgcctcggcctcccaaagcatgggattacaggcgtgagccaccgcactgagccaaattctttaattctgatggaattacctgcagactaatgtaacacgcatgcttttctaggattgggaggggaattgttgttggtagatggcgtctagctatgttgcccaggccagccttgaattcctggcctcaagcaattcttacaccttagcttctcaaagtcctgggattacaggcatgagccaccatgcctggctgcaagttttaatttttgaaattgaggcatagcattatagggtcataacttaacttataaactggctttataaattagtacattttaaataggactaatgaagcctatattttcctccactagtatatttaaaggtataagacttgtgtatcccaaacactcagaatattaaataactaaagatcttattctaaaaggtgcattgagtgggtttttgaggcctaaaaattgtataccagtgctaattgggatataccaaactttttgtctcttagtaattagttttgttttgttttgttttgttttaatgttgtgcttatcttaaggtgtaaatgcagacaaagttggaattgaagctgccgaaatgctattagcaaatcttagacatggtggtactgtggatgagtatctgcaagaccagctgattgttttcatggcattagccaatggagtttccagaataaaaacaggaccagttacactccatacgcaaaccgcgatacattttgctgaacaaatagcaaaggctaaatttattgtgaagaaatcagaagatgaagaagacgccgctaaagatacttatattattgaatgccaaggaattgggatgacaaatccaaatctatagagtatttgcctcttaaatgatacctcattgatatattgcactatttcataaatactataaaataatgactaggaagtaacttattaaaggctatgacttaaatttgaagatgaagtacagtgttctaggtttgctgagaaggcttcattaaattaatctcactttgaatatctcctgagagatggacaatgaaatatcagttggtggatatgtgtgatagctgatttcaatattgaagtattgaaataaaatattctttacacctgaaaaaaaaaaanctatata

SEQ ID NO: 722940 - DNA, 421 bp, Homo sapiens
tcgaattcgaactaccagaccaaagctggatagctgagataatccttcatctctactgacaaaggaggaacttgagacaaacaatacgtatgtaggatggtgtgtctgcatttgtcacactggatactgccaataagaaagtgttcctgggtagagatacatatggagtcaaacctttgtgtaacgcaatgacaggagatggatttttggctgtatgttcagaagctaaaggtcttgttacattgaagcactccgcgactccctttttaaaagtggagccttttcttcctggacactatgaagttttggatttaaagccaaatggcaaagttgcatccgtggaaatggttaaatatcatcactgtcgggatgaacccctgcacgccctctatgacaatgtggagaaactctttccaggttc

SEQ ID NO: 722941 - DNA, 264 bp, Homo sapiens
gacgctcaatggaatcccgaaattcccactggcttctatctacctgtgatgtgatttaatgctgaaatgacttggctatccaaagcttctagtctagaggtctgttggttgaaggcagacatcttcaagtttgttggaaataatacgaagctgactagcttacgtgaatgatgtcgtcctcatttgcttcgagcgaggactcattactgcagtatattgatctcttcatcaaacgttttccttttgggcgaatagatgctgtat

SEQ ID NO: 722942 - DNA, 335 bp, Homo sapiens
caaaacacaataacacatataataataaggaaaaagtccgaaatatctacaagaataaccaaaatgtgacacacaacatgaagtgaacacatgctgttggaaaaatggtgccgatagacttgtctgacacagggttgacacaaacctacaatttgtttaaaaaaaaaaaaaaaaaactcgagggggggacaggaacccaattctccctatagagaaccgtatcacacattattgtcccattcaatacaacagccggactgataaaaccctagcgaaacccaagcttatagaaatcgctcaaatgtctgctaccctaggtggcctaatagccaaaa

SEQ ID NO: 722943 - DNA, 272 bp, Homo sapiens
attgtcacctgtaatgatgttaaggtcttcaaccacctgatgcagtagtataaacataagggtgcatgaatttatttttactgggagggctctctagaggaggtgctctccattaatcgctcgtctcaaaccatttcgggcattcttaatagatagcaacttaatttttggctttgtttcatgcagtatcttctcctagcctcggcacatgccaaacaagtcgcatggtccttcgtgaatgtggttgcatgggatacccgcagctcgaactt

SEQ ID NO: 722944 - DNA, 715 bp, Homo sapiens
ccttctcattttatacaataaacattctccacctacaaaaaaaaaaaaaaaaaaaaaaaaaaaaaaaaaaaaaaaaaaaaaaaaaaaaaaaaaaaaaaaaaaaaacaaagacgaaaaagaacaaacaaacacaacaacaacaaaacaaaagaagggggggcgcgcgcgcaagtacaaaaacaaccgacagggggaggggcaagcacatctaccagccacacccagtagttagtaaggacaaagagagcgcccaacaacgaagcgggacacataagaaagcaacgagacgggccgcgcggtgataacataaacacagtggaaggagtagaacaacaggtacagagtagggagtatttttggagagggagaaacagaacaattaatcagggtgagggaggggaagaaaataaatgatagtgaggcaaagcactaactaagtaaggatagctatgtcatgcacgagtggggaggagtaacaaagtaatcatacgatataatgaaggttgcgtagtagatgtgtaggagtgatgaaaaaacagaatggatgaatctaatgatgtgcggtgagtgatgatgatagaaaaattaggttgtgacagataacagaagcgtgagtatttatgtgaatgtagagaaaggaatatattttatctaccgagagagcgcgggacgatatagtagaataatataatgtgtgtggttcggggtagagtgg

SEQ ID NO: 722945 - DNA, 331 bp, Homo sapiens
ctcccgtgttcacgccattctcctgcctcagcctccctagtagctaggaatacaggcgcgcaccaccacgcccggctaattttttgtatttttagtagagacagcgtttcaccgtgttagccaagatggtctcgatctcctataggcacgtgctactaacccctggctaatttttgtcttttaagtagagacggggtttggccatgttggccaggctggtctcaaactcctgacctcaagtgatcctcttgccttagcctcctgaagtgttgggattacaggtgtgagccaccacacctggcctattttgagttagatttttggttctgat

SEQ ID NO: 722946 - DNA, 572 bp, Homo sapiens
ggtacccactctgacgagtcaactcatctgcgtgaacggtcttaggcatgctgcaaggaggcatgaggactgcagacgtggccagagcaataaattgcaatgtccatactgtgagacgtctaagacagcgctacaggaagacacgatggacagctgatcatcctcgcagtggcagaccacgtgtaaccacacctgcacaggatccgaacatccgaacatcacacctgtgggacagatacaggatggcaacaacaactgcccgaattacaccaggaacgcacaaaccctccataactgctaagactgtctgcaataggctgagaggggctggactgagggcttgtaggcccgttgtaaggcaggtcctcaccagatatcaccggcaacaatgtcacctatgagcacaaactcaccatcgctgcaccagacagacctagcaaaaagtgctgttcactgactagtcgcggttttgtctcactaggggtgatggtcggattcgcgtttatcgtcgaaggaatgagtgttacaccaaggcctgtactccggagcgggattgatttggaggtggaggg

SEQ ID NO: 722947 - DNA, 401 bp, Homo sapiens
atcttccggcgtcgatcaagaggtcaaaagccgtctccattccattgagtatgatactcccaccacatacctgcctgtccgtgctatgtatggcctcagcggaaaagtatcgcttgtacgtcccgagtgtgtaatagacaatccacctagactggcaccgctaagtttcagcacgtgctctcactggtcagtgatgcataaaccctgctcagtcagttctcaacgggtcccattgcttcgcatgcattatgcatctccataccaaatcctgtattgctactgccagatgccacagagtcccttcctttatactgctttaactatctcatacggttgtgacgcaacgcaagctagacatcaattgtataatcgtgtagctcaccaatgttagaccatgtcac

SEQ ID NO: 722948 - DNA, 103 bp, Homo sapiens
gtttgtccagattcttccatttactgacaggcctctcccgttcgaggcctttacattctgtagtgggcctctcctggcagaacaattgcattggaccctgtcc

SEQ ID NO: 722949 - DNA, 1109 bp, Homo sapiens
gagtgacggtggcgtttccttgaggaagagtgagggttccaacttttctgcttatctgggaggtgtagggcgcggacagtcgacgactgtcacgacgaacacacagcagccggtacgaccttaggtctgttacgacggacagacgaccgagttggacagacgttccctgccgaagactgggctggcttacgatgacagatgacagactgcacatgatcggggacggactaatggggaatgattggaccaatgtagacggaatgacctatctctacatcacgttatcgacgcttgaacctaagacagaaaacaactgtgggtaataaggaatggaggagaacttaaataaacgatttccacgacgacgacacaacgtgtgcaggaagagtccccccacaacatccgtaggcacgctgggccacaacaaaaaacataacgtgagcggagaaggagtaacaccccagggcaggggggaccattaacacaacagacagcgggtaacgactgcccactcaagtccgggcttggggacgtcaacactgacgggggggtcaacggggtaacaccaacaacgaaacacaacgtaacacagggttcatagggcctacgttcaacacaacaatcgaccacgacaccgaccacctcaccccacaaacagcaccccacgaccaccgggtcgggccgcgccgcgcccccgggccaccgcccacacaacacggcccccacagcgaccacacaaacgcaagcggttatggtcagcagggtggcgccgccacagacacgacgctgacgatgcccaacttctgccacgatcaagacgaggatagaccaccgaaaaggagcaacccgcggggcgcacacgcgaaacaaagaggcggagaggggcaccacacaccaagaagataaagaaacaaccgccccggggggcgacgaaacccgggcgcacggggtcgatgacgaaccaacaagctgcacgcagaggtgcggacacgtcactacgggcgcgacaacacacgggcggagctagtcacacaacacagagcgtgctacatgacagatgacacgacgccgcaataataaattaccaccgacccacatccgcgagtggt

SEQ ID NO: 722950 - DNA, 866 bp, Homo sapiens
  misc_feature (63)..(63): n is a, c, g, or t
  misc_feature (65)..(65): n is a, c, g, or t
  misc_feature (340)..(340): n is a, c, g, or t
  misc_feature (358)..(358): n is a, c, g, or t
  misc_feature (866)..(866): n is a, c, g, or t
attgagaggttgttgctgaaatgctacagctgaggccacagagaagccatagcctactgtggntnggcctctttaggcaaaaggaaagtctgtgccactcctcaatggttaattttagtatcaaaattcttggaggttagaaaaaaaatcctacaatgtcagagctggcaagactattatttcagtcaccaaacttaacaggagaaacgagagccaaaaatattaggaaaaaggagttgagggcagagttactcaaccttggtactactgacattttcattcaaataattatttgttgtggtgtgtgtgggggtggggggttggttatcgtctgcattgnaggatatttaggagcatntctggccactatccaatagacatagtaacaaccccttgttgtgacaaccaggttgagaaccacagttttaaggaagctttctgctcattactgaagtcaggcaatgctgtcagcccacattttctgctggctgtggaaccacctggtgaatgctgcacagtgagagagggatgttattataaatcgaaaactcaaggcaccataccaataaacatgaataaaaactgtaggaagatgaatgtttggtgtggcaggcctcctgagaaaagtagctgatttttctgacatggattagatacttactcaaccgtcccagaaacatctgagtgtttatatatggatgaattccttgtggacagctggattggtcactttgcaaattatttttgcgacttccactacctcttgctcttaccccttccttttatcatctgattctgcactttctaaccaaaatgtggccccaagcctaataaaaatactatttctatattcaaaaaaaaaaaan

SEQ ID NO: 722951 - DNA, 465 bp, Homo sapiens
  misc_feature (31)..(31): n is a, c, g, or t
  misc_feature (58)..(58): n is a, c, g, or t
  misc_feature (217)..(217): n is a, c, g, or t
  misc_feature (306)..(306): n is a, c, g, or t
  misc_feature (353)..(353): n is a, c, g, or t
  misc_feature (366)..(366): n is a, c, g, or t
  misc_feature (387)..(387): n is a, c, g, or t
  misc_feature (418)..(418): n is a, c, g, or t
  misc_feature (433)..(433): n is a, c, g, or t
tgccagtcaaaagggtttcgtgaaggttgcntctgactgggacagttaggcctctttntaccactttaaaaggtgttgacttttctagtaaatatcctccatgtcaaagtctatctcaagatctgttccaggacaaccccgcctgcaacagggcccatttatgttccagccagcacggtgatcctgagtctgggaggatgcccacagactgcttttntgagcagcatgccttcagtggccagtccccaagcccctcaactccatgtggagcaaggaccaaccaccccatggagaagaggaacccgnctgcaagggaggcccaagaaggggacctttgggaaccagcccacaantgggacttttgtnagggggcttggatgggctggncccaaaagggttaggttccatgttcttaagnccccagaaacccgtnaaattattggcctttattttggaaaggaaatt

SEQ ID NO: 722952 - DNA, 338 bp, Homo sapiens
ggggcccccccaaaaggggggggcccccaaccccttttaaaaagggtttttcctgttcccccggttttttcccaaatttgggccggggggccccctaaagggggggggggaattttttgttaaaaattttccccggggccctttttggcccccccccaggggtttttttttttttttttttcacctttaaaaaagcttggggtttttttaaaaagcccccttggttttttttccccctgggtttttttttttttgaaacccttttttttggtttttttttttaaaaaattttaaaacccccccccctggggccgaaaaaaatttaattttttttttta

SEQ ID NO: 722953 - DNA, 884 bp, Homo sapiens
tgttcttccgccgctccgccgtcgcgtttctctgccggtcgccattggaagaagagatcgtcgcgctgggtcattgacaatggctccggcatgtgcagagctggttttgctgttgacgacgctccccgagccgtgtttccttccatcgtcgggcgcccctgacaccaggcgtcatggtgggcgtgggccagaagtgactcctacgctgggccgagcgcatggcccaggagcgagaagctgttggttcattcctttgacccttgtaacgtacccgcactatgaagcagtgggcatcgacatcgcaaagctgggacgaaatggggagaaggaatctggcgatgcgacatccttctatcaaacgaagctgtgtcgatggccctccggaaggagcacaccagtgctgctttgaccgaggactcgcctgtaaccccgagaggtcacctgtgacagtacaggatgttacgtcagatgtttggttggagtacgcttgaatcagcccccgtgctcgattgttaatgttgggtcactcccattgggccgtgccatgttcgtcttctactgcctcgtcttgagtgtcgccacccgactgggtcgcattgttcgattgggcatcgtcctgaagagaccgggggggtcgattccaatcatgtgggttgccccgaatcgtatcgcaggggttagtgccctatccctccgatgccgatctcgtgcgttatggacgcgtggtttggccggggactggtgacccgattgtaccctgagtgaaagatcccgtctagtgaaccgaaggctacaggctttcaacgaaccaagtgctgaagctgggaaaatacgtgcgcagagatcaagggatgaaccgttgtgcttacggacggccttgtaca

SEQ ID NO: 722954 - DNA, 220 bp, Homo sapiens
ctcctcagatgaaatacgcttctcgcatttcttcacggggcgcgccccatgcttcttagcgtcgcttgccaaactatgagctcatctattctcaatgaggctactctggcaatcccgttcatgtcattgtgtgataaatacccgatatatactgctttttcctcgctaccgtccactccatctacctggtcatagctgttttcctgaatatagatagagg

SEQ ID NO: 722955 - DNA, 851 bp, Homo sapiens
  misc_feature (283)..(283): n is a, c, g, or t
  misc_feature (572)..(572): n is a, c, g, or t
ggcacgaggattctgctggaggctgtgcatatctggaggtgaaggtaccacctcatggagaccccgcggctgcgccccgctgggagcttattcccctccttcctgctcctggctgcgggacgctggtggcctccttgcgtgggctgcctgctcacctgcctggggctcttctatcagcttgcttgcacaatggtggacaatggcaagctgtcctggcatggctggagatgaactgttggcctgcttgtgcttgatgtggcccatgtgtgtgctggttcatctntcactgcttgtgtctgtgtgtgtgcacattttccccctgctgcttggtgtgcccttgtgatgaacacttgtgtgcatcctgatgttgtgtgtgaacacacatagccatgactgtgtcactggcctgatcttttgcttgcgtgattgctcatgtggcccctgcctgtccctgtggactgtgtggtgctgttggctgtgcatgttgacatgcatgtgcccctgtgcccctcaccagacacctggttgaacttgctaggttgacagacacttgctcatgaatgtgctcatgnttccccaagtctcttgcttccttggtgttgtggtgctgccattgcactcttgctgcatgaacctggtggtgctgctccatgtgcttgttgatcagcttgtcccattttcctggccactcttgtaagttattgtgttgtcttgtgctgcgagggttgcgtggaccattgtgcccaccctgagtggccgcgatggcttgcctgccagtcgggcaccccagtgtccggtgtttgtggagctgcccctgttgacgtgctttacccctacttcatggtccagaa

SEQ ID NO: 722956 - DNA, 142 bp, Homo sapiens
ggttctttgagtcctttgcggatctgtccactcctgatgctgctatggacaaccctaaggggaaggctcatggcaagaaagtgctcggcgcctttagagagggcctggctcacctggacaacctcaagggcacctttggcgc

SEQ ID NO: 722957 - DNA, 80 bp, Homo sapiens
  misc_feature (36)..(36): n is a, c, g, or t
  misc_feature (53)..(53): n is a, c, g, or t
ccttggtctttgagaagatggtagcttctgcagttnggaggtgcagacacttnctctcctatgtagttctcagatgcgta

SEQ ID NO: 722958 - DNA, 121 bp, Homo sapiens
agaggatcccgaagtaccaatgaggaactaagttgcacagtttatagagccccagctttatgaaataaaacaatcaccaattccaaactgcatgaagagaaacgtcgaattcgaggggtac

SEQ ID NO: 722959 - DNA, 398 bp, Homo sapiens
  misc_feature (285)..(285): n is a, c, g, or t
  misc_feature (289)..(289): n is a, c, g, or t
  misc_feature (292)..(294): n is a, c, g, or t
  misc_feature (298)..(298): n is a, c, g, or t
  misc_feature (300)..(300): n is a, c, g, or t
gctgaggatcccccccgcgtatatcttagtgaagaaatcggatgctcatcttctgttctacatccctgcccttgctcagtgggttaaggatccggcgttgccgtgagctgtggtgtaggttgcagacgcggctcggatcccgcgctcggatcccgcgttgctgtggctctggcgtaggccggtggctacagctccgattcgacccctagcctgggaacctccatatgccgcgggagcggcccaagaaatagcaacaacaacaacaaaaaaacaaaaacaaaaaanaaanggnnnttcntnggccttaaattaaaaacaaaaaaattaaaaaagagtcttcaaacccataaagtgtgcgcagggaattgtcaggaggttaaatacccctttttggtttt

SEQ ID NO: 722960 - DNA, 115 bp, Homo sapiens
  misc_feature (110)..(110): n is a, c, g, or t
gttcataaaagtttttgggccctaaattttttcccaaaaaaaaaaaagttcttaagtcccccctttttttgggtaggggttgttcccccgaaggaataaatttttttttncctca

SEQ ID NO: 722961 - DNA, 463 bp, Homo sapiens
  misc_feature (289)..(289): n is a, c, g, or t
  misc_feature (292)..(293): n is a, c, g, or t
  misc_feature (299)..(299): n is a, c, g, or t
  misc_feature (303)..(303): n is a, c, g, or t
  misc_feature (425)..(425): n is a, c, g, or t
  misc_feature (427)..(427): n is a, c, g, or t
  misc_feature (431)..(432): n is a, c, g, or t
  misc_feature (434)..(434): n is a, c, g, or t
acgaaccgagtgtatacccggtagagcggctgttgacttatcttgtaaataagcattttaaagaatttaaacagggagttcccgtcgtggcgcagtggttaacgaatccgactaggaaccatgaggttgcgggttcggtcctccctgcccttgctcagtgggttaaggatccggcgttgccgtgagctgtggtgtaggttgcagacgcggctcggatcccgcgttgctgtggctctggcgtaggctgtggcagatacagcttcgattcgacccctagcctgggaacctncanntgccangggnacatgatgtaaaagacatctatataaagtactaattatagaactgtgtggggagttcccatcgtggcgcagtggttaacgaatccgactaggaaccatgaggttgcgggttcgtcccccgcntnatcnntnggataaggatctggcattgttatgagctg

SEQ ID NO: 722962 - DNA, 149 bp, Homo sapiens
cttgatcttatcggtgggtagtagtacgagcgagtgacacaagttcttgcaccgatcagatccaacttctgcgcaagatgctggacaagctgtgggacgacgtggtggccgggcctcgcccggagacgggcctcgacaagctccgcagg

SEQ ID NO: 722963 - DNA, 1008 bp, Homo sapiens
  misc_feature (1005)..(1005): n is a, c, g, or t
tttctcccccctcttttatgtgctaaagaaaaggtcatttcgatgcaaggtactgaccctgtcatcaagatccgagggtgctcctgacacatgacccactttcctggcatttctcttacacgcgacgaggtctgcactagtgagatctgaatgactcacgttgctttccagaagctcgggactattagccatctcagtatttctggatcctgattactgtgtaccactgaggggacagttgggtcaggagctgtgccccggatgtctgatgtcgtctcactagagcacaaaacgtccatgtacctactacaggtccagacctccatggctatctgtcccggggtcgcctcgatcccagcctccatgcggagttgcctaagagtgcatgttcagcataagcaggattgctcggtggtgcatgaaaggttacgggtccggtctcaagactgaataagaagagataaaatttgcttataaattatactggactacgtaggtcttttggctgaatcggtctgataccaacctgtttccaacctcttgatcgaaagatccttgggacataagagaagggcaacggtttgagcccagagttgacggcgggagtatctcaggggtacactatcagggggcctccataagcgtcaagcatcgtttaagggagagaggcccaggtggggactgggaatttaaggagagctgggaacggatcccttaggtgcgggagcatctgtggtagctggagatggtgggcgaaggtgtctggcgcgcggctgatgtgatggagagccgggtccagacccccagcgtgattagtcctggttgggcccttcacagaccgcgttggttagaaaggggggggggcagaaccgataagactactgtcgccaccgggacactcgtggcgactccctcccacacacttctgcgcaacacaacacaaaggggctgccctgcttctttcctttccctgtcgtcgtttttcttcttttttctctttgtggnata

SEQ ID NO: 722964 - DNA, 112 bp, Homo sapiens
tcgagccggtacctctccctactgtatcctagtataaacctactatcaatgatctagaagataatttaatttttaaaaataagacatctccaggtaggatacagtagggaga

SEQ ID NO: 722965 - DNA, 583 bp, Homo sapiens
tgctacagaacgggggggtggtttgtttttggaaagatcaaggggtttttgttcacagaattacatataggctaatatgagggcataaaacagcaacaaagaacaataaggcatacagcagtgaatacaccagggtaaggttgatatccgaaagggctagataatttggggggggctattagaaataaatgcaacagaggtcaataatcacaaaattttagggttagagcaagatcagtcaagtgactaaacagagttaccatctttaataggactataacggataataagcattttgggtttggcaaaggggcacatacggttaagaagggaagaagggacgataacatgcacattaactacacacttgaaaaattatgacccaggcagaagtttagctcaggtagtagtactaagggtctacatccgattcaaaaccacatagtccatggatcacagatgcagggtataagtcacgaaagtttcagaacacttggtgtggatttggaaaggtcattggcatcttctatgatttcacctttatctccattaaacttgctggtcccgctgggggatcctctag

SEQ ID NO: 722966 - DNA, 153 bp, Homo sapiens
  misc_feature (47)..(47): n is a, c, g, or t
  misc_feature (60)..(60): n is a, c, g, or t
  misc_feature (121)..(121): n is a, c, g, or t
acaggatggtcaggacaagccacctctggtaaagtgacatttgagangacccctgaaggnggggggttgagtcatgtggacatcttgaggaagagtttactggcacagggaactgcaaggncaaagtccccaagtactagggctgggggcagt

SEQ ID NO: 722967 - DNA, 289 bp, Homo sapiens
agagggcagggagagcaagctattgcacttattgcaagcctgctcatcgcctatggcatccacacaacccaattgtaaaacatatgatttgatcttttggggcacaactgttctgttgctgttttttgtttgtttttctccagagcactttggctagactaggcttgggggtccaattgggggagaagctctgggcacgtatgcaggcaagaaagctttctttgcagtagcaccagtaagggaaatgattgtatcacaaaacaaacccaatatccagagaatatccgag

SEQ ID NO: 722968 - DNA, 190 bp, Homo sapiens
cgttcaattgcggtcagcatcacgtcgtatttgcactatctcacggagacaaggtccctgtgagctagtgggtccctgtgcagtacttggcgtggcatgttgccggggaagatggagcagtataagactgttcgggcccagaaaggccgagggctggggactccttaaaacctactgagggcctgggcac

SEQ ID NO: 722969 - DNA, 1006 bp, Homo sapiens
  misc_feature (389)..(389): n is a, c, g, or t
ggagagatcactgacaaaatatctgtcaagccaggccacaaacaggtgtacaattatgaaaggagtggttggatgtgccaagtttggtaaagtggtgactgcatctgagatataggctgtgaggctgaactcttggtggcttccttctgtagcttccacagggagtcttcaacacaggccccgtgctcgtatgattacggtacacctatgtaggaagctgcgtgtgagtttactgtctctctttctgtgtgtagtgttttcggcgcttcctgatcgatgcacttctcccctcccaggagcctggggatgccacacatccagaatgttcatgggacaacgatcgtggggtgcaggggacctcgacctctcgcctgcccgaggtgccggcnccggtcgtccttggtccccgtgggaccatctcctagaccctctctagcttggtggagcattgccatcctgatttgtcgtgatagttccccctctggtgggcccaccgggcgcaggatagctcttttctagctgagcacatgtgtcttgctgcgttcagcgcatcctatcattccttttcgccctgttggcctgccaacggcagggcacattagagaacggtaaggctaacttgtactgctaggtcttgtccacctacgggctagcctttgctgacgctgggaccgggcctcccacggcgttctagagcggctagcttggggctggttctctccatcgtcagggttgcccctttggattggtactagccgagcttttacccctgtgcgctagggctcacgccatgctgtaagtgccctcttaccttttggtcctgctgttggccggcgacgaatggcgctcatggtcggatgcctgtggctgaccatggtcagtgaggccggagatctgtccccaccggcgaagtctttcagacacctcgggtctggcacgcgggcccgtccacttagcgctcgtccgaggcgtccagcctctcctgttgttgtcactccataagggc

SEQ ID NO: 722970 - DNA, 726 bp, Homo sapiens
  misc_feature (313)..(313): n is a, c, g, or t
  misc_feature (371)..(371): n is a, c, g, or t
tatgtgtctttgttttcgcaggtaaaaatgatacttttattggagtcaccaggagaaaagattcactgggggttcaagtcaaaggttcagaatcataacaggccaaaaaggttggatcccgagcacaagcccacgagggaggggaccaaaacagaccaaaagtgagacaacaaccccattattaaaaagatgaacgtgggcggcttcacacacctcacacagcattacacattacacacgggatgaaagtgttgggacagaggcaaattttcacggtggctcataactcgtggtagtctgttttaaactacanggttggtgtagggggtggtatattgggttgttattccaggctagtaaagaaagaggcngccaaaaggtgctgtgtggtgaagggggggaagaggcagaaatatgtacgcaaataagagatcatttctcccgtgggagggcacattgaagaagggagaaaacacagggaggacaggtgcgtgggagaaacggcacgtttgcctcaccaactggggctatactggtcaatacctatagtatcgggtccacaaagtgttttagttcacgtttcatagctttggagtgcctcattccggggaattaaatgagcgtgaaagacctcgtgtgaacttgtagagaagaccagggcctcagccagcccagccagcccctgagggctctgggcgctctagggatggagggtatggtaaacat

SEQ ID NO: 722971 - DNA, 205 bp, Homo sapiens
aggctgattccactctggtcatgcatactgcggcccacgcagacaagattcctgcagggctttgtgcgacagccattgatatcctgacaacagtagtacgatatacaaagcctccccttttcccagacttctcatactgccaaggctttcccgtgctgtggcacaggtgtaccctttcacacagtattacaatgccgtcatcagc

SEQ ID NO: 722972 - DNA, 133 bp, Homo sapiens
ggacaggggaaaacggccaagttcctaaaaatatgttttttttgtggggagcaattcatgatgggggtttttgtttggtttcccccccctccgtcccctgacgccgagtaacccttaaacctttttagttgca

SEQ ID NO: 722973 - DNA, 389 bp, Homo sapiens
tacttagcactaacgtgttctcccggtcaggcatctccaggctgtggttgtccggacgtctgtgatagaagagcaggagatgctgagtcggggccgagaggcctaagtcaggagaaagaaacagatctgggtgtttggtttccaaagaccactcttcccctccctccagacattcatctttccttctacatcctcgggaagttagacaaaaggcagtcacactgctttctcagtcctgcccgcagctgctaacacagagccaagagccagctttaccaacaaaaagtgagcgacaccagggccatgggctggtaaaccccagagcttatctgcagggctgtgaccactctgagcactctctcacttgctctcagtcacccagccgctcg

SEQ ID NO: 722974 - DNA, 458 bp, Homo sapiens
  misc_feature (212)..(212): n is a, c, g, or t
  misc_feature (326)..(326): n is a, c, g, or t
  misc_feature (332)..(332): n is a, c, g, or t
  misc_feature (401)..(401): n is a, c, g, or t
  misc_feature (403)..(403): n is a, c, g, or t
  misc_feature (412)..(414): n is a, c, g, or t
catggcactccagcctgagtgacaagagtgagaccccatctcaaaaaaaaaaaaaaaaaaacaaaaaaacttatgtacatagaaaaatgtgtatatgaatgttcacagcagcactgtgcataatagccaaaaaggggaaaactcactgaaagtgttcatcatgctgataaatggaataaacaaaactacaggcatggtgtggtcatcacaantggaatgctgttcacgccattaaaaaggcaatgaaatacctctataccaccacccacggcttgaacccttgaaacacattttgcataaataaaagagagccagtacaataaaanaaaaanaaaaaaaaagccattgcgcgccgcaagcgttattcccctttagtaagggcttaatttaaggccgactancntaatgctcnnngtaagttcggaacgtgctgggggggggggggggggggggggggg

SEQ ID NO: 722975 - DNA, 526 bp, Homo sapiens
ttttttttctttgtttatccttttttttcatttgcaattattacacactaacccgatgttttgtaaataaagtattgttttaaacggaccttcaagttcatgattcacacattttttatggaccctgggcaaaccactgtgcttatggggctacattttggggatggaacaatacaactgacagaagtggaccatctaaagggaggtacttgaaaaaaatgggataatgacccaatcaaaggtgaaagaacacaaagccttcggatggttagtggagaacacctattaagcaaaaaaatgtaggcctccctttatttcgggggcaatgggaccaggaagtgaacgtgtatcaggataaaaagagcattaccgccccttggtgagttcttaaacgaaatgtaactccacgagaggtgtttggtttttttggtggccaggccaaaattcataaaattttaccttgcgaagctgaatataacagcatgtgttttttaacatacgggtgcctttttaatcatgcctaaaa

SEQ ID NO: 722976 - DNA, 123 bp, Homo sapiens
ggtacccgtcttctgatccagtctcccccgcaaaccacccaccacagccttcaactgctcaggcgttgccgcttccacagccaccggctcgcccgccaccaacaccacccactggatcagagt

SEQ ID NO: 722977 - DNA, 271 bp, Homo sapiens
ccgggtgtggtggcacgcgcctgtagtcccagctactcaggaggctgaggcaggagaatcgcttgaacccgggaggcagaggttgcagtgagccaagatcactccactgcactccagcctgggtgacagagcaagactctgtcttaaaaaaaaaaaaaaaaaatcaagaattaggcgtgatatcacacacctgtaatcccagctactcaggaggctgaggctgagaatcgcttgaacccaggaggcgcctcttttttgaggctctgtctca

SEQ ID NO: 722978 - DNA, 81 bp, Homo sapiens
gccgaggacacggccctatattattgtgcgagaggggccgccccaagtccaaccgatgcttttgatgtctggggccttggg

SEQ ID NO: 722979 - DNA, 329 bp, Homo sapiens
taaaaaaaacaaaaacgacaaaaaaaaaacaaaacagaaaaaataactagggcaaggacagcccgggcaaaggcggggagggaggcagcaggggtcagggaaggtaaccctgaagcaggactggtaaagcaaataagatggggaggccaaggggggtggatcaggaggtcaggagttcgagaccagccgggccaacatagtgaaaccccgttctttactaaaaatacaaaaaaattaaccaggtgtggtggtgggtgcctgtagtcccagctactggggaggctgaggcaggagaatctcgaacccaggaggcggaggttacagtcagc

SEQ ID NO: 722980 - DNA, 453 bp, Homo sapiens
gaggagagtgaggcagaagcactcagaggcggatggaggagcgaggcggagcagctggagcagacgaagcgggatgaaagcaaagctcgagaaggcgaagcagactctggagaacgagcggggggagctggccaacgaggtgaacggtgctgctgccgggccaagggggactcggagcacaagcgcaagacagtggaggcgcagctgcaggagctgcaggtcaagttcaccgagggagagcgcgtgcgcacagagctggccgaccaggtcaccaagcttgcaggtggtgctggacaacgtgaccgggcttctcagccagtccgacagcaagtccagcaagctcaccaaggacttctccgcgctggagtccatgctgcaggacactcaggagctgctgcaggaggagaaccgggagaagctgagcctgagcaccaaggtcaagcaggtggcgga

SEQ ID NO: 722981 - DNA, 152 bp, Homo sapiens
  misc_feature (117)..(117): n is a, c, g, or t
  misc_feature (148)..(148): n is a, c, g, or t
tgggtgactagacaagcaattaaacaatgaaagatacatgagacgcctggagtttcatataataggtagatgaactctatgaagcttatagtatccagcagacgcctccaggatggntgccagcaaaagtgaagcagagccttcgcanacat

SEQ ID NO: 722982 - DNA, 602 bp, Homo sapiens
taaatgcttgttaacgataacaggaaggctggagcaacaccgactctcttattattaggagttatcctcgagactatcctctattctacatttcttctctactatcaagttcttctgacttttgctgatcctatatatttgggctggtatacataatgatgccatgtccttgaactctgggtcctgtctcctcagcttatattagtgcactgatggccctagtttagaatggttttcgttatgctccggagtagatggagcttttgagattgtggccgatcgcattttttactgtttagtttcctccttgcccagctctttcaaggggagctctacttttcctttcacagtctcctctcccagtctggtccattttctgctctgccagcctctggttctcatagtacttctcatactgctgtcttataggcggggctggtggccatcagagacttctggttcatatagagcccatatgcatactggccatactaaaatagctgagccagggcaggatgtcttagtgtgatcaccgactggtgctgaggctgtaaggatgcagaattgtggtcactttcttagaatctactgtctgccttgtt

SEQ ID NO: 722983 - DNA, 173 bp, Homo sapiens
ggatcatcagtacggagcaggaatcgcgatctctgggaacaactcgatgcgctgaaagccgatgttgaacgtctggcctcgatcaatgaagtgctgcttgacgagaacgccacgctgaaggcgcgcctaggtagcatgggcaaatgcccgcttactgatgctccgcttactga

SEQ ID NO: 722984 - DNA, 126 bp, Homo sapiens
cagcagcatagatattacgaccagtgaaattgacctgcccgtgaagaggcgggcacgacacagcaagacgaggagaccctatggagctttaattcattaatgcaaacggtaatatctatgctgctg

SEQ ID NO: 722985 - DNA, 159 bp, Homo sapiens
tccttgttcaattctcacacagctctgcatagcactgagtttgcaccatttctattctgtcaacactggcacacattgttttctcatgcaccaaaaacaactctcatgcataccaccaggttacaagcatctggtctgcacggttgcagcatgcacact

SEQ ID NO: 722986 - DNA, 754 bp, Homo sapiens
aaaaaaaaattttaacaagaaacaaagctaacaaaagaccaagaataaacactataagatgaaaaaaaattaaaatatgactgagcatatgaaagatactaagtgatatatagttacataaagtgatgatgagcacccacttgataatatagttgatgggaatccagaaacgttttgtaccaccacaggaatagtttcccagttaattcattatttgtttccacaaacatgccatgattgaaaggcttgtaatccaaagttacttgtgacagaccttgaatattgcaattagctcgtttaaagagccaggtgattttgaacaatggattgaaaaagatttggtacacacagagaggcagctttataatgatgaaattgtggcacatgatggctccgctacttacttgagattcattattggatcagccattgatcattttagatatgtgcatagcgattctgtataaagaacagtagtctcaatgatttcctcataatgatatcaaactgctctggcctgattttttaacaatctatttaaccatgaagttgtcacttgaatactgtattggatttttattcatccataaatcctttttttagaaagaatatccctgtcgataggtttgaccaatctattttagattgggcaccttttgaatccgccctttaaagcttattggcatttgccctattggatcttttcaatctatttggggcgcttattgttggatggaataactctgcttccctt

SEQ ID NO: 722987 - DNA, 496 bp, Homo sapiens
  misc_feature (2)..(2): n is a, c, g, or t
  misc_feature (103)..(103): n is a, c, g, or t
  misc_feature (111)..(111): n is a, c, g, or t
  misc_feature (185)..(185): n is a, c, g, or t
  misc_feature (204)..(204): n is a, c, g, or t
  misc_feature (282)..(282): n is a, c, g, or t
  misc_feature (335)..(335): n is a, c, g, or t
  misc_feature (351)..(351): n is a, c, g, or t
  misc_feature (371)..(371): n is a, c, g, or t
  misc_feature (380)..(380): n is a, c, g, or t
  misc_feature (385)..(385): n is a, c, g, or t
  misc_feature (417)..(417): n is a, c, g, or t
  misc_feature (419)..(419): n is a, c, g, or t
  misc_feature (440)..(440): n is a, c, g, or t
  misc_feature (442)..(442): n is a, c, g, or t
  misc_feature (457)..(457): n is a, c, g, or t
cnctctggcccatacctttgcaaaggaggggaggggtctacaagccagagctttcagaagagaagaaaatacatgcggtgctggtgctgtgtctggagcgggngatccttnaggtatgagaacaccacctccacccgatgacatcagacccactgactggtagagtccttggaaatcatacagtncacccatcccccgccaganacatggacacaccgaggctcagatggggaagggtacataccctagggcacacaccaaatcaaaaaggtgaagtcaggnctagaacacctgacccactttagcaggggactgtggccacaggcctggatgtncacagtagatcatganatacattagttctatgaatnacccccgtncaganaaatggctgtcgttgtcagggagcagccactncncaggggctcctgacctcagtnanaggtgagtgtgtganggccgagagactggatggtggtgatgaacctgaggacgt

SEQ ID NO: 722988 - DNA, 134 bp, Homo sapiens
ggcttcattcccatcaagtaatacaccagcagttgtcattcaacgcaggttttgtacttccattatatggtgatttttttactttttaagagcagaaacggaaattgacctccccgccatgtgtttaatattcc

SEQ ID NO: 722989 - DNA, 381 bp, Homo sapiens
aaatcctgaacctcaaatgatctgccccaacctgtctcccccaaagttttgggattaacaggcgtgaagcccaccgtgccccagccccgacacatccctttcctaagttgacccagaactggggtctcttgccttgctccccaagatccttatgatgtcccactaagcgcctaaggttgcaccagatcgctgcttcccagcctcaggtcttcaggacagctaatgtccacagctctgcccctggtctctcccctgatcccaggagccctggtggagaagctacagtttgccaatctgtagggatacactgggctaaaggcatgtctgaggatccttttgacctcaatattctacgagcccatggtcatgataaagagtgcg

SEQ ID NO: 722990 - DNA, 1212 bp, Homo sapiens
  misc_feature (454)..(454): n is a, c, g, or t
  misc_feature (489)..(489): n is a, c, g, or t
gaacatgcaccaatggctcgatgtaacaacatgcaaagcacctctagcaaaggaagcagcaaacacaggagagaccagtcaaggaaactcgattgttccatctttctacagaatagacttggccattgagtggtgaatagaccctgcctagacttattgctctccagaatagtacatgacacattactatagtgagagaagagcggcgtcgtgccactcgaggaatgcgcaatggaaatcacactgggttgctactactgatgagttctcaagtggatcgcatgatggtttcatatgctgaggcctcgtggcccgtgaatctcagcgagagattgatgtgataggcttgtcacctatgtagaatgataggtccctcaagcatgacctttaagctgacatacattgtcttccaggtactcaagaagccatgaccctgaacgtgatccattcacantggttccatgcgagatctatatttcgctcgcaggnaccaaaaatattggtgctgtgctccatgagtcgctaaaatagaactgtgtcctggcacataatggtatttggcgacggccttcgacggttagagagtggatacagaggcaactccatcacgaattgcgactctatctaatgggcctaatggcctgtctcctaggatttacctttgatcgacttagccgctatgtttgatcatacaccatacatagaaccgccctaaaccttacaaattcaaggaagtaagcagggcataggggagcgctttgctttttattgtgaccttccaatggaaatccccacaattcaacgcgcctctccgttcccacacacacctaccctgttggaccacgacattcggaatgcacctaggtgtaatataatcacagattgggaagcttctctaggaccgcaatgcgtatgggccaaggtagacctacaccactttggcacccttctaaggtcacaccatgggataacggtttcgcccttccaacacttacgcggactctactggacattactaccaccaagggaaattaaagaaaatctatctgttggaaacaacaacagggaaccatcctttatctgcacaacaccacagttggctttttggaccccaagactccataactttattaaagtcacccgtggcggtcccttagagttagaatctggttcctttctcacggagagttcaaccggacacccagatgttaa

SEQ ID NO: 722991 - DNA, 110 bp, Homo sapiens
tatgtaggcacacgctgctttcacaacagtggtccccggactcttggcctcgctgccggcaccgacggccaatgatccacccaccttgtggaccgcacggtgctcctcta

SEQ ID NO: 722992 - DNA, 149 bp, Homo sapiens
  misc_feature (115)..(115): n is a, c, g, or t
tctgcgcgaattcgctcagcgccggcggacatgcgcctgggaaaatgcgcttttcgatccaggggtgcatgtgggcggggaagttgcggccgatggagtggatcaggccgcgacntacattgcccagacacttcgagatgacgccaccc

SEQ ID NO: 722993 - DNA, 690 bp, Homo sapiens
tgcatgggcctattttaagatgattgccttgtagtcatagatgacggctccaagtatggagccagcatactatatcaacagaggattgcttttctttgccagaagcatctcgttatctctcattagtccacattgtcttttccctgtgtgtccctgagtcagtcacgggtagagcggatgaacgtgccgtgattttcatagactgatcttgtgtgagtagaatgcatgctgggaagcccaccagtatccgccgcgatttctcttttaccagtggggaagaatcacagtaatgcttgcaaggacatttcccttaaaggcaaaagtttccaattagacttctttttacaatttattcccatccctaagatgagctaatctccaaaacaaaaagacagcctaagatattttcagccaggtgcgctggctcacacctgtaatcccagcacttcaggaggccgagacggtcacatcacatgaggtcaggggtacgagaccagcctggccaacatggtgaagccctgcatctgctaaagatgcaacaaattgacagggcgtggtggtgcgttcctgtagtcccagctacttgggagtctgaggcgggagaatcacttgggcctggtaggtggaggttgcagtgagccaagatggggcattgcactccagcctgggtgtcagggatagactccgtct

SEQ ID NO: 722994 - DNA, 151 bp, Homo sapiens
gtgagttgagacagttggatatggtgaacatttacaaaataaaaaattagccggtgtggtggtacagcctatagtccagtactcaggagctgaggcagaagaattgttgaacatgggaaatggaggttacagtgagcaagattgtgcactg

SEQ ID NO: 722995 - DNA, 312 bp, Homo sapiens
agcccctgccccccgcccaagggcccctttttggggggcccctgagctaaaaatgttttttccctttttaaatggggaaaaaattaaacccgttttttgtgttaggtgggaattccctgaaattcccgtttccgcccccctaaatagttttgttgggccccccctgcccccccctttccatgttttttggggggggttttggggtccccccccagggttttagtttaatcccgctataccccctgttttttgcttttgaaattgggcctttgttccccccccttttttttttttggggcccgtttgttctta

SEQ ID NO: 722996 - DNA, 408 bp, Homo sapiens
  misc_feature (32)..(32): n is a, c, g, or t
  misc_feature (85)..(85): n is a, c, g, or t
  misc_feature (165)..(165): n is a, c, g, or t
  misc_feature (195)..(195): n is a, c, g, or t
  misc_feature (202)..(203): n is a, c, g, or t
  misc_feature (283)..(283): n is a, c, g, or t
  misc_feature (355)..(355): n is a, c, g, or t
  misc_feature (380)..(380): n is a, c, g, or t
accatcccagttctgttgtggacttgaccaangcattcttctcaatcagcattgctccagagagccaggaacagtttgccttcangggagggcgacaatggactttcatagtgttgctgcagggctatatgtatagccccattatatatcattttcttattaatnatgttatgttaaccgcgtagttcttttgcnggtttgnnttttcacaacacccctcttgcctgggattgggatgatgaggctgaaacagcccttctgatgacataagccctctgggtgnttaaccaagggtgcccatttaaactagatgtgcatgtaaccaccaatagaagttgggctaagggcctatggnagttatatggaagtgcttggaagcnccagtcagctttttagtcccagctatgg

SEQ ID NO: 722997 - DNA, 280 bp, Homo sapiens
tacttatgccattcagacttgttagagtagatgtgggtttatagactgccaagttttgcccagtacagtagtttatttatacactaaaaagttggactcattgacggagtccctgtagtagtttcagtgtaagatacagttttttccaccatacatctgtgcatttcctcttaagggtgactgtttaagaactttggtgtgcatagttactcagtttttatggaacggttgtatccggttattgcatatggcgctgtgcctccagtaaacagctaacctt

SEQ ID NO: 722998 - DNA, 177 bp, Homo sapiens
ggggggggattgtttttttttttccttgtttttgaacttccttggaggaaagcttgggaaacgtcccggggccaggttagggacttggggacgagccccccagttttgggagccggccgccctcggtttggggtaagcccccatgcccgtttaaaaaggagcccccgggccccccca

SEQ ID NO: 722999 - DNA, 877 bp, Homo sapiens
gcttgaaaggatccagatgtgatcctgggtgagcagcgtaggctctggttggttgagtcttgcagtgatccagatgtgattctgtgagacagtggtaggctcgtggtgggttagtcttaggtatccagatgtgatcctgtgtgagcagcgtaggctctggttggttagtgcgttgatggatccagatgtgatcctgtgatgagcagtgtaggttctggttggttagtgtagaggatccagatgtgattctgtgagccaagtgtaggcgtctggcttggctgtgagtctatgcagggatctcacggatgctgtatcctgatgatgagtccgctgtaaggctactggcttgcgttgagtcttcaagtatccagaatgggcaatcgcaactattcgagacagccgctagagcgtacatgggtaggcgtgaggtcgaggatttggttggggtcatgtaccctgaccccgttagggggttccacactatctgagtccaaatgtggggagtgcacataaagaccagggcatctataacgagtgaagattggagagacacctgctcccatgtggggttgcccatcgctgacacaatttgcctggaattaccacctttgcaagcgatctagacaatgaatgccaggtgggcgaccttaggggcatgggcgggcggaggatgtagggaaggaagggagaagtcaagaagggacttgtggtacccccctgggcacaaatggcgcccacccggcaactccgatcctgtgggccctgaagggcctgcgggaagaaaaccctggggcaagttacacgacccatcagctgatagcggaagaagaaagtgggcaacccttccgctggatgacccgtttaaatcgcaggagtg

SEQ ID NO: 723000 - DNA, 281 bp, Homo sapiens
gggggggattttgtctttttggccacagggggtttttttggccccccgggggggggcccgtttagggccttaggttttttccaggccccctttttgtttgtggtttggggggcggttttggggggggttttgtggggaatggggggctttgcgggggtttcggacccgggggggctttcccggtttccccttgggggggggggggttttttttgggcccgggggttagggggggcccccctttcccccccccgccccatttaggtttgccccccccttcca

SEQ ID NO: 723001 - DNA, 1284 bp, Homo sapiens
  misc_feature (376)..(376): n is a, c, g, or t
  misc_feature (405)..(405): n is a, c, g, or t
gtaaccacgctgttcgcggacaccattagggctgaaggctagagtgagggacttcagtgttgctaggatggacgtggtgagatgagctttgagaccatcaggcagtttactactcgtgctctgggctactcctaatgtcccatcagacttagtgccacgaagcacgagagatctatatatgttcctaatgacgactggtacgtcagccactagtactttcacaactggacagacacacttactaggacgagtagaattcattgattgcaagggggactcgagaagacgcgcttagagtagaccaatttttgtcctgaaacacaccgtttatcgctagcacgagcaccaagtccaatatgtgatgttgggaagatancatacatgtcagctggtaacgatctctgnctgtatacatgggatgatggttaactaaagcatatgtaaggaatcaccttatcgcggaatagctagtcgctagtcgagactatatcgtgggaatagttatatctcagacccagtgaatttgacggggaggacatgacactataccacccttggggatgttcctcccatagttcctcctagaggctttcgtacccctttgaataggtcaaacatcctttaacagtctcggggtatattcacaaggacatcctgtcttgatttcgatcacttttcaattctgtccagtttatcatttgccatcttaggctataggcctttgcactttatctatacctatcttcttttcgtctgttgtcccattttttccaggggtataaatggtcccccacgaaaactttttataaggtttctgtgaaacactgaactctctctgtcctcgttccatccaacactctctaacacaatttgcaccacatttagtaaccccttaaacttaacgaataacggggggggagggttgtcttacaaattattcgaatcgctgtcttccttatatccaagggctatgtaagcgctccggttagaagacgtttcacggttagcggtctcacactgggaacttttgaactgggtcagagaaaaaggaaggaataaaacggacttttttgcgaagagggactttgggggaccattgtttacactttaacttttatgccttaggggtaaagagagaacttcactctttccttcaaaatttttttaggcccttgacattatggttgcgatctttacgcattggttgaaatcgacttttcgcagttcattacaacggaagtacattcagaagattattgattaatatgtacacacaccacagaa

SEQ ID NO: 723002 - DNA, 319 bp, Homo sapiens
agcaattctggatcctcctttatagcgcatgtgagaatggaccaatacagtgtgtgtatgttgaactgtccttgcatttgtgggataaagctcacttgatcatggtgtatgatgtttttgatgtgctgttgaattcggtttgctaatattttgttgagaattttggcatctatgtttatcatggatattggcctgtagttcattgttgttgttgtatccttatctggttttgatattagagtaatgctggtcttatagaatgaatttggaataattccctccccttagatttttctggagtagtttggataaaagttgg

SEQ ID NO: 723003 - DNA, 92 bp, Homo sapiens
ggatttgctggtgcagtacaactaggcttaatagggacatggacgatattcgaaggatggaagaagagacgaagagacagctggatgaaaaa

SEQ ID NO: 723004 - DNA, 794 bp, Homo sapiens
  misc_feature (377)..(377): n is a, c, g, or t
  misc_feature (648)..(648): n is a, c, g, or t
  misc_feature (773)..(773): n is a, c, g, or t
cgaaaatgcggggggggggtgtttaaacttacgcagattccagaagcttatatgacatcaaggctgtcatgaacatctgcatccctcatacagccagactatcagatggagctgacgacaggctactggctctgttactaacctagggcgtgatgctagcggataagtgcgtggaggatgtcatacagacgcaccactcacagggacttagtgtctactacggagacatcgaagatgccaagacacacatcatctgttacgcaggataacgtgtctcaccggctacttgaggattagagcaagagacttgacagatacacagcactctcctctgctgaatcacatcttctttacaggacaatgggagagactctttnaggtcgaagacaccgaggaagaggactttcactgggaccaggtgaccaccgtgaatggcctatgatgaagcgcttatgcatgttgaacatacatcactgtaagaagctgtccaactgggtgctggtgtgaaatacctgagggatgcctccggcatcttcttcctgcctgatgaggggaaactacatcagctggtgaactcacccacgatatatccaccatgtttctggagaatgaagacacaaggtctgccagcttacatttacccctcgncattactggaacctatgatctgaagagcgtgctgggtcaactgggatcactaaggtcttaagcatggggctgacctctcctggggcacagaagaggcacccctgaagctctccgggcgtgcatanggctgtgctgaccatccactg

SEQ ID NO: 723005 - DNA, 1472 bp, Homo sapiens
atccttcacctgttgcctggctagagttgtctggctccactttgagctcttgcagaaccagccctttttcgtgtggtccaggaaagtccatgcctggcaccacctcctcctctagtgactccacgtagaagagagtcctggctggctgctgagtgccctgcccaggagccccttgctgcagcctcgtggcaactggaagcagggtgccattcagcggattgaaggaagaggaggaagaggacggggaggacgatgaagaggaagaggaggaaggcttcttccagaaagtgctcacaccgcttctctcttggcttttgagcaggcgactctggctgggtccccagtgctcaaagctgccactgccgtcctgttgcaggcagcctccccccgccgggccgccggtggaaggagacgggtggctgaagagtttccagcggagtcgcagaatgtgcttcacatcgaagtcttttcgcccagagcctgacatgctttacgcacagaaggcaaaaggctggcagctcacgcagggttctggaggctgggaagttcaagaccaatgcacgagaatttggtctaaagagaatcttcttgctctgaacacacatagtagaaggcagaagggcaagagagagaacaaagtctgtgtctccacatggcagaagagcagaggagacagaacctactcctctatggcaaccaccccatcaatgacaaaaatcctagaaggatgtatgtataggaagttgaagtgttgagaagagaatggctcagagtcaagcgggaacaagattcaaacttcagagagagagggaagaaaaacatttaaatatatctggcataatccaagactatttacgacaagtgttctgtgtttctaataataaaacagacttcacctcggagtacctgcagaactgggaccccaatgaccagggagaatgaagaacaacttgtttgaagattgccttttctgactcccagcttccacggagagattaactctgttggctgaagccctatcccaattccttggctagaccctgggtccttcatgttagaaaacctggctttactactactactactactactactactactactactgctactgctgctgctgctgctgctgctgctgctgctgctgctgctgctgctgctgctgctgctgctgctgctgctgctgctgctgctgctgctgctgctgctgctgctgctgctgctgctgctgctgctgctgctgctgctgctgctgctgctgctgctgctgctgctgctgctgctgctgctgctgctgctgctgctgctgctgctgctgctgctgctgctgctgctgctgctgctgctgcattttttaaaaatatattatcttattttactatttgatgttataattgttatatatttttccatacttcctcatactgcttatctcttacttaagaatttatgaataaagaattgatttttca

SEQ ID NO: 723006 - DNA, 924 bp, Homo sapiens
gatgccgcctttcgaagtgggtttggattttggacctttttgtctgcaaacgccttgtcctctatgtgctcccgttgggatgtgcaaaccgatgtttcgtcctgtcctagtgcgatccctcgtgccggtatggctcttgtagtgtaaagccaggaacgcctccgatgaactgtgagacgggtttcttggttaatcggtccgttatatgtcgggaccacggatcatcgctcggggcccatgcttgtgttagtactccgtggatgctagggtccgtcatgggagacggccttgtgtactcgatagaatgggctcatagcgatgtgctcgctgcccgatggttatcctgggtcccaaacgaacgtcacggataggcccttcgacgggagacgtgaccggagttatctagtgcttcgagccgtcaactcaccataaggcctgagcccatccatgtcgctagtccctaacagcgccttgtgagcatggacggccatgcaagtacatcagactcgggacctctgcggggtcctagctacacaccatccacagcactgctccacccacctcatagacaccggaccagtgggctgcagaccccctacaagcacaccgggcgcctggactactagctcacacgtcacccctctcacacaggaccgcggcctcgcatgcacggacaacctgctgcagctccctgcctcaggcgcaaagctatcggacttgttttagagccaggcctgggctgggctcatagacgcttcacagagccctgcagggcagctgtacacccagcagaggactccagccttctcggggcccaggcaatgggccagaagctgttgaccataccaggagtcactggagttaagggtctgtgctggggacctagtactaggcacataggcactcgtgcccacacattacccc

SEQ ID NO: 723007 - DNA, 128 bp, Homo sapiens
attcaagcttctaacgatgtacggggacatgtatataggtcctgatgccttctccaccccgcccctcgaccctgttgccacgttgtttcatgtgtttaaggtaagacagaaacccccccaagcaaaaa

SEQ ID NO: 723008 - DNA, 957 bp, Homo sapiens
ctgtggtgcattaaagtcaaagacgcgctggcgcactgttcagccacgtagccgtgtgggtagcacgaacctcttgctacagccttggtagaaataatgtggcgcctgaagagactttcgtggaagccgatcttttcggcggaatattagttatgccgcccgtcgctctgattatgcgccggggtgccccatattgtgaggataacatacaatgcttttgaaagaggagccggttgccttcttaacgagccaggtccggccgcaacattccgagaacgggctgttggtaacgtcgcacaattgtttatacggcacgtttcccacaccatggtgccagaggaagaaggttcacagcgccggttccaaaagccacccctcttggggttcgagtccccccgccgagggacgcaagcccggggtgcagaaaaacgccgtgtggggccgcgccacgaggcccgtggaagtaaaaatggggagccgcaatgtgggacagcgcacccgccctgttcagacggagacagaacgctccaggagagcaacagagcgctccaaagaggaaagcccaacctttgtgccgggcgaagaacactcggaaatacccctcggtgcccgcccgagacccacaatagtctttataatcccctataataatatcccgcggaatactccccaattccgcggaatcgagtagacctgtagtacagaccaggagcccaataggcgcccctctaaaccccgccacttggggcacataatggttacacccagtcgttgggataattccaaaggtgaccccccatctttgttgttgacaatccgcacattttccaaggctctaagtcaaggggggctcccaatttcaggcattccccggtgccccactgaaagagaaaaaaaatttttttggccccacaaaaaaacccccacccctagacccgtggtggggcgaaaaaaaca

SEQ ID NO: 723009 - DNA, 265 bp, Homo sapiens
taacatattacgacccgagctgatacgtttcaatagcatcaaaccaccttgatgatgggtccaggatcagctggcagaaggtgcgtggcagcttcttcccttcgtgggctggtggctgacttgctgaacttgcccgttgggtgggtcaaatgtacctagttaccccgacagcttcttcatcattgtcctctacctttcttgtgcccgctcggcaggccccaatgtggccctcccccaggcagcatgtgctatagagacttctaaa

SEQ ID NO: 723010 - DNA, 540 bp, Homo sapiens
ctggtctggaccaatccaagagcgacagctaaccgggaaaatcctagaatggcctgctgaaggctggtcctggccagccacaggcctgcttcctgttcattgcgaggtgtaaactgacgctgggagtggccactagatggcggcaaactcagccaagtttggcatgggcttccgttggcgctaccaactggcaagctgtgcaggttcctggcatccatttcattagcttcaaaataacgcgaccacgaatagttgattgaattttagaccccacgtaaaattcttctggacctcacttattgtgttggggcagggatttactgttctttcaattcacttggtctttaaagcatagagggcaggcagcaaaattaccctccacgtcctgacatctctaagggaataaagcttgggactgctataaataaggaaaacttgttaaagttcatgaaatcagctatggaaattgtggaacataagtcatggttccatttgttttatagaagtgtaaaaaatgaaatctgttcttcaagatagaaa

SEQ ID NO: 723011 - DNA, 153 bp, Homo sapiens
ctcagtcaagacgaccctgtgctgcctgagatcagccgtagtcgaatgagaactgtagtcagagaataactacatggtatactgtctggagctaatcctgtccaggtggaagtaaggagaatttcgatgatagtcagaggaaccgaagaggag

SEQ ID NO: 723012 - DNA, 322 bp, Homo sapiens
gcggtacctgcagctctcgtctgatgcaacactcattcctgctcaaccatttatttctacacaaatggatattcgggactttcaaatagttcaggccaagcgtggtggctcatgcctgtaatcccagcactttggtgggccaaggcgggcggatcacctgacctcaggagttcgagacaagcctggccaacatggtgaaaccccgtctctaccaaaaatacaaaaattagccagacatggtggtgggcacttgtaatcccagccacttgagaggctgaggcaggagaatcgcttgaacccagcaggcggaggttgcagtcag

SEQ ID NO: 723013 - DNA, 506 bp, Homo sapiens
ggaaaggttatagaaagtaaaggaactcgggagattcattaccccggttcagcacccactaccgtaaaagatcccaaacatatgactagaactccgtcacaccccattggaccaatctatcaccctatagaagaactaatgttagtataagtaacatgaaaacattctcttccgcataagcctgcgtgagattaatatccttaaatgacaattaacagcccaatatctacaatcaaccaacaagtcattattaccctcactgtcaacccaacacaggcatgctcataaggaaaggttaaaaaaagtaaaaggaactcggcaaatcttaccccgcctgtttaccaaaaacatcacctctagcatcaccagtattagaggcaccgcctgcccagtgacacatgtttaacggccgcggtaccctaaccgtgcaaaggtagcataatcacttgttccttaaatagggacctgtatgaatggctccacgagggttcagctgtctcttactt

SEQ ID NO: 723014 - DNA, 107 bp, Homo sapiens
ctctagaggatcctgattaagcgcaggggggaccaggagcatgagcagaggcaggcaggtgggaggccatggagcttataacctcactacaggctcagattgctttg

SEQ ID NO: 723015 - DNA, 136 bp, Homo sapiens
acgtgtgaggaagtgtgctagattgactgcagattgaggataccagacccgagttgtctgattcacagatgaccagtcaatcagggacgtccgcacttcagatagatacgatgaggacgggaactgctctttaata

SEQ ID NO: 723016 - DNA, 865 bp, Homo sapiens
caagaaaagtgttaaagagcgaggccggttttcccaagggttcgtgccaacattaggccggtgtacaagaggaaggggtgggtaccacaaacctcgttgccaataagatataacctgtcggacccgattctatgccgattccgagaggaagtcgttgcacttgccccccggcagtaccaatgtttcagtcccagccgttttttctaatgcgggctgtaaggttgcctgctagaaccaagcggtttttggtccaggacgagcgatgggcgcagaggtgtacaaacaggcgagctcaaactaaggagccacaacttctggccaaatacacatttatgcagaaccacctgtctggcaacagactttgcgtacataaaatgttgcgggtgctgtcggctgttacatgtgtggggggaaacaatctctgtgggatagcgcactccattttggtacaagaaaaagttctatgtgtgaaaggtgcgaagctctggttggcccaacacaatcgctatttcatgtcaataatagcgcgtgcagttagagtacaacgactgcctcggtgagctaaggtgtcctcgtgcgcgacaaaagcggcgatgaggattctcacgcaccatgtttccaccaacgcgcgcgtgttatttgtcaactgagtgtgccattccacccactacttttgtccagttatacgtgagagttgacacgccttctcacgagaaacatacttctattttgatcttacagctcagttggttaaaaccatggctagacacacgcgccaaaacaggtgcgtccgagacgcgaatacccccccactccgcctcgcccagggcaaattggattttcccaaacaaacataacgcacaag

SEQ ID NO: 723017 - DNA, 1176 bp, Homo sapiens
cgactgcgcgccaatatcgatcccaccctcttcctcatccgcacattctccaatgtcatcagctccattgtctttggggaccgctttgactataaggacagagagctcctctcactgtttcgcattatgctagtaattgttccagttcacgtcaactccacggggcagctctatgagatgttctcttcggtgatgaaacaactgccaggaccacagcaacaggcctttcagttgctgcaagggctggaggacttcatagccaagaaggtggagcacaacacgccactggatcccaattccccacgggacttcattgactcctttctcatccgcatgcaggaggaggagaagaaccctaacacggagttctacttggaaaaactggtgatgaccagtttgaacctcttcattgggggcaccgagaccgtcagcaccaccctgcgctatggcttcttgctgctcatcaagcacccaggagtcgaggccaaggtccatgaggagattgacagagtgatcggcaagaaccggcagcccaagtttgaggaccgggccaagatgccctacatggaggcaatgatccacgagatccagagatttggagacgtgatccccatgatttggcccggcagagtcaaaaaggacaccaaatttcgggatttcttcctccctaaggggaccgaagtgtaccctatgctgggctctgtgctgagagacccaatttttttatccaagccacaggactttaatccccagcatttcactgaattagaaggggcacctaagaagagtgatgcttttgtgcccttttccattggacagccgaattgtttcggagaaggcctggccagaatggagctctttctcttcttcaccaccgtcatgcagaacttccgcctcaagtcctcccagtcacctaaggacattgacgtgtcccccaaacacgtgggctttccacgattcccacgaaactacaccatgagcttcctgccccgttgagcgagggctgttgcggtgcaggtctggtgggcggggcagggaaaggcggggtagggcggggttggcggaagaggcgggtataagatgggggaagatgcgggaaaggaaggggcgtggtggctagagggaagagaagaaacagaagggctaagttacttataaggtgcttcgagctggatg

SEQ ID NO: 723018 - DNA, 335 bp, Homo sapiens
gaccagccagctggccctccccggcgacctttgcatcgatggtgaactccacgcgcagtctgggaggcacgccagtggtgtggagcccggtgccactggccttcaccttgctggcatcatgagtaggcagcaccttgaccttgaaggggctccggggtacctcttcatctccatacagtactgagatgctgtagggcccttctcggctgggcacataattgacggtctgggcgccatcagcgttgtctaccacgtccactggctccaccaggcctttgggcccttgcactttgacctgcaatggggccacaccagccttgcttgtgtccacctgg

SEQ ID NO: 723019 - DNA, 705 bp, Homo sapiens
ttttttccaaacggagttcgctcttgtggcccaggttgggagggcatggccccgtttgtggtcagtgaacctccgcctccggggtccagcgattcctcttgcctcagccttccgagtagcggggattacgggctccgtgccaccacgcctgtggtaggaaatttttggtggtactatgactttgggatttaactctccagcttcaacagatacttctttggtccaataattctcaggaatgttctaggcagaacaccgggtttacccgtggtggatactcagaaggagtgtgctctaaggacttatatggcataatacatattcttttaattggcaatcctaggtactctaatagcatgagtggcctatagggagttggttgaacgtgcccttgtttttccaaagagtaaactttaccggattaaacaattatttcctatataatagatttctagaaacactgtggtttgtggtgcccagtctaaacgtgtgggctcactacataccccatgtgcaggtaccgtttgtgtaccattactcatttctgggatatccctttaatggggagatatttggccagtggtacctaaaaaactttcccagtctctaccttcatgatgtcgacattgaatgctcacgtttctatacaattttaccaggggtcagacacatattttataacttttattcaaagccaccaggggt

SEQ ID NO: 723020 - DNA, 333 bp, Homo sapiens
gcattgcagacgccatgtgtggaaatatgaggagaaatattccatcttggcagagaccacagaattggtttttttttacttatgtgctctggagggaactaagcgcacagaatctgtttgacatttgttatacatataggtgctctctcacctcccccatttctgtgttctttattcgtagcattgctgtctgcaagggagcccctagcccctggcagacatcgctgacttcagtgccccttttctctctgctagatcgatgttgatgcactggaggtcttttagcctgtcccttgcatcgcgcctgctggaggatgagagagctctgctggc

SEQ ID NO: 723021 - DNA, 726 bp, Homo sapiens
gggtctccaatggcatcactgcgtctgctggcttctacgctgaagttctgctactccccagacctcagggacaagtgtcgtggtgttcaggcttggtagcaggaagtacccagtgcctacatggctggacctcttctgcctcttacagacctgactacccgttcacccagagcacttgggcaagctgaagcatggtttgcctggtactcttgctctgggatgccattaaggagagagcaggattgctgttcttcctcgtctcagcggtgtgattaaacatcgagtgaagccatcgtgcgtatggaaaagacccatcgagattcttgtatgtacttagtgtttctttatttccttagtcctctctttccatccccaatatagtgcacccgcataagagaattttatcctgaagtaggcacagagcgtggtggctcacgcctgtaatcccaacactttgggaggctgaggcaggcagatcacgaggtcaggatgttcgatgaccacgcctgtaaccaacgatggtgaaaaccccatctctactaaaaatacaaaaattaagcgggtgtggtggcacacaccagtaatcccagctactcaggaggctgaagcaggagatttgcttgaacctgggaggcagaggttgcagtgagccaagattgcgccgttgtactccagcctgggcaacagagcagaccatctctgaagaagaatttgtttcctgaagga

SEQ ID NO: 723022 - DNA, 498 bp, Homo sapiens
  misc_feature (320)..(320): n is a, c, g, or t
  misc_feature (335)..(335): n is a, c, g, or t
taaaggacagaacggactaaagttgaccattggcaaatggggaaaaactaaaagatgagaggactggatcctcctctttcatgccctgtccacagtaagttatcacttctacttctctcatagccttcttctgcctcctggcaacaactattttcagaacacaatttactaccaatctctaaagacccttgaagctctgccattttatggttttatttgtatttcatccaatttcttttcaggagatgagaagcttcggtttcagaaatatcagagtcattttggaggagagataaagttttccttacctggacagattntatgggtgatatctntacaggaacaggcagcatagtgctgcccagaggggcccaccaggagcctgactcattctcctcatacataatacaaagtggtacaggccacagggaggcaccaagaaactgagccagcttctggagagacacaacttttttttattgatgaatgtctgttcac

SEQ ID NO: 723023 - DNA, 240 bp, Homo sapiens
tcgataggttatctgtttactctattgatattttcttttgctgtcagaagctctttagtttaattgagtcccacttgtcaatttttgtttttgctacaattgcttttgagaacttagtcgtaaattctttcccaagattgatatccagaatgctatttcctaagttttcttataagatttttacagtttgaggtcctaaatttaagtctttaattcatcttgggtcctatcaaaagacga

SEQ ID NO: 723024 - DNA, 574 bp, Homo sapiens
  misc_feature (566)..(566): n is a, c, g, or t
agctaggaagaaaggagtataactcctcaagaccaagctagagctgaactctgactcgccttaactgcagcattcagcttgatgtagcgagattaacatacaggcacgtggcaatgtaacgagtctgtattctttatgacccctaatgagcaaggaagctgacgaagtgcagggagtcaggagcaccttcagagcaaagacagtcagttgataacaatccactgaggagaataatgattccctacacttcccctaccccatgaaaaacagccctgccagaagatgcagatggcccgtaagatgactcactctgatgagctataacgccgctctcatttattaagctctgcactgaattaagggaaattgactacagacatggtagatactaactccagcatacagactatacacattgtcatggcacacccgacgaacccacagcaaagatggcatatgccggcgtgaagagagcaactgtcagagggagtctcggaaactgtcggatgggcgtgagtacataacaggcaaccacgatcgatgcgtattacagttgatgctcgcgntcattagg

SEQ ID NO: 723025 - DNA, 467 bp, Homo sapiens
taagtgtaaaactgtattttctttttatattttgcgatggagtctcactcagttgcctgggctagagtgcaatggtgtgatctcggctcactgcaacctccgcctcccaggatcaagcgattctcttgcctcagcctcccgagtagctgggatcacaggcacctgctgtcatgcccggctactttttgtatttttgtacaggcagggtttcaccatgttggccaggctggtctcaaactccccgactcaggtgagtcacccatctcggcctcccataatgctgagattacaggcgtaagccaccatgcccagcctgctttgtcattttggacagataattttgtagtctagattgggttttatttcacataacagtttttaagttctcaaatatagtctccttttctttaatggttactgacttaacgtgtaatgctgaattaggccattcttgtataactataagg

SEQ ID NO: 723026 - DNA, 565 bp, Homo sapiens
tgagcatgaggccaataagcgccacactttgcgcgaccatatgaaaagctttattccatcccatggtcccagggatgcttgtaggacgaaagcctgataccacgcttgcatcacggccaaggcagcaaacgaagcggatgctgtgacactggatgcacgttagacgcatgacgcttacctggctaccaataacctgaagcctgtcgtggtagaaatctatgggccaaaagatgacacacagactcactattatgctgctgatgcaatgaacaaggatacgggcttgcacatgaaccatcttctaggcacgaagtacatgcacacgggtctaggcaccgtgcactgggtggaacatgcacatacgcttactttactgtgacttaccttaagcacgctaacctcctgagaaagtagagagcaaattgctactcgggcagctgagcccttgtgcggatgggacggacttccccaactgtgtcaactgtgtacagggtgtgggtggttcaaccctcaccaaaaattatggttactaagaagccgtcaggagctggaagatagtgcttga

SEQ ID NO: 723027 - DNA, 810 bp, Homo sapiens
gacagaggtgtcagcgaaggtgtaatgagcagcatcccgacatgaatcagtaagtaagattatccaccatatccagcgtcaggaatttaacccataaggcagcagctctttttcagacaccctggaagcaatcgagcccccattgcagccatcatttgacacagaaaacctggcagaacaatctccatatacagcaaggtcatagagcggggcatcgttgacagcatcacgggtcagcaggcttcatggaggctcaggcctgcacaggtggcatcatcacaccacaagacacgggccagaagctgtcacttcaggacgcagtactcccagggatgtgattgaacaagacatgggcaccaggctgaagcctgctcagaaagccttcataggctatcgagggtgtgcacagggaaagaagcaagatgtcagccagcagaggcagtgcacagaacacatggctaccgtatgcaggctggacagcgaataccatggagattcaagatacctcacgggaggacctagaagacccaggcaagtgcatgggagagaacataagcaccagacagaagacacaccggacaagagggtaacatagaatgagcagcgagacggaaccaaaacgggatgcaacgaacacccacgaagacacatgccaacacatcacagaagcatgaccaaaaaaaacgcacacataaaagaaacctaaataaggacaggacacaaaaaagtcgcgccaacagatagcaaacaaaaacacaggggcaagaaccagccaggacgacacgacacacaggaaacacacgagaaacc

SEQ ID NO: 723028 - DNA, 652 bp, Homo sapiens
ccccgcggaggaggagaccccattctataccaacacctattctgatttgacggctcaacctgaagcttaatatacttatcctaccaggcttcggaataatctcccatatgtaactatactactccggaaaaaaagaaccataaggatacataggtatggtctgagctatgatatcacatggcttcctagggtaatatcgtagtgagcacaccatatatttacagtaggaatcagacgtagacacacgagcatatttcacctaccgctaccataatcatcgctataccccaccggcgtcaaagtatttagctgactcgcacacactccacggaagcactatgaaatgatctgctgcagcgctctgagccctaggatgcatctactgaacaccgacggtggcctagactggcatagtataagacaagtcatcactagacatcgaactacacgaacacgtacttcacgaagatcaggacactaggcactatgtcctatcaaaaggagcagtataggccaaacataaggaggcaacatacacatgactaacccctaagcccaggcacacaaccgagacacaagactacggccacaaaccaaaacaccatcatatacatcggacgtaaattcacacaacaaccaacacacacagacc

SEQ ID NO: 723029 - DNA, 908 bp, Homo sapiens
  misc_feature (38)..(38): n is a, c, g, or t
  misc_feature (170)..(170): n is a, c, g, or t
  misc_feature (356)..(356): n is a, c, g, or t
  misc_feature (358)..(358): n is a, c, g, or t
  misc_feature (373)..(373): n is a, c, g, or t
  misc_feature (379)..(379): n is a, c, g, or t
  misc_feature (392)..(392): n is a, c, g, or t
  misc_feature (395)..(395): n is a, c, g, or t
  misc_feature (414)..(414): n is a, c, g, or t
  misc_feature (417)..(417): n is a, c, g, or t
  misc_feature (419)..(420): n is a, c, g, or t
  misc_feature (436)..(436): n is a, c, g, or t
  misc_feature (438)..(438): n is a, c, g, or t
  misc_feature (443)..(443): n is a, c, g, or t
  misc_feature (446)..(446): n is a, c, g, or t
  misc_feature (464)..(464): n is a, c, g, or t
  misc_feature (467)..(468): n is a, c, g, or t
  misc_feature (471)..(473): n is a, c, g, or t
  misc_feature (479)..(479): n is a, c, g, or t
  misc_feature (484)..(484): n is a, c, g, or t
  misc_feature (497)..(497): n is a, c, g, or t
  misc_feature (502)..(502): n is a, c, g, or t
  misc_feature (504)..(505): n is a, c, g, or t
  misc_feature (508)..(508): n is a, c, g, or t
  misc_feature (511)..(511): n is a, c, g, or t
  misc_feature (523)..(523): n is a, c, g, or t
  misc_feature (528)..(528): n is a, c, g, or t
  misc_feature (554)..(554): n is a, c, g, or t
  misc_feature (556)..(556): n is a, c, g, or t
  misc_feature (558)..(558): n is a, c, g, or t
  misc_feature (560)..(561): n is a, c, g, or t
  misc_feature (571)..(571): n is a, c, g, or t
  misc_feature (577)..(578): n is a, c, g, or t
  misc_feature (591)..(591): n is a, c, g, or t
  misc_feature (596)..(596): n is a, c, g, or t
  misc_feature (599)..(599): n is a, c, g, or t
  misc_feature (602)..(602): n is a, c, g, or t
  misc_feature (610)..(612): n is a, c, g, or t
  misc_feature (621)..(621): n is a, c, g, or t
  misc_feature (774)..(774): n is a, c, g, or t
  misc_feature (778)..(778): n is a, c, g, or t
  misc_feature (781)..(782): n is a, c, g, or t
  misc_feature (792)..(792): n is a, c, g, or t
  misc_feature (812)..(812): n is a, c, g, or t
tccccccgttagattgttttaagtgtttgcttttcatnttttatagatgtaatctgattttcaaaaatcattaacactttttaattagtatcgactaagactttttccccctggaatcgaggttgtgtgtccgtcatcccagcccccggttggagcctgctctttgaacntgctgcgctcctcagcagcttctgtcctcttctgtgagtcagtcagcgagtgcttgggatccgcatccagccgtgctgggcacacaacaggctgtgtgtggaaatggccaccaccagtcgccttccccaccccaccacaaaaagagaagctgtgtctttagacaaccctgaggtatctgtgtaacnancgttctgtgtttganatttgngtaaagtatgcangcngtcttgtactgtgacctangancnnaactgtaactgcattngnaaccntgnaaaaattagatattgttntgnnacnnntagacngtggnaaatatagaaccntgaancnngcnccnatcccatgtctncccancatgaaggatccaaaaatgtttttcnangngnnctttgttccnctgganncttagagtcatgngtttntgngcngatttggnnnccttcctcngcctttgttcactgtgagttctgatgtcttagtgacttagttcttagaagctcacgccttagtttgaaacagattctccacggtggtccccaaaacactgtctgcatatccataagaattgagcgctatgggtgttaacgtgcatgaggatcntttncannagcaagtacnaaaggagaagaggacatccnttgaatgagtgtgttttgtacataacttcagatacttgtggacatgccttatatttgtcccaccactgtcagaattaagaacctttttaaatgaga

SEQ ID NO: 723030 - DNA, 469 bp, Homo sapiens
ggactcttgatatcagtgatgaaagtagtggagaaggaagtggaagtggctgtgagtatcagcagtgcccttcagagtttgactacaatgccactgaccatgcgtgggaagagtgccaatgagaaagccgacagtgctggtgtccgtccgggggcagaggcctacctcctcagtgtcttcggcatctggtgcctggttatgcagagagagtggagataattctcaaactctgagaaaaggtgttcatcaaaaagttaaagggcaccagttatcagtttgctagcatcctagggacttggctttttaaatgaagggacgagaatgtacagtttggagtatgtggccactggttaaggaagtgcggactgtgttgtctcattcagttttgggaggcacagggacggtgcattgagtgggttccggttcccccaaatgatgttaaatgtggcttggcacctaggggtaccga

SEQ ID NO: 723031 - DNA, 209 bp, Homo sapiens
  misc_feature (1)..(1): n is a, c, g, or t
nttaagctaatatgtcggtagtctggtttgtaggtgaccgaaaggtattcctagaaatgcattttgaagacctctttctataggtccacacggtgttttggtttggtgcggacgaccaggggaacttgaagataccgattcggtttcagacggttaaagtgtcgacgagggaacctaaagatcgattttcgtttaagagtcgaactaca

SEQ ID NO: 723032 - DNA, 971 bp, Homo sapiens
  misc_feature (504)..(504): n is a, c, g, or t
gctgtgagcagagtgcatcagccggacgagcagcggtggcggtcgggagcgatggtgaagatggcggcggtggccgttactacggcggcggcagtgagggcggccgggccccctaatgcgtgctcaacgactgactatgccggcgagcagcacggaggcggcggctggtggcggtgtgaggagccgtggtcggagggcggcggcgagcggttggggagaactacgatgacccgcacaaaatccctgtcctccccagttgttcacattcaggagcctgattgacggtgtggtggaagcagaccttgatggaggccttgcaggagtttggaacccatcagctatgtggtggtaatgcctaacgaagagacaagcactggtggagtttgcagatgtgttgggggcttgcatctcatggatgtaggcagacgaggaccagatatacgattggtggatcgggctcagcgtgccgttcagaatagctctaggcagagcgagaaggatcgnccctcggaccgtggggtacctcgtgagtgaggtcccggagcgtgatacagtgtgctttctcgtttaccatcctgaacctccagtttattcgatcacctacggatgattcgtttacactatctgtaagtccgttgatgggcctgtccagagaactcgtcatttccaggaagactggagttcaggcgatggtggaattttgacgtcagttcaaaagtgcccagcgggtcaaggcctctcgtgaatggggctgatatctattctggctgttgcactctgaagatcgaatacgcaaagccttaaacggcgttgaattgtgttccagaattgctcagggatacttgggacctacaccagaccccgagtctcagtggaacaggtggcgctggaggaacccgagaaacgccagaggaagcccctctcctggcgaattcacccgagaatattggcagggcccacggtgggtacca

SEQ ID NO: 723033 - DNA, 702 bp, Homo sapiens
  misc_feature (3)..(3): n is a, c, g, or t
  misc_feature (65)..(65): n is a, c, g, or t
  misc_feature (68)..(68): n is a, c, g, or t
  misc_feature (139)..(139): n is a, c, g, or t
  misc_feature (199)..(199): n is a, c, g, or t
  misc_feature (214)..(214): n is a, c, g, or t
  misc_feature (221)..(221): n is a, c, g, or t
  misc_feature (229)..(229): n is a, c, g, or t
  misc_feature (234)..(235): n is a, c, g, or t
  misc_feature (277)..(277): n is a, c, g, or t
  misc_feature (296)..(297): n is a, c, g, or t
  misc_feature (300)..(300): n is a, c, g, or t
  misc_feature (311)..(311): n is a, c, g, or t
  misc_feature (326)..(326): n is a, c, g, or t
  misc_feature (341)..(341): n is a, c, g, or t
  misc_feature (353)..(353): n is a, c, g, or t
  misc_feature (380)..(381): n is a, c, g, or t
  misc_feature (413)..(413): n is a, c, g, or t
  misc_feature (424)..(425): n is a, c, g, or t
  misc_feature (428)..(428): n is a, c, g, or t
  misc_feature (450)..(450): n is a, c, g, or t
  misc_feature (496)..(496): n is a, c, g, or t
  misc_feature (500)..(500): n is a, c, g, or t
  misc_feature (536)..(536): n is a, c, g, or t
  misc_feature (680)..(680): n is a, c, g, or t
tanagtaaaaattaagccaatttcaatcattttggtcatcatcccagtctttcttcccacttggnggnttgggcccaccagctggttttgccatgatgatctgatccactctaagtacagtgactgcagcattagtagngagtttgatagcccaatattttcccaggtaagtatctagaataccagcttccagcatgtnctttacagcaggganttcggcntcaatatntaatnnaacgtttttatttccttcttgatgtactgcataaagtttagngattacttcattggggttnngtncagggtttttngccagtgcgcggggnatagcttcaaatgcntcagcaaacttnttaatagcatactgtttaagtccaggnnatgtctttccatatgatgtgatttgtttgggnaattgaatttnngtngcgccaggtgcgggtacaagangtttatcccttgtaagaactttgaaagtattaacaccatcgtctantgcnctttctatgtgatccatcagattgtgttgtagagcntcgaagtactatggtagaaatggcgccatcttccttttcatgcttaaaaaccaccacctgagtatctccaacttctgagaggtaaacactgtcacagtgtcccatttcttcaaggacaggaggtgtcaatctaggaagagctgnagcaccaacagttttacaaagt

SEQ ID NO: 723034 - DNA, 524 bp, Homo sapiens
  misc_feature (360)..(360): n is a, c, g, or t
  misc_feature (471)..(471): n is a, c, g, or t
  misc_feature (485)..(485): n is a, c, g, or t
taaaattggcagaacttaaatagagagtatggagtaggtggcagtagtgaatcgtgttaatttcctgatttccatggttgtactatggtgacgtcggagcatgtcctgttcataagacacacactaaaatatttgggtgttattgggcatcatgtttatgatttaatgaaatttcaaaagggtttggttaatattgtgataatataattctaaaagttcattgagaagaaagggaatgggtaaaaatgctattaaagaggaatgagatattggagtttaccacctagagtgcttttaaccaagaatgtatactttagtcagtcctttattgtgattcttgtaggcaaaaaaagtattganttggagaaaaaacggctctctcaacctaaggcaaagcccaaaaagaagaaaagcccaccttgagaactcctgtaaagctggaatcgattgatggaaatgaagaagaaagcntgaaggagaactcngacctgttgaaaatggtgtgtcagaccagaaggggggag

SEQ ID NO: 723035 - DNA, 1223 bp, Homo sapiens
tgcacgagtgtttgcgtcgcgtggggcctgatcgtgcggggagcatgactgatatgtggttgtgttctccaagcgttgctcgctgtgcggtcgagaggcccgtcatgtggtggtcataacctcggtggggccccccgcgtcttctgttccgccgcgtggtgcgcgacggcggtgttgccggaaaatcatgcgtcccgcggctccccggatttttcgcggggaagttttacgacgggcctggttccagaagaaaggaggtgacccgcccccaaaaagggggggaacccacaaagtggtgagagggggcgcccaacgccctgtgggtctgtaaagggacacaggggtgcactccagtaagcgtggacagaagggccgcaacgccccggaccatctctgggacacccgcccccccgcaaaaggttaaatggagaggtattgttggggttaagacccatgggaaaaacggcgttttccaaatctggggaagaacatggggaaaaaggccaccaaatgcgcccaggagccattataggagccctctccaagaggcccctccaaaattgggccccatgagcccaccccgttttccccgtgtcttccccggttcctgcaccacaatgggcaataaataagaaagaaaaaggggaccatacaccacggaagaaaattgccccccaaacgggaaagaaaagggacaaccgcgaggagaagagggaggaatgaccacaagcacccatggacccccaggaaacctgtttgatgtaagagaagattgtatgtaaacaccagcctccagagccatatttttgcgtcccagagaagaagaccccgagggggaggcccacctgttcttggagaggagaacatcaccacccagaggtggcacccgatcttaccacaggtctctttttatctttgggataaaaataccattgaagagggatagatagctttatgacattccaggaccggatattaagtgtgaaccagaacccataggctttttatagatattttttttttacaccatattttaagccagactgctaaactgttctcctgtataagttatggtatgccatgagcctgtgtaaattttgtgaatatgtattatatttaaacccggccaccttggaatccccttaattcctgtaaaaagaccaatccatctccttgtgagtggaagtagttattctggaattaaaaaagaagatacctattga

SEQ ID NO: 723036 - DNA, 574 bp, Homo sapiens
agcgggggggggggcggagggggctcttggccgcacccctctctcgccgctctcccccccgggggagccgtcgcagcctctttgcactagtctctccgctctctcggtcatgtgaccttaacgtaaccggacaggaaaagccccgccgccgcccgccgccgccgctgcctggagacaccagaccgctggcggcaggcagcagcagcacgccagcgaagaggcaggaggcggctggcaggcggggaaggacatgcacaggcccgaggctgcccaaaaggcgcctcctcacacagcccccccgccgcagaagacaccggcagacagtgagtgtgtcccgttgaaacaactgacatacagcccgacatcttcagctatctcttacacttgatgtacactgggaagatggcgcctcagctcatcgacccggttcgataagaacagggcatcaagtttctgccacgcctacccgctcattccaggaagccagcctcgccagaccagggagccttttctccaccctgaccaagttttcccacctggcttctacatagtatggcatcagatgcaagatcat

SEQ ID NO: 723037 - DNA, 880 bp, Homo sapiens
gagatcagccaggcaacctggtgaaaccccgtctctactaaaaatacaaaaattagctgggcgtgatggtgggcgcctgtaatcccagctacttgggaggctgaggcaggagaatcacttgaacccgggaggcggaggttgcagtgagccggatgatcgcaccatgggcactccaagtcttgtgcaaacagagtgagattccggtctcaagaaaataaaaaggaaagggagaacaagaatataggctttatacctctttccttgtgtcttcaacgggcgcaatgaaaaatttccgtgaaatttcacaaaattcgggtgggaaataatccaaaaaaaaattttataaggtttacacaatattttacttcctttatagtaaaatgagtatacttaaaaaaagccttcaggggtatataatcttctaaacagtctacaattcagggtgcagtttacatttaaaccaattatgtcctctagtgtgagaaaccaaattaggcctattttcacactgttgtgttaggcctcagggcctaccaattggggtgccagataaatatgcggaagaaattacacttgaattgtgtaaaaacaatccgtttgggtttacaatgggcaaaatttcaaaagggccgtgtattcattgtaatctttgaaatattatttaattaaattctaagtattgaatgttggtgggccttaaggtacataagtactcagtttataaaactaattaatggtggtttaccaagctccttcttttaaaagtaattttaaaaaacatgggtttccaaaggattttatgtgtgaaacgttcaatgtggtacggatatgtattttcaatttattagcattggaatgggggaaaatgtgtacatggggg

SEQ ID NO: 723038 - DNA, 130 bp, Homo sapiens
ctgaggcggcggcgggagcccggtatggcgtctggtcttcgcgtcgtgcccgcggagccagacagctgacccccggacgcggggagaagatggtgcctagacggcctcgtggcccgccacgcgccgccac

SEQ ID NO: 723039 - DNA, 154 bp, Homo sapiens
atgttcagcctcatccgtcggctgtgtgatctcgcatccacgctgcgtggatcgatctcctactgatgcagctttatgcatcctacttcaggttgcagcgcccatgcgcgcgtgcgtgctagaacccgggcgctctgtcggccggccagtctgc

SEQ ID NO: 723040 - DNA, 643 bp, Homo sapiens
ccacggccccttccgcaggctcctccccagaccctgaacctgggctaccaggtgcgaagatacatgcagaaggtgaaaaaaccacctgatgaggactgcacgcatctgcatggagcgactggtcacagtcatcaggctacagtagggcgtgcttcggcgacatagggcagtgcaggcctagagactcagtggcgccgacatgggccgcgtgatggccgacgactggtaccacactgccatgtgcacatcgaacgagcacaatggtacataccaaatagagcaaccacaacggaaatgagcacgcacctgcaacgctgccaccaacacatgacaacaaggacccactcataacgagagagacgacacgaaccggagatagccgccacgcacagacactgagcgcaatgaactgagcacgaatatcacaacgcatcaaatcccaccacaaccatcagacactgacccccgagaaataataccccctgaaaataccccaagacaaacaactcacagaacaagtccgcaaccatacatggacaaatccccccaaacaaggagcacgaatcaccaagtgggggaccccagtgcaagacaaacccccaccaaaacaccccccgagcgaacacgcacacgaattcaacac

SEQ ID NO: 723041 - DNA, 816 bp, Homo sapiens
tgaatccttcacagccaattggaccaatctatcaccctataaacaacttaatgtaagaataagtaacatgataacattctcctccgcataagcctgcgtctgattatgacactgaactgacaattaacaggccaatatctacaatcaaacaaacaagtcattattaccctcattgtcaacccaacagaggcatgctcataaggaagcggtttaaaagaagtagaaaggaactcggcaaatcttaccccgcctgtttaccaagaaagatcacctctagcatcaccagtatcagaggcaccgtctgcccgagtgacacatgtataagcaggccgcggtaccctacaccgtgcacccggtacgcgataatcacgttgtaccttaattagggacctgtatgaataggctccacgaagggttcacgctgatctcttactcttgtaacccagatgaaattgacctggcccgtgaaagaggccgggcataacacagcaagacgagaagaccctatggaagcattccattgtattacattgcaaacagtacctaacaaagccactaggtcctaacactacctaacatcctgctattcaaaaatttgcgtgttaggggtcgacctcggagcagaactccagaactcgcgaagcagtaactatgctaaagaacttctagccagtcaatagcgacactactaatcactcaattgtatcccatataatcttgaccaatggaaacgaagttaaccctaaggggattaaccagtcggccaattcctaattctacagaagtccattatccaacgatccggggttttaacga

SEQ ID NO: 723042 - DNA, 132 bp, Homo sapiens
cgggccagtacgtgattgcagtgtgcagtctcgcgctcattgcagcctgtgcctcctgggttcaagtgactctcgtgtctcagcctctcaagtatcttgggattacattgcacactactcacgagtgcccag

SEQ ID NO: 723043 - DNA, 1118 bp, Homo sapiens
  misc_feature (879)..(879): n is a, c, g, or t
  misc_feature (888)..(888): n is a, c, g, or t
  misc_feature (892)..(892): n is a, c, g, or t
  misc_feature (898)..(898): n is a, c, g, or t
  misc_feature (902)..(902): n is a, c, g, or t
  misc_feature (904)..(904): n is a, c, g, or t
  misc_feature (906)..(907): n is a, c, g, or t
  misc_feature (911)..(911): n is a, c, g, or t
  misc_feature (919)..(919): n is a, c, g, or t
  misc_feature (921)..(921): n is a, c, g, or t
  misc_feature (923)..(923): n is a, c, g, or t
  misc_feature (925)..(925): n is a, c, g, or t
  misc_feature (944)..(944): n is a, c, g, or t
  misc_feature (951)..(951): n is a, c, g, or t
  misc_feature (953)..(953): n is a, c, g, or t
  misc_feature (963)..(963): n is a, c, g, or t
  misc_feature (979)..(980): n is a, c, g, or t
  misc_feature (982)..(982): n is a, c, g, or t
  misc_feature (986)..(986): n is a, c, g, or t
  misc_feature (988)..(988): n is a, c, g, or t
  misc_feature (990)..(990): n is a, c, g, or t
  misc_feature (992)..(993): n is a, c, g, or t
  misc_feature (998)..(998): n is a, c, g, or t
  misc_feature (1001)..(1001): n is a, c, g, or t
  misc_feature (1009)..(1009): n is a, c, g, or t
  misc_feature (1012)..(1012): n is a, c, g, or t
  misc_feature (1017)..(1018): n is a, c, g, or t
  misc_feature (1021)..(1021): n is a, c, g, or t
  misc_feature (1024)..(1024): n is a, c, g, or t
  misc_feature (1030)..(1030): n is a, c, g, or t
  misc_feature (1035)..(1035): n is a, c, g, or t
gctgtttcccgttgttcccgtactgtttgctctctaacgtcctggccatggttgactcttggcctattttcgtaccgatcctctacctacatatggtgtatctcacctttcttgtacactacgttaatgctcgtggtatactgccgttatagctcttggtgctcccctcgaacggggatgatcgtactatgatgcggccctctgtatgccccctttcgggtctgcctggaaaggcccccctatgccggtgctagggcttcaagttagtgggccgggctgctgtgcggaaggaatgcctctggtcccccctagcattggccatcctggagactcccacgaatcgtcgcctaaggtcccatggaccccgtggcggctgtcctgggtacgacctcgtcgtcttgtgcgctgcgtccaatgcaacgacgttgttccgcccaaggacagtcgacggggcacatggttaacctgaactatagtaccaggggcttgcgtgtgccatcgtcacccaacggtgggcctcccagtgatgtcaagtactcgtatagtaaacctacagctcatgctcgtcgacactgcacgtcccgatacgctgactgtggtttcggatcctggccttcctcgtgtaaccagttcgggaagcaggagccagggagtaacgaagagatcaaagagttcgaccgcgggctacaacgtcaaattcgatatgttcagcaagtatctgcgtgaacggggacgacgcccacccgctgtggaagtggatgaagatccaacccaagggcaagggcatcctgggaaatgccatcaagtggaacttcaccaagttcctcatcgacaagaacggctgcgtggtgaagcgctacggacccatggaggagcccnggtgatagngaangacctncccnantnntttntagctcananantntgtggccccgcccgagccnctgccangnccttggagcnttccaccggcattatnncngccntncntnnaaacntgntggtgggncanacccnnaantcnagcgtncaccncgccggaggaagttcccatggcctgctgggctttgctcggcccccccacccctggctaccttgtgggaataaacagacaaatt

SEQ ID NO: 723044 - DNA, 267 bp, Homo sapiens
agaagttcaataccagctgttgctgcaaaaatttctctgctcggagcaaaaatgctctttttgaaactttcaactgggctctgtccatgggaggtacagttcctgtatctgagggattggaacactcagacttgctgatggcaaaggagaattcctagatgcctggcttatgctggtggagaaagatggtgaatcccaccacggtgcttgaatctccacattcctttcttaccctgctattggaacttctaaaaactaggggggaca

SEQ ID NO: 723045 - DNA, 1106 bp, Homo sapiens
gcagctgctcaccaccattgcccgcaccatcaacgaggtggagaaccagatccgtcacccgtcgacgccaagggcatcagcacaggagcagatgcaggagttccgggcgtccttcaatccacttcgacaaggatcatggcgtgggacgctgggagcccgaggagttcaaggacctgccgtcagtcagtcactgggcttacgtacgtggtagaacgaccgtgcagggtgaggccgagcttcaaccgcatcatgagcctggtcgatcccaaccatagcggccttgtgaccttccaagccatcgcatcgacttcatgtcgcgggagaccaccgacgacggacacggctgaccaggtcatcgcttccttcaaggtcctagcagggcgcaccaagaacttcatccacagcttcgaggagctgctgtgggagagctggcccccagaccaggccgagtactgcatcgaccgcatggcgccataccagggccctgacgccgtgcccggtgccctcgactacaagtccttctccaaggactatgatatggcgagagcgacatgtgaggcccccagagaacctgacgccaaaagaccccgacaggcctccagggaggggacatgggaagaacccacagagcaccaattcactccacatctgtatctatgcaaaagcaaatactctgagaagacctccgagggatgtaacaggagatgggacagggaacggaggatggggcaacggatcacttactcgtctacgcatcagagaagataagaacaaagaaggaacgccccggcacaggtagaaggaaaaacttaaggcaccaagcattagagatctgaaaaaatatgcactacaacgatagtcgatgtaaatgaccaaggaagggggccaagagaaatcacgccagagaaccaccggggtaccgtcccaagtaccccggggaagcgcccaaacacacaaggaaacatacatgctctgatagccctaaggaccaagtgctggacaagccaacatcaagtcaaggtagcgagaaaaaaaggacaaccagcggaccaaacagaagaaggaaacaagccgcacagcgacaaagccacggagacgacaaacaa

SEQ ID NO: 723046 - DNA, 621 bp, Homo sapiens
gtccccactatcctcgcacgaatttggctgaagtctgttcttgtgccacgagggccacgagaattggtcttattgggggccccccgcgttgtgaatagggggaaaaggactataatggggtcaccgagcacccacaccccgcttctataccgcctccacgtcaagcccacgcggcccactcactgcacgctcacgctgggaagcactcacttctcctcgcttttgtaacactaagggtggtggtgcccctcggcacacgtggccacccactgcacagttctacggcctatggctaaggagggccaaatcggccccggctctcgcctcgtgttttttctcccacacactaactttttctgaatatgaagggcacgcaacctgcctctgaatgggagaatcatgccactactcagaaagtgtcctcctcatctaaagctcatctgtttaatggtgatgccttgcgtaccggatctggttacctgtgcagttgtgaataccccgaggttgggcagatccatgtctctagtcctaccccgttttaaaagttcctggtaagatttgacctccttcttcccgccaattaaagtaattggtgactttggtaacaacaaagaaaaaata

SEQ ID NO: 723047 - DNA, 954 bp, Homo sapiens
gcgctgtcggatacttggggtgagcggaaagcatggtggggacctccgatgccaggtagcaagaggcggagtgagcccccggagcctcgtgcccggcctgccggccagtggcactcgggtactcccccgagcaagctggtgcccggggcttctccgcagccgatgcccgggagcctgacgaccgggttccgtccgcgcattgggtgacttcactgccgacgacctggaggagcttgacaccctcgctgtcacaggccctgagccaatgtcggccgcgggtcgggacgtgtccaggtgatcatagggtccaccaagattatcagatggcatgtcaaaaaaatccttcagggaaaacacagagaaactgtcccatattaaggcgatcacttctcggaatttaggaccggtacctttcagggcacaaagtaccaaagaggaaaccttaaagcggaacccgatgacctgtactcgcgacgaccgagagttcctcattgcacggacttggcgaacatttagcaattttggcggagacctacactacattcaggaccggaatccgttctacgagggacaccaggacgaacgattcacactttgcttcttgacgcaatggagaaaaccccaaggcaccttcaggtgacaacggaacccgtgaattctccagaaaagctccacttccttgggagtctggactccaggtttacacgatgcccgagattcgacttggcattaggacaaatgctcccagaccagttgaacgacccaattaaacttggttggctccctccttgtgtccatgggcagtcctaggaaacagccttctgggttataaaagcaggaagcctttccgccaacttggcgacaccttttttcctccaacgggccttagagcggaagttccttccacctgcgcaagggggggtacccctgtggggaggagaacccccttgaggg

SEQ ID NO: 723048 - DNA, 180 bp, Homo sapiens
tcatgacattgtaaatatcagctgatttttctgaatatcaacgtgtgaaaccaccgcacagtattttgactctattcgatcatcaagtgggttctttgaagaatccatgagcatgtacctagaaatcgtgactgcttgaatactgtatttacttgcactctagtcagacaccttcaaggg

SEQ ID NO: 723049 - DNA, 913 bp, Homo sapiens
  misc_feature (336)..(336): n is a, c, g, or t
tgaaatggagtcttgctctgtcacccaggctggagtgcgtggtgcgactcagctcactgacctctgcctccggggtcaagcgatctcctgcctcaccccctgtgtctggatatcggcgttgcacacccccaccaccccgggctaatttcggtatttttagtacgagagggggtctcacggcttgtgggtcaggctggtcctgaagcttcctgaccctcgtgatccgccctccatcggcctcccaaagttggtgcgatacacaggtgtgagccaccgccacctgtgcaggaacacgattttaaagctgctctgaagacctaatacgtgctccacacncatttaacaaagaccacgtcgctcgatacatcacgatacctcgcacgcgaggaaactaccactgcgtcaacaccccagctcacacccaactactcacgggcgccccacatactccgcagtagtcacactccttccgctacaacgacctcgccccgcgcacgcgcccgcgccccttggctccacggcccaccacccccactgccactcgccaccccaccccctcggtgaacgcagccacgcgccacggcacccggaacacccatgtgagcccccccccgcgaagccttcagacgccaaccgacccaccgaacgcacaccatccgctgcagacacccgcgcgccattcataaccaacacacactcacacccaacgcccctcgcatgacctccgcccacaccgcccagtctggcccccaacccaaccatcgtcacgtgacacacacccggcagaaatcccctacgcaccaccgccaacggtcaaggcaccagccgagcgcgcgagaaaccgcaccccccggccacccgcgcgccccgaacaagccaccttgcccccaacacacagaacccaccccagccc

SEQ ID NO: 723050 - DNA, 411 bp, Homo sapiens
catcttagaggactccccgcccgttgacccgtgccacggacctgcagagtgcccggcatgccatctgatcaacctacatatgctacataagggccagatagcgaccatggtgatcattgaatgactggtgatcttatggcaaggttcgatggatcgagtggtggcaaatatcttcgagctgaacctgcaggaccagcgattcgttaactggggtaaccatctccttcctgctggaatcagtgaccagacagaacctccactcaatacaccagaacacagagagtatctcgcagaacttatgtgtgaatcatttaacgtaccatgactctaccttgcagttcaggcagcgctggccttggcggcctctcggacatctcgaccagtgggtaaacgtacgtcaacggggatagt

SEQ ID NO: 723051 - DNA, 352 bp, Homo sapiens
gtttccccccccccccccccccgggttttaggggaaaaaaaacccattgggggcccctgggccccttaatggatcccccctgggggttggggttaggccccggggaggaaagggggccccccttttccccccccctagtcccccaaaacttttggggggggggttccccccggggggttttttttttttaaaaccaaccccttttaaaaaaagggccccgttgggggttttccaattttttggggaaatgcttttttttggtttttcccaaggcccccccccgggaaaatttttttcccaaagttttggggggggggtttttttttttttaaccaaaaatttttggggggga

SEQ ID NO: 723052 - DNA, 794 bp, Homo sapiens
  misc_feature (359)..(359): n is a, c, g, or t
  misc_feature (392)..(392): n is a, c, g, or t
  misc_feature (410)..(410): n is a, c, g, or t
  misc_feature (427)..(427): n is a, c, g, or t
  misc_feature (472)..(472): n is a, c, g, or t
  misc_feature (487)..(487): n is a, c, g, or t
  misc_feature (490)..(490): n is a, c, g, or t
  misc_feature (498)..(498): n is a, c, g, or t
  misc_feature (511)..(512): n is a, c, g, or t
  misc_feature (516)..(517): n is a, c, g, or t
  misc_feature (520)..(523): n is a, c, g, or t
  misc_feature (527)..(527): n is a, c, g, or t
  misc_feature (530)..(530): n is a, c, g, or t
  misc_feature (537)..(538): n is a, c, g, or t
  misc_feature (542)..(543): n is a, c, g, or t
  misc_feature (549)..(550): n is a, c, g, or t
  misc_feature (555)..(555): n is a, c, g, or t
  misc_feature (560)..(560): n is a, c, g, or t
  misc_feature (562)..(563): n is a, c, g, or t
  misc_feature (569)..(569): n is a, c, g, or t
  misc_feature (585)..(585): n is a, c, g, or t
  misc_feature (592)..(592): n is a, c, g, or t
  misc_feature (597)..(597): n is a, c, g, or t
  misc_feature (600)..(600): n is a, c, g, or t
gtctcaaactcctgacctcaggtgatccaaccgcctcagcctcccaaggtgctggcattacaggcatgagccaccacgcctggcccatctcttattttagagaacctttctctgttcatcatttaggttgacataatcaatcctcacaacagccctatgagttgcggggactgttatcaccctactttatagggtggaaactgaggcataaagaggctagctccaaaccaaactgctgataaataggagagccagtgtctgagcttgagcccagcctgaatcactgtgcagcgtcatctttcgtcagataaaagaatgtaagaggctgggtgcggtggctcacgcctgtaatcccagcncttcgggaggccgaggtgggcggatcacttgangtcaggagtttgagaccngcctggtcaacatggcnaaaccctgtctctactaaaaatacaaaaattagccaggcgaggtngcacatgtctgttgnccnagctactngggaggctgaggnnggannatnnnntganccngggaggnngagnntgcagnnagccnagatngnnccactncactccagcctgggcnacagagngagantcngtctcaaaacacaaacacaaacacaggtactccctggggggccacgggatggagcagaagcgaatgactcaggtgtggggccaggtaccaggctgtcactgactggtcagaggcacgggaggcccctgtgcaacaggtgccatcgggccatgaggcctgaacaacgaaccgcgccagccaacgggcagatgacc

SEQ ID NO: 723053 - DNA, 529 bp, Homo sapiens
cggctcgccttctgcgtggagttctcgcggtctgggtttcgctgtctgctcttgtgcccggggtcattttgtcggcgtcgtggtgccctctcttgcccagctggtggcacagcgaggcgtgccccttctcccgacgacgttcgatggagtagggtcccagaccgttgtccctgaatgagcgagatcgagcttggcccgctcccgccccctccttccctccctccttccttccgccgctaacatggctaacaacaagcccgcgctgacaggcaactcgcagccgcagcaccatggacggatggcatgcatgctggctcatgcaatcagcatgcatgttgctgtgtcgtgctggatgtgctgctagccaaagccgggctggtctcctgtgcgaagcatgtggcagatgttgctccctgctcatggggcaactgagaagacacatgaacgcatcaagctcccatgatcctagaccaacaatcctgtcagtcgccttacttcaaatgtacagctctactagctcaagacctac

SEQ ID NO: 723054 - DNA, 542 bp, Homo sapiens
tgcaaggtgataactaagccggcaagctgcctttcaacactcatgcagtcacgttgtccacctgagattctcaacagggtataaaaggaaggtctcatcttgcctcacaggaagagtgggctcagtgtggctttttttccaactatggagaaactcagtgctcatctactttaagtttccacatatggcttgctcatagccttggtccttacctttcctgccataactttctagaagagcttaatgggatttttttttctaaaaaatgtaaatatgcagttaggcattattttatgtaaatgcattgggtttttactgtagcatttggcaataaatggctttgggggtgatgaggtggggaaggattcagcaggtggttcagtagtcaagaagcaccggccgccaatgagaagtttcagtctttggctttagccatgcctctgaaggtcattggatgcaacgcagatgaggtaggaaaaacacaagcagtggagccaagtggcatatgtgtacggaatcaatcaaaatgtcacttgatgttc

SEQ ID NO: 723055 - DNA, 127 bp, Homo sapiens
tctcctcgcgtagggtgctcagtcgttgtctggtgtagtacttcaatggccagtcttccggtaggctttcttgaggcgactcctccttgtgttcaggtcattgttgctgttccctgtgccgcacccg

SEQ ID NO: 723056 - DNA, 271 bp, Homo sapiens
ccgccaaaagcccccggaggagttaaatgtggatgttgcttttgcccccacggggggatttgagtccagctcccccccagatgaggtgcagcccccccgagagagctttgcccgtcccccagtaacccggccccagcctccagggccccaaatccgcccagcctctccccgctttgggtcctgccctctaaccctcggctttgctggtcatgggaagaacagaattggtcccgcctgccactaattccataaaactgtcttgtgggctgga

SEQ ID NO: 723057 - DNA, 341 bp, Homo sapiens
gcatgtcttaccatacacactgtggctagataaatcaaagtgaactttgatgatgttcttacttgcatttactagaaatctgagaaagactgtaatcagtctgtaaataattatcttgcgtaacgagaatagtagagcacaatatatatatatcacaaacccaatcacactctatgtaacattacagcatggaattgacttaatcagcaataacagcacactggctgaagaatgctgtatcattagtttctcactattacgctgatttctatgactggcatgaattattagccttttccattagtaggcatgtgctctgctgctctgatggcaccacggac

SEQ ID NO: 723058 - DNA, 390 bp, Homo sapiens
  misc_feature (26)..(26): n is a, c, g, or t
  misc_feature (349)..(349): n is a, c, g, or t
tgtcacctaggctggaatgcagtggngtgatctctgctcactgcacctccccgactcaggtgatcttcccacctgagcctcccaagtagctgggactacgggcatgctccattatgctggacgaatttttgtattttttgtagagatggagttttgccatgttgcccaggctagtcttgaactcctgggctcaagcgattcacccatctcggcctctcaaagtgctaggattacaggcatgagccaccacgctcttacttttaagctaaaaaagaaaatcttaaatcagtaaatcttactctgaagtcatagtcccttctacatccctgtcttatgtctcccacgtctncctagaccgtccactcctccacagggtacccgaaggcttcg

SEQ ID NO: 723059 - DNA, 122 bp, Homo sapiens
ggatatttaattttttttgatgtattaaatgttaactatgtggtcagataatcccattttactttagtaaccagaaaattgtaattcttagtgtctaaaattcacacattaaactcataggt

SEQ ID NO: 723060 - DNA, 873 bp, Homo sapiens
gctctctttggcctgaggttctgtattctgggaaaggtatacagggtgtgacgtagtggatggaagctgccccaggaggctggatgtagtggtgtgacaagacgagtgcagacaggtcgtcgtcgtctgcccagcagcaatgggctgcaaagatagtagaactcgtggttgcttatggatcatgtgtgtgatttgtgcaagccaggttcaagcccttggcctcaggaaatcagatagggaccaatataagtgtccttccaccttgtgagccaagcccccatttgaccgacactctatcagtattcttgtgtgctggcgtcttcaaatagaattttcaacatgattcttagatgtcacacaacttgtctgctaactagcaacggaagaacaccttcttctagctgctgcaatttgcctaccctccctcaggtgcacattggcgtagctccagagaccctggtcttatgagacctatgtgtgggacacctggtacacgatgcgcctttctgcgcgatcagcagcagcagctgtatacctactaactatgctacagcctaaagtcctccggattctgcattatccttccaaacacttccttatcactctgctgcaatgttgaaaaagcgcaggccacgccttgaaacaacgttgcatgccaaaccgcgcgtgcgcatttactcggcccaaggccatgataggcatgacacgcatggcccaacagtgtcgttgagacgagacacgtcgtttccgggttatggtggcaagcactggttgtcgaacacaatgaatcctaccgaaacagtgcgcctaccatgatgacacgtggtgtccagcagacacagacatgggattcagctcgtaagcaagtccacg

SEQ ID NO: 723061 - DNA, 161 bp, Homo sapiens
aaatgaaggaaggagctctgtctgtactacagcagttcaaggaaagtgacttatcacatgtcagaacaaaagtgcatttgatgtggagtaatcaggatcgacataagctaccaatcctgtctgaaatattccatcaagtctttctgcaaccaagggggagg

SEQ ID NO: 723062 - DNA, 975 bp, Homo sapiens
attgtatgactctttctgttgtgttgtgttacgtgtgcggttgaagtggttttttccgtgtccgccatactcgtggtgcgcgcttccgtcactcgtgggaccagccccctcgagtgttctgcgcccggttgtcagcccctttgtagccgtgtgtcgcctctagcagctgtggcaatggttctctctggagcctccctgcgcatttctctgtggccccttaaagatggggtttctccctctggggttccggcacttccccgggttgtgtgcccctctctccgccggcggctctggtagtttcgcaactttgtgcccccctcttctggcggagtggcaaatggttgaactcttcctatttggggcggtcttttcgtccccccgtgtcatatttggggggcctttctcccccacgtccatagggtgcgtccgccgcctaagcatgccccatcaccagctctgtcgtgatgaaccacaggcccccacggtgtgcccggttgtccccctcgcaacgctcttttccagagacgtcgttcttctcctccgtgccgccagtttgatgctcgccctgaattcacctgggaaaatgcatagtcgagatacaaacattcgatgtgaagaactcatctgatcatccatcatttagcaagcggcgggcttccgctcccacccctccctactatataagacgttctttgcgcacccctcataaagagacatcaaagagtgtggttaaaactatttctatctgcccaaagcatccacacactgagtatggtccccaattagtggcttgccccctcaaacattttttacaataactcgccgccctttaagattacatttcccttaggccgccttcacccacatatttaatcgagtttttctccacaccccccgccccctatcatacgttgggcgtcccatcctttccccccccaaaataataattccttttccccccgaccacaaaacaca

SEQ ID NO: 723063 - DNA, 309 bp, Homo sapiens
gtccaagagacatcacacagaaacattccaagcctgtgataaactctctcaccctaaaaccaatataaactcttagtccataggagcaagcactcctaaccaaaaaaaaaaaaaaatttgtccaaaaccccttttaaggtttattctcaaaaataaactcgtcttttagtgtggagccatttttcatgtatcttttctctttctttacttcttacttttggtgctgaacccttgggatggttgttggggatacaggctgtcttgcatcccaggtagcagtgcacagcagctgctcatcccgctggactc

SEQ ID NO: 723064 - DNA, 708 bp, Homo sapiens
tggaaatgatatcatttacgggggaaggcgcttggtgaagtaggccttatttctcttgtcctttcgtacagggaggaatttgaagtaaataaaaaccgaccgggattacctccggtctgaacctcagactcacgtaggactttaactcgttgaacaaacgaacctttaatagcggctgcaccatcgggatgctccgtgactccaacattcgaggctcgtaaaccctatgtgttgatatggacctctagaaataggatgtgcgcgtgttactccctagggttaacttgtggtcccgtgggctcaagtttattgggaattcaagtggagtattagatagtctcggcttgtgacgtgggttgaagtcttagcatgtgttacgtgctcggaaggtggggtctcgtgcttccgaggttcgccccaaccgaacatttttaattgcaggttgggtagttctaggcaccgtggtgggttggtaaggtacggttggctttaataaatttaaagccccatagggtcttctcgtctggcgtgtgtcatgcccgcctcttcacgggcaggtcaatttcacgggttaaaagtaagagacagttgaaccctcgtggagccattcatacggtccctattaggacccagtgattatgctaccttggcacggttagggtactgcggccgtaaacatgtgtcctgggcaggggggccccaaacggc

SEQ ID NO: 723065 - DNA, 1206 bp, Homo sapiens
  misc_feature (1206)..(1206): n is a, c, g, or t
tcctactgcgttctggtactgctgcgttgtctggctgcctgcttgtggtgtgacatgttatgcacgcagcgcctggttgtattggcgcagggttggatgctgtggtctgaacgagggtgcgtctgtgtgcgcgtggactgctgacatgtcttgcctgtcttcgtgtccttctgggaacgtagtgctcttgtgagagcctgctctgtcggaggacaccagacgttttctcgacctctcgggagcgcatactggcgcgcaaggactcgccatgtgccgcgcgaggcgtgcgatgggcgtcgtgttggcgccacaaccccgagcgcgaagtagctctcgcgatggtgacctggccaccagttgtgtcttatattggcggtggcgcgctctgcgacccgttgggcgtcttgcgggacgagtggccacctttgtgagcgtggctaggcggaatgggcggggactgagttgcacgcgtacgcgcacgctaggcaggtgcacttacgtactgctcaaatggctatcccgcctgtggatagcacgcgcgcccacattgtggggcggcgatcctcgggtgcccccctctttgttcccctacccacgcgttgggcgtcgccgcgtgggccttcgcgggggacggctccgtcgggtgggacttttgggcgtacccctcgagggtggtcgcaacagcttttgtaatccaagaagagggaagagaggctattggtctaaaccacaaatactatctggacagaggggcccacagactaatttggtggtgcgcctgttggcctcctcacaaggccatggttgttcatgagacatgctgtcgtggcgaccgagtatatgatgcgaacgggcactttagtaaacacccgtcaaactaggaagacttggggcgaatattgctgatgatttcccatcccgtcgttggcgaccaagaccatatggccacaatgttggagaggcctcccaaacctcatcataatgtaaccctcttctggctctacgttctggagatcgcgtccccaaaagactggtattctgttataggaccatcccgtcgtcctttttgtattgcaacacaccaccccagagaggttgacagaaaaattaccatgttcgccacacatgttgctaaagagtggtgtgatcgacacgttgcgccgcaatatctaaaactacacaagaatgagggagagagcatcaccn

SEQ ID NO: 723066 - DNA, 141 bp, Homo sapiens
  misc_feature (131)..(131): n is a, c, g, or t
aattccgatgaggggggcggcaagtggtcataacacccaggcttctgctgtggaagccactgactcctgtcaccctttggaggtgaactgaatttccctttcagacaggcgcggtatggagctaagatgtnaaacctctct

SEQ ID NO: 723067 - DNA, 726 bp, Homo sapiens
  misc_feature (50)..(50): n is a, c, g, or t
  misc_feature (92)..(92): n is a, c, g, or t
  misc_feature (94)..(94): n is a, c, g, or t
  misc_feature (105)..(105): n is a, c, g, or t
  misc_feature (108)..(108): n is a, c, g, or t
  misc_feature (111)..(111): n is a, c, g, or t
  misc_feature (115)..(115): n is a, c, g, or t
  misc_feature (131)..(131): n is a, c, g, or t
  misc_feature (133)..(133): n is a, c, g, or t
  misc_feature (144)..(144): n is a, c, g, or t
  misc_feature (160)..(160): n is a, c, g, or t
  misc_feature (167)..(167): n is a, c, g, or t
  misc_feature (190)..(190): n is a, c, g, or t
  misc_feature (192)..(193): n is a, c, g, or t
  misc_feature (222)..(222): n is a, c, g, or t
  misc_feature (231)..(231): n is a, c, g, or t
  misc_feature (243)..(243): n is a, c, g, or t
  misc_feature (246)..(246): n is a, c, g, or t
  misc_feature (252)..(252): n is a, c, g, or t
  misc_feature (275)..(275): n is a, c, g, or t
  misc_feature (303)..(305): n is a, c, g, or t
  misc_feature (312)..(312): n is a, c, g, or t
  misc_feature (316)..(317): n is a, c, g, or t
  misc_feature (319)..(319): n is a, c, g, or t
  misc_feature (322)..(322): n is a, c, g, or t
  misc_feature (329)..(329): n is a, c, g, or t
  misc_feature (334)..(334): n is a, c, g, or t
  misc_feature (345)..(345): n is a, c, g, or t
  misc_feature (358)..(358): n is a, c, g, or t
  misc_feature (361)..(361): n is a, c, g, or t
  misc_feature (376)..(377): n is a, c, g, or t
  misc_feature (383)..(383): n is a, c, g, or t
  misc_feature (423)..(423): n is a, c, g, or t
  misc_feature (432)..(432): n is a, c, g, or t
  misc_feature (434)..(434): n is a, c, g, or t
  misc_feature (439)..(439): n is a, c, g, or t
  misc_feature (466)..(466): n is a, c, g, or t
  misc_feature (477)..(477): n is a, c, g, or t
  misc_feature (501)..(501): n is a, c, g, or t
  misc_feature (522)..(522): n is a, c, g, or t
  misc_feature (611)..(611): n is a, c, g, or t
  misc_feature (725)..(725): n is a, c, g, or t
cttgtgctgtggagttccgcacactgacctgggagacacgggtagtgganggagaggggggggggggtctggcggggctccggcagtggctntnctctccatggngcngtncgtntttacagcggggcgcntnggggagcgtcntttcagcggagttgcncataggncctgggagcgggaaggcgccagntnngggtcccagcagggcctccctcaggccanaacgctggntgtgccttcagnggngtgagngcatttccgagccagtgtcaggngcggggcatgctgggaccaggggggccnnncgcttgntccnntnggntcactcnggggngcgcgacaaangatttagtctttnaanagcaagacacttagnnattgtncatttgctcccaggtgaggagaagcttcgtttaagatgangtgcgtgtntnttttnttggtaaaaagcaaaggggaaaacccnaccattggcangagggcactggagaggcttatgtncaacgacgtgtcgcgcgaggntggcgcgggattggcactcactccaaaatttctttggagcagagagacagatcgtccagataacaacttttacactcagcaagccaganacaaaaagaccacctgaaaaaaaatatgttttgaaaatctgcatttaaaaaagaatactcaactgcatttgaaattttctggatttttttctgcgaaacaccacgagatttggnc

SEQ ID NO: 723068 - DNA, 259 bp, Homo sapiens
ggctataacggtgtcgagaggtagtatgtgccgtgagtgatagcgtgctgggcgggtagcctcatctgggtgatgatagccagggtggggataagtgtggtttcgaagaaagatataaaatatgattagttctggtggcgtgacatgttataagttaagtgagattttgtagcggagattgagtatagacgaggtagacgttatttctcgtgatagctggttcactgtgataatgtggcgttggacttgccagtgatgt

SEQ ID NO: 723069 - DNA, 106 bp, Homo sapiens
atactggagggctatagtcaatcaaatagctatactgatagaaaaatagacacacagattaatggaacagaatagaaaacccagagtcaaagctgcatacttacaa

SEQ ID NO: 723070 - DNA, 281 bp, Homo sapiens
cccctgtcctaccatatacacccaaaccccagaggaatccccaggtacattaaagtctgtccctgttaatgcttcctcagatgttcttgggggtaattcttattttttcttctcagtttgttggtgagaattgggggtgattatctgaaaaatattccggtataaatcaacttttctaacaccagtttgtactatctacagagcctgaactacccccaaaagatttggacagtctagtgggacctgaaactaaataaataaataaataaccctgaaagaga

SEQ ID NO: 723071 - DNA, 365 bp, Homo sapiens
atacattgacgatagaattacggaacaactttaatgaaggaatgtacccatatacatattgaactttattcatattgtattatcaaggtatagactttttaggttatgatacagttaagccaaaaacagctaatctttgcatctaaagcaaactaatgtatatttcacatttaattgagccgacttatttccacaaatagataaacaggacaaaatagttgtacaggttatatgtggcatagcataaccacagtaagaacagaacagatattcagcagaaaactttttatactctaattcttataataattaattttgagaaacaaagataaaatcttgatacccaggttgaagtgcaaggaaaa

SEQ ID NO: 723072 - DNA, 789 bp, Homo sapiens
  misc_feature (693)..(693): n is a, c, g, or t
  misc_feature (777)..(778): n is a, c, g, or t
tcaaaaagataatccaccatgatcaagtgggttttacaccaggggatgcagggatggtttaacatccacaagttaataaatgtgatacaccacacaaacagaattaaaaacaaaaatcacatgatcatctcaatagattcagaaaaagcatttgacaaaatctaacatcctttatgattaaaaccctcagcaaaattagcacagaaggaacatatcttaaggtaataaaagctaactacgacaaacccacagccaacattatgctgaatggggaaaagttgaaagcattttccctgagaattggaacaagacaagacactttcaccacttttattcagcatagtactggaagtcctggccagagcactcaaagagaaagaaataaagggcatccaaattggtaaagaggaagtcaaactgttgctgtttgctgatgatatgatcatatacctagaaaaccctaaggattcatcttgaaagctcctagaactggtaaacaaattcagcaaagtttcaggatacaaaattaatgtacgcaaatcagtagctctgctatacaccaacatcaaccaatagctgcagaaataaaataaaatacttaggaatatacctaacgaaggacatgaaagacctctacaaggaaaactacaaatcactactgaaagaaatcacagatgacacaaacaaatgggnaacacatcccatgttcatgaatagggtcaatcaatattgtgaaaatgaccatactttggtagatttgcaaaaagcaatctacanngtcaatgcaat

SEQ ID NO: 723073 - DNA, 123 bp, Homo sapiens
gtgatgtctcacagaaaaaaaaactcccccgccatgggtccctcggcttcctgccttggggggcgcacgtttcggccttgtgggaaagaaaaggaaaaaaccttagggttgcccctccccgga

SEQ ID NO: 723074 - DNA, 153 bp, Homo sapiens
aaccttcaggtcatccctgtagactgcagtgcaaactcccctcttatcatgtgagcacttcctggtaaacgctcgataatcgagtcacaggctttctccagctcggtccccattatgcccacagactcgccccacctgcctgcgaacctatga

SEQ ID NO: 723075 - DNA, 1238 bp, Homo sapiens
  misc_feature (1)..(1): n is a, c, g, or t
ngtttagtagtaactagagtgcgatgtcagatatgtatacgtctgatgttttttgtctatatactgttgtagttatacatctaatgtttttcttgcctcctacttcattttgatgtgtctctcatttgtctctgctatgtttatctgtctttctatcactcatctgttacacgttttttgtttctaccaccacctctttgttttgttaattatgtcgtgttgcttctatccaccaatcttatttctcactttttactattgtagtatttcgctcaactgacaagcaaacgccaacttttgtcttgtgcgttgaatatctttcttctcgtggtgcccccgttgttgtgttcctccccgaggggtgcccccgttgaccacccatgttttccctatcttctatttttgttgtccgtccttttttcgtgtggccgaccgcgcctggtgtgcccccccccgtggtatatattaattttattctctcccttctgcttttctcccaagtggtagtaattgctcgtccatggtcaccaaattttgggttacaacttggacccaatggaaacttggtaatttaaggaaattttggggagaagccccccgagtacacaccttgctctgtttaaagctaatcaattgccttttttctttattgttattatgtgtcacacagccgatgggaagcaatttatttataagttctggggataggaaacttttttgcccgtaccttttacacattcccgagtttgtgcttgacttcactcttgactaagacacgatgaggaatatttcctagagatttgtttttagtcttatttggatcctgtcaccacctgcagccttgttattgtcctcacgctcgttctcgtgatcctcgggaacaaacgtggtgactgagagcttccccacacccccatctctgaagaactgggaactcccactaaagacacgccaccctgagtccctacgcctcaagcccccacggattgcccttccacctcgccacaacccccccgtggctccgcacccctagagaaaaggtgttgttgagtccctaaatatggtgatagaggcttttgcactactgccgcttaggctgtaattagaaaatttgttgagatgtcacaataatccaggcttcacatcacaaatgttgagaaactaattttttgcacattgtatcattatttgtatatttcataacttagaagactgagttaaatacccactattaaaga

SEQ ID NO: 723076 - DNA, 784 bp, Homo sapiens
tctggctaccgggactaaaatggaagcgttttgggggtcgcggcccggacttggggcggggggtccggccccaggaaagtttaaccggcatttcgggtcacactcccgattccttcagtgggatccgggcgttcgtgaattttacaggaggtccaattcacggcggacccagaaaccccatgtgtggtgaccgggacctaacagatccttcgggggttaagttctcgagggcggaggtggtgatgtgccgacagaaaaatgtgtcgtgggatctcccaaagcggggcctcccttgtggattatcgatttcgcggcaacacattcttctttcggcattatatgtggccgatgtctcacaacaccacaggttaccaagtggtgtggggggtgccccttcgtgggggcagaataatagcgcgcgtgaattttcttcccacgaataattgtgaaaggacaaaggtttctctcgtcggccgagaaagttggtgtgaactgtggagtgaagcggagacttctcgtgggggagctgtgtgcaccaccgagcgtttgttgtctccctaagaaagccttattccatcttcctagtgaggtcttagcacctgagggggccccgtgttacacaaggcgcggggcgccctgcggaagttattgaccccctctttggggggggcacacccctcttgtgggtccatttgcggaggggcttattgcctggaatcgggaggaggaggctttcccctcgggtatattgctggggcccatcgctttggggttgtgagcccat

SEQ ID NO: 723077 - DNA, 1601 bp, Homo sapiens
tatgtcaacgctgtgtttctctcttgtcgatgttgttgtcttcgcacgatcgttggtttgtgggctcccctgtatgtttgtttgttgttatgttggcttgctggagtcgcttctttttttttgttgttcatcgccccctcggatggtggtgttatttctcggtgccatctatgttgctccttccttattttgtccgcatagtggcggtgttcctatactcccggtttgtttatttgcggccctctattttggttgcgtcaccacttttgcgggggggggcatcgttatatcctccactcctctgtgttactacaatactttttctgtgatctagtgctattcaccgggtggttgtttccactccgtttggggaacacccttgggggacgcccctactttttttgggggtgtgttattttggttgctcgtttctcgctgatgatccttcttgtggtgtgtggggctccgaaactcacacattggggggggttgctgctcccctgttatacacctcttggggggggggttttctcttatcagtagttttcctcctggggaccgcgctgtttgtctctatctcatcgtggtgtctctggatattgttgtgtgcgcttaatacactagggggcccccacttatgtttcgggggccacactcgccacggcttcctggcatttttggcctgtacataaacggggaccccacgtcacggtgtttttttgcgagacactggtgtctctctttggtgggacccacttgttccacccacaaggggcccctgtgggtctctgtgacaccaccttggagacattccctcggatggtgtcctcttctcccgagtgtggtttctggggtgccacagcgcgctttggggcaatgggggtcaacaatcgcgaggggcccccgcgttccccacgttttaatttctaaacggtgggccactttggcccacactttccatttgtaaccccctctctatagagaagaaagcctgtgagagggttctctcgccacgctttgccacagagaagggccccagcgagagtctggaggtatcgcgggaacacatcaccctttttctctccccccgccacatgtgagagaatgcccactctctcccacagggccctctctcccacaccgtctggtccacaaacacacacacggagagagagatgtgggatatggaggaaaccctggcgccaccctaagggacacacacagagggggagggagagagaaagtgagaagagaagccccgcgggctaccgccgcgacacacaaagggagagaaagaggccacacagggggtctccccacacagagagagagaattgagcgccggggctgtgcctcacggtgggccacatgcctcatgccctgagccccgtggagaagcacttttgcgagatggagcacgagactcacacacacctgagaacactataggagagtgccccactttgttttgtgaaatttaaaatggctgcaatcccccccacacctttccctgacccctgtatatagccccgcccggcccccggcagggcccacaccttttccttttgtttaattaagccctggggtcacctgtggaaaaa

SEQ ID NO: 723078 - DNA, 543 bp, Homo sapiens
aagcagttaatacatgatagtttgtgacttgatgcgtgagcgtcgctgatcttcccagcctgttcaccaaccccaaatgctaacattcagaatggaagcttcgtgtacatgtcaatatctagtcacagccgatcgcagggcgggatccgcaggtagttgatcatggattagtcccttaccttgtcggggtactctctacaggctgatttaacgagacaaaaggaagctgtatgggcctgtgccgaactataccagtggtggaacagttgaacagattgtgtaccttgtcactgtggcataatagaaccgttgatgaacctcttaactgcaaaagatcccaagattattctggttatcctgggatgccatttcaaatatcttacaggctgctgagaaactaggtgaacttgagacacttagtataatgattgaagaatgtgggggcttagacaaaattgaagctctacaaacccatgaaaatgagtctgtattaactgcttggggaaccgagctcaaatcgcaatctggtctagctctaccatg

SEQ ID NO: 723079 - DNA, 200 bp, Homo sapiens
  misc_feature (5)..(5): n is a, c, g, or t
agtantgacacttgagtgtctggagctgaatgcctggttgtcatccggcagaggttcctcggcgggggcaggcctgactgtctttggtgtgctgcaggccaagcaagtgcaggaagcccttctagtccagggcgtcaccaggcaggagcgtggcctgcgggcttattcttgacccctggtcttgccgccacattgggtct

SEQ ID NO: 723080 - DNA, 655 bp, Homo sapiens
cgatgggccggataccgcagaatgatagtctagaaaacatgtaagagaagcagaaagacgtctacatgataagaggagacgagtcggcaacacgagcccaacaagaagacacacacgagacacgatccaccatgaggaatgacagcacctttttgaccacgaacatcaaaacaaaataagccaacaaaaacaacacaaaagagaatcaaactaagagaaactaacaaacaagcaccacagtaagcacacaaacatcatacaagaagagcaagcaaacacaaagaaaacacacaaaaacacaaaacacacagaagaacacaaagaaaggagaataacaagaagaaccgacacgaaaaaagaataaaacaacagagaagaaagaacaaaagagaagcacaccgaaagaagacaacaacacacacaaaacaagaacacaaaaagaagaaatcaacagaagaaacatcaacacaaagacaatagaaaacaaaacacaaggacaaagaagaaacaacccaaaggaaagacaacaaacaatacaaacaaaacagcaaaaataacatgacagaaacgaagaaagtacaagcagaagatagacaccgaaaacgatagcaaaacaaagaaaaacacaaatgagaacaaaaaacacaaaaagata

SEQ ID NO: 723081 - DNA, 203 bp, Homo sapiens
gcctctcttctagttattttgaaatatatcagtagatcgtagctaataactatagtcactctaatgtgctatatgagcataagaactttatagtgtctaactgttagtactcattaaccaccctctcttcatcctcccccacttccgcctacacacccttcctggtctctgatatctatcgttacactctctacccccatgag

SEQ ID NO: 723082 - DNA, 998 bp, Homo sapiens
  misc_feature (223)..(223): n is a, c, g, or t
ataccctctgaaacactcatctgtaatagtaggatatatgtgctatgatcatacgaagtactatataatttagggctcaccgtggaatagtgcctctctatgtatagcttatcacaaggatccccacgtattcgtgtcgccacattatggaacctactctccatagaatccctgctaagcatccaacaatagccttcattcagctccaaacttggtgatgccntgagtggtcacttcttacttgattaattcgagcgcccggacgtcacattgacccgagtggtgcttatacctcatgactcaatcgctgaagctgctcagctgcaataatgaacgtaaaagacttttacgatcacaattatcattatcatcatgaggtccaacctgacttagggcacattcggttcgggaggctattattaaagcttggactgaatcctgcattattctcttttgctcttggttggacatcaacatccattcagcgcacaccaaaccttggtttcatgttagcgagtccatccggtgcttgtatctttacatgtctcatataatatgcccatatagtttgttcctatggctggtctctactcgcccagcagaacctaagtgcccccgtgcactcctgagtattcagaggagcaaattactaatccgtctaaaatactgctgaatcaaagtcctctgtgcattcgggcacactatgcacgacaagttgggagcattattttccaggattatttgacccctgtctactcttttcactggtttttgtggcttattccactccgaagagtcctccagtagcatttaaacccccaaatgaagttcggttccatttctcccctcatccacctttgtttttccctcatctaggggttcaggccgggtggtcatggcacacccctgggtttaaccactgggtccccccagggctttccgttaaagcggcgagcgcggtgtgttccccttcatggttccagtcggcgcgacttggg

SEQ ID NO: 723083 - DNA, 212 bp, Homo sapiens
tactggttgcagcggtggtttgaaacggtgaatgctggacaattgtaatgggtatggagacatgtcatattagtaatgctagggtgagtggtacgaagttttttcataggaggtgtatgagttggtcgtaacggaatcggccgtatgctgttcgaattcataagaacagggaggttagaagcagggtcttggtgaagagggtcttggtgtgg

SEQ ID NO: 723084 - DNA, 132 bp, Homo sapiens
gtcgttgtactcgtcctttctccagggtacttaacccagggtactttcccagggtccttttccacagggtcacttttacacagggtggcacagtcccagcaacattgtcagttcatacttcaacactcaagt

SEQ ID NO: 723085 - DNA, 590 bp, Homo sapiens
gatctagtaggatcccagttcgaggagtatctctccgtgttcgaatctctgatgtcaataaggtcgtagagcgatggatggattgccttgccctatagttgctttgcgattcatacggttgcacttctgtgtggatctgataaatggcgaatgaggctcgagctccttatgaaggatttccgagatacattgcactcatagggcctttctcccgtgtgaatcctctgatggagaataagtaaggagctctgactgacgcctttcgcacactctgtgcattcaaaaggtctctctctggtgtgaactctctggtgcctaatcaggtctgaactgtgactatgaaagccttcgcgagactgcacacattgtgaagggcttttctcctgcaatgaatcgcgcttgatgctcaatgagacctgactagtgaatgaagtctttcgccgagacacagttaagacgtagagtctctctccaggtgtgaattctctgatgctccataaggtgtgagctctggtccgaagtcgtttgccacactgatcgcacgtgtaaggtagcgtccaaggatgcgaaatgcgatgactaagtaggtc

SEQ ID NO: 723086 - DNA, 359 bp, Homo sapiens
gaccttgatttgggtggcattgtatgcatttgctacattatgtggtgggatgatctgtgtgttttgtggggtaggctgtcacaaaaaggagagattcctgagcatatattgagcccaaatactgtgagcaatgagaatgagtttccattttctttctttttgttgacccttttcctcaccctctctgctgtacacagagtaggaaagactgtcatttgcagcacagacagaaaatgttccagggcttgtgccattgcagaaaccccttcctcccctgaaactggtcagctgtctaatcagagaggcacccagaccacgacgtggctcctctccctgcctctgcttgttcaggcaccatc

SEQ ID NO: 723087 - DNA, 966 bp, Homo sapiens
  misc_feature (12)..(12): n is a, c, g, or t
  misc_feature (61)..(61): n is a, c, g, or t
  misc_feature (65)..(65): n is a, c, g, or t
  misc_feature (131)..(131): n is a, c, g, or t
  misc_feature (399)..(399): n is a, c, g, or t
  misc_feature (414)..(414): n is a, c, g, or t
  misc_feature (441)..(441): n is a, c, g, or t
  misc_feature (495)..(495): n is a, c, g, or t
  misc_feature (516)..(516): n is a, c, g, or t
  misc_feature (553)..(553): n is a, c, g, or t
  misc_feature (592)..(592): n is a, c, g, or t
  misc_feature (598)..(598): n is a, c, g, or t
  misc_feature (615)..(615): n is a, c, g, or t
  misc_feature (622)..(622): n is a, c, g, or t
  misc_feature (656)..(656): n is a, c, g, or t
  misc_feature (666)..(666): n is a, c, g, or t
  misc_feature (721)..(721): n is a, c, g, or t
  misc_feature (730)..(730): n is a, c, g, or t
  misc_feature (759)..(759): n is a, c, g, or t
  misc_feature (814)..(814): n is a, c, g, or t
  misc_feature (819)..(819): n is a, c, g, or t
  misc_feature (881)..(881): n is a, c, g, or t
  misc_feature (888)..(888): n is a, c, g, or t
  misc_feature (921)..(921): n is a, c, g, or t
ctgtccaacccnctgaacccaggagacagggcaggcaagaaggagagcccagggagaagcnaccncaccaagggaaaattgtgggagccggaagaggtagggggagacccagccatcctgttctgacttcnagcaattccttctgcccccagtcatgaggggctccctatccccccatcccatggtcccaggtgcagcaatgagagaggggaagggaagagagaaaggaagacaagtaggtgccaggggaaggcatctctgccctgcatagctatatggccctggccatgactacaagcaaaagtgggtgcagaaggctgggccaagggctgtggtatggagtggatactcagtaggcatggttggcaatgtagagtaactttcccgccgccccaccanctcctccactgcctncaaacttgccccgggccgcaagcactntcacctcagcccgcctgaagaactcctcagtggcagccccagcattgtcccgtngccctcgccaggaattgagtncagaggcttgcagggcacgcccataggagaagggaanctcccagggtcggggaagggggcagcggttgaaggcatnaaggtngaatgaagcctctcctncgccctnacccccagacaggaaggtcactcctgggacagcngggggcacanttcgacgcagggcagttacagttgccatggcaatctcctctggggtatacttgangggacaggnatggcccggggtcacatgttgggcttgancagggtcccctccaggtatacatgaaggtcactcagggccttgtacacagcagcnaagancttctctgttacatactgacaacgtttgagggcgtggtctccatcaggcaatatttcaggtnccacaanaggcacaatgccattttgctgggagagactggnataaggggccagcccgttggcgttctccagaatggcaagttcaga

SEQ ID NO: 723088 - DNA, 680 bp, Homo sapiens
  misc_feature (189)..(190): n is a, c, g, or t
ggggcggagcgggaccccagccatggttgaaggaataggacggcccataacttgtgctcggttcgaaaggcccacctttttcaaggttggggtacccctaagaagtgtcagttggcgcgctcaaaatggtggggaacctgcccctatgggaattgggcccatactgggggtaaaccaagctgtgctctnncgggggggcctgcgacatgtctcctttgtgctggtcaatcagcacgtgttcgccgttggtagcctcatcgttcaagaagtggtttatatcccagagagagctattcattatcgcttcctgaagcgtgtgggccatgctctcagagtctgtgtccagatagtcttgcactgtgtgcatcagcactgcatactatcgtcaacgggtgcggtcgagccctgccgttgtctgtggatgcgatggacaccctcacgcgtgctcaaaaggtctaggccttcttggctgagccctctgcctttgtggcttcagcccctgtgagtgctggcaccccatctgctcctgctgaggctccagccccagataaggttcatgtcaagcaacactcggaggagtggttccagcatgtggtatttggtcacgtggactaatcacctcacggcacacgacttaagcagttttctttgctatacaaggaaataacggcgtacttctt

SEQ ID NO: 723089 - DNA, 107 bp, Homo sapiens
atcaagctaggtgcatgatgaaaaataattagacccagttctgactccctgtttgttagggcttttattagtacttgacatggctgagcagaggaaaaaacagttat

SEQ ID NO: 723090 - DNA, 405 bp, Homo sapiens
taactgcaggtatataacatcttatcaggtctcccatggctaatcaggaggataaagcaattttatagattactacatggtccagaatctacgcatcggatgtatcctatttcttctactttacttgatacatacaaaagcaaccactgtattttcttcaaatgtaaaaacgaaaaatagatacccatgccaaaattcatgcgtgtaaataggccaacagagccaaacttacaaagaaaatgaaatgacttgtttctggacagtggttttattggtaaagatataagacatattggctctattacaaactcaggtaataaagcactaagcttgatttttgtattgctacagtctctttcttctaaggggaagaaaatctccccaacaataggatgctacctgaag

SEQ ID NO: 723091 - DNA, 400 bp, Homo sapiens
gaggagctcacattgttgacaattaacccaatccaagagacctgcataaatcaatcactacagggaaaaaaaaattgttcttgatctacagtgacaaatgtgtagacaaggatgctgactgctatgctgtgaggaacccaagcagcccagtggggagatccaagtgttgtaaagaaccgaggcacctcaccaatagccagcatgggcttgctggtcacaagagtgtgccatcttggaagcagatcctccagccccagtccagtcttcagatgactgcagtcccaactgtcattcgagttcatgggagataataagccagaactacccagccacaagccactcttgcgttcctgacccacagaaactgtgtgagataataaatattagttgttgttttaaa

SEQ ID NO: 723092 - DNA, 132 bp, Homo sapiens
tgatagcttgagtcacaaatgtctgcactgaagctgaatcactgtgcaggcccacggccgtgtgtcagcagacagtgaaggagggcctgggctccatgctgagtccacctctcaaccctggacagtcggggc

SEQ ID NO: 723093 - DNA, 391 bp, Homo sapiens
gcggccgctactactactaaattcgcggcccgtcgacgtcgaccgcgtcgacttttttttcttggagacggatctcgctgtcgcccaggctggagtgcaatggtgtgatctaggctcacagcaacctttgtctcccgggttcaagcgattctcctgcctcagcctcctgagtaggtgggactacaggcacacaccaccacgcccagctaattttttgtattttagtagagacggggtttcaccgtgccgcccaggctggtccgaactcctgagctcaggcaatccacccgtctcagcctcccaaagcgctaggactacaggcatgagcaccgcagccggccaagagtttacttttggtatgtctacacgaagaaacatcggtcgacgcggc

SEQ ID NO: 723094 - DNA, 329 bp, Homo sapiens
agagaaaattgcggatcatcttgatcagacaagaaataagatatacagcagtcaagtttaaaacagtgatattgcatgtataggatgcacaagtttcctttatcttgatgaccggcttctacgtggtgaatatgaagatccaaggggctcagtgacatgaggagagagaacgatagatagtgctgtaaacaggcacacactgatcggggaggcaaaatctgttgcctctaaagtttctacagttctgcacatttcaactcatttctcaggcctgctgagagcaattaggtcctataattggccatgatgactccatccgcaatcttctt

SEQ ID NO: 723095 - DNA, 870 bp, Homo sapiens
ttggacagtttgtgagagagatacttctggggtgtcctccccagacgccgttcttgtgggacacgcgcgccgagaaccacttctgagtcctgtgcaggggtctccccaaacccccctgggcgttcgagacccgccgaaaggcttgggcgccctccaaaagggctcttccgccgcctttttcaaggctttcccgccgccacctttttttgggcgcccccccctcctttctccgctgagctcctctgctcctcctctggggcatttgcgttgaggtggccttcctctgccgcccgcaattatgggcttccaccacgccaatcgtcccctggggaccggctgcccccccaagggtaccacgaacagctacggggcatccccagacctgcctcgcccggagtcaacgggggacctccaggagatgctgcgaaacccgccctgcgcgagaacaaccggggcggggcaatcggcttcgacccacggagcaatatcccccgaggatgcaccccaggggcgggtttctaccccacacagctcggcgccaccgagaccgtcgtcgacgacagaatgctggaggacccaccccgccacaaagcaaccgaccccaatgcggtggggctgcccggggaattagcggtgctgcatacacctgacgcggcctccaagtcgtggattatctcttagggctcctcggttatacaaggcagagagatgacagtgatatcggcaccggggccttagagctgggctcacactactcccaaaggatacgtttggggtttcaccaggtaaacagagtttttactggcgttctacccccgagagaaggagccaaagcagagaaacaggccgttgttaacaaccaaacataac

SEQ ID NO: 723096 - DNA, 755 bp, Homo sapiens
  misc_feature (118)..(118): n is a, c, g, or t
  misc_feature (167)..(167): n is a, c, g, or t
  misc_feature (205)..(205): n is a, c, g, or t
  misc_feature (219)..(219): n is a, c, g, or t
  misc_feature (240)..(240): n is a, c, g, or t
  misc_feature (244)..(244): n is a, c, g, or t
  misc_feature (249)..(249): n is a, c, g, or t
  misc_feature (255)..(255): n is a, c, g, or t
  misc_feature (259)..(259): n is a, c, g, or t
  misc_feature (261)..(261): n is a, c, g, or t
  misc_feature (267)..(267): n is a, c, g, or t
  misc_feature (278)..(280): n is a, c, g, or t
  misc_feature (287)..(288): n is a, c, g, or t
  misc_feature (295)..(295): n is a, c, g, or t
  misc_feature (298)..(298): n is a, c, g, or t
  misc_feature (308)..(308): n is a, c, g, or t
  misc_feature (315)..(315): n is a, c, g, or t
  misc_feature (322)..(323): n is a, c, g, or t
  misc_feature (331)..(331): n is a, c, g, or t
  misc_feature (342)..(342): n is a, c, g, or t
  misc_feature (354)..(354): n is a, c, g, or t
  misc_feature (406)..(406): n is a, c, g, or t
  misc_feature (409)..(409): n is a, c, g, or t
atctgtttcatgtctaggtgttgtgggtgtggctgttgaaggaagtttgcagtcttgcagcttttattccctgtgcaacaaaagattagaacatgttaaagggatttttaaataaagntgcaaagagtacaaatgataattggccatgcaaataaaaactgatttgntgatttttttttaaggggggttggcagttgattatgtnctggatgattccgnctatatatgtgtgaataatgnaagnatttnacagcntgtngntttttnaattaacgtannnaatgctnnaaaatanatntatattcagntaaccgntttcagnngatttttngaaagaaacanaggttaaatggnggattaaagtttgagagaccctttaaaccattgccagcatgcacaatgcctntgnttctgcagttttagaaactcgccgtcacttataaaccctcttgccccttttcactctacagaatagtgcacattcttcttacattccaatcagcagattttcttgcattaaattattgcaattccacactactctaccttgatatactgcgctggaagacttagcactgcatcgttcatgcttcctactcaatgctgtctcgcatttctctcctcgtcgtcatccggcctcgaccaactctctatactccttactctatttaatcgcctcctctcttctctcacttcatatctttctactgtccttctgcttctcccttctttcttctacctcttcctctcccccg

SEQ ID NO: 723097 - DNA, 615 bp, Homo sapiens
  misc_feature (383)..(383): n is a, c, g, or t
aggttcaggcgattctgctgcctcagcctcccaagaagctgggattaaaagcacccgccaccaccatgcctggctaatttttgtatttttagtagagatgggattttaccatgttggctaggctggtctcaaactcctgacctcaagtgattagcccgcctcagcctcccaaagtgctgagaattacaggtgtgagctaccacgcccagccaaaaaactgcaaacttttaaaaagtggcttttagttaactaaaaagatagttctttaaaatgaagaagaacaccaagtttaacccaataggatgaaactgtagagcacagatgcatcaactggtgttcatggacctttgaatctcctattaatattctattgaaattttatntaaatgcatgcatctatgtatgtatatttctttagtaatttttatcacattttcaaagtgagttcttaactcaaaagatgcattctactaaggcattctactaaggggattcccattaagatcaggaataagactaatgtgcccactaacactgctattatttagtattgttctagaagttcatgccagtgtaattagaagtaaagcagaaattaaaaggaaaaaaaaaaaa

SEQ ID NO: 723098 - DNA, 278 bp, Homo sapiens
aaggcgcacgatggcgcgtacatacaggagagaagccctacaagtgccccctctgccctatatgcctgtggaaatcttggccagcctcaagcgtacatggtcgcatccactactggtgacaaaccctttacggtgtagcctattgcaactaccagctagcaaccatgagcatgacacctcaaactgtcacatgctgctggcacacatggcgagaagccctatccgctgtgccaccttgcgccatataccactggtccacgtgggacaacactacaatg

SEQ ID NO: 723099 - DNA, 556 bp, Homo sapiens
taaggttggagggggaatgcgggagatggtaaggggtatggagactgtgtcatttaagtaatgctagggtgaggggtaggaagttttccataggaggtgtatgagtgggtcgtagcggaactcgggggtatgctggtcgaattcataagaaaccggggaggtttcaagaagtagggtgcggggtgacaacagtagtggtgcggtgtcgaagtccagggggagaggtggccgctcactagtggtgggtcccctaggagagatgtggtccgtgcgtggaaggttcgtgtacaacaaagtcacgggtgtgggtattccgcaggtagagaacgaagtagggcgacgaacggggccgcgggggcgattcaccgacggtggaacgcctcgaccgacatacgatgacgcgcacccgccctctcgcgcaagggcgccacagggtgcttcgctggggacctcgagcccagtggggtggagacacacatcactcctcatcgggccaggcgtccctattgtgcgccgtaacctaccaaaagggggcgtgtgttagagcacagagaca

SEQ ID NO: 723100 - DNA, 659 bp, Homo sapiens
gggcgcacgggccgtgacatggtggcccggcaggccctgctgctcgcggtctaagtcgccgcctgggccagtcggcgtgccgctgctgctgccactattgctgctgcttctgcgcgcgcagcccgcatcgggagcctggccggtgggatgccccgtggcggcgaggccccggggtcgggccaggtggctggacatatgcggggcagccataacccgttcaccgtggatctgcgcaccggtcgctgggaaccaagacccacagcggcgtctctgatgctgtctccagggatccgcagcgcgtgctggagtactgcagacagatgtacccggtagacgtgcatgagttgcacgatgtgtgagcaggcatacgcaggccatctcgccatggtagcgctggtgcgggggttcccggagcggaagatgagccacagacaccacagacagacaggttgtgcccttccgctgcctgcctggtgaatttgtgagtgaggccctgctggtgcctgaatggctgccggttcttgcaccaggagcgcatggaccaatgtgagagttcaagccggaggcatcaggaggcacaggaggctgcagctcccagggcctcatcctgcacggtcgggcatgctcttaccctgtggctcggatcggttccgtgtgtg

SEQ ID NO: 723101 - DNA, 361 bp, Homo sapiens
agctctctctctatgtatgtatctctctgtctctctctctctctctgtctgtctctctctgtgtctctctctgtccctctctcgcgcagagactgagccgattcgaaaaaatactcagtccaaggctgatccgtacgtacacaagatgactggtatatggagatggcaagcttgtctgcggggctttttggtcttaagcgcaactgctattatgccgggcctcctttccgtacccggtgaaaccatcgaatactgattgcatagacacccgatgcactgacccatacatgactagagataactctatattctagctgtcatctgcatacatatacctcgtgcatgggagagcagcatagtc

SEQ ID NO: 723102 - DNA, 279 bp, Homo sapiens
taacacaacactgtcctccttgtattcatgggagctacattaacgcactcattagacttatgttgtatgcctccacagatgacaaacctgtactcccatcacatcctcccacagcgtataataatccagtttaagcacgatgcagctcccaatagtgcttctccggttctctcatgtagagcaacgctggatccactggctccttctacagggtctataagaatctcacagtagcgaacatcttaatagagccacttacaagccaccacacagcaaaaa

SEQ ID NO: 723103 - DNA, 362 bp, Homo sapiens
cccttttttcccgaatttgcaaaaccctttaaaaagcccctacttttagcccttttttttcagcaaggggtcatttttcccgaaaaattttgtacccaaataccgggttatttaaccaatgtaaaatttctcatttttagtgaattaaactttcccgtaattttacatctcacctcctttttatgatgctcaggttgcttaattattggccaacctaatggtaaaatgtttttactgtattagagccttacttttcggttttttaggtatttttcccgtttttttggggtgcttggcctcaattttccctattttatctttttaaaataaaatatcatgcctgcttctggtttgtttttgga

SEQ ID NO: 723104 - DNA, 1150 bp, Homo sapiens
  misc_feature (838)..(838): n is a, c, g, or t
gtgataagtgtccatgaaatcttcacaatttctgttcagagattgcagtaaagacaggcacaagaaattataaaagtatgaatttggggaactaataaatgtccatgaaatcttcacaatttatattctgctgcggcttcagccagtccctccgtttggggtccctgacttcctgcaacatatctctgcatccatgacctaaatatgtgactcctctattctggctgcacccagcttacaggaagattatgacattttgctaagtaaagtgtatcttgtgctgatctcctatgttattctgtgactaagaatgcctaacctggggttgcagcccagtaggtctcagcctcgtttcacctcaacactattcaagatggagtcgctctggtttgaatgcctctgacatagagatccattgtaaaattatgaaaaaaatttatttgaatgcagtgaataagaaatggaagacctaggatgggctattctgaaagatttagcaatatttgtatttgtcaaaatttaagttttccgttaatacttctgaatagatacattgttttattctgtcaagtttaaatagatacgcttgataatacaaggagttcccactgtgaaagaaaaataaatctcctgatgccaaaattactaatccaatagaaaagtcaagctggagactacatcaggcaaacctgtttcctattttattcttaaataagatagctacacagataaaaagctacatacctacctcacaatttgctcagaaggaaattcctagtgaatagatgacagacagaactcaaagttatctctctgaggctcacctgagacaaatgcngatctgtttgtttcctctgccctattaattttaaaatggcagattcactgagccaggctaaattcgtgtattcagtgggagacttatcaggactcaaataaatttattatcttttctcttatctacttatggacgggggaagcccccaactcaagtttcctggtcttacctgacacaccatgttcatttttaacatgttatggatgctctgatttctaaatgtttaaagatggacccaacacctgggacggcataagacccgagggggacagggccaatacactggggaaaactccattctgtgcaacaagg

SEQ ID NO: 723105 - DNA, 281 bp, Homo sapiens
tacatttctgtttcctaatggtaaaatttaggccccaggcgtggtggctcatgcctgtaatccccagcactttgagaggccgaggagggcagattgcttaagtctaggagttcgagactagcctgagcaacacagtgaaaccctgtctacaaaaactacaaaaaaaaaattagccaggcatgttggcccgtgcctatagtcccagctactcaggaggctaaggtgggaggatcgcctgagctcaagaagttgaggctgaagtgccctccaacctgggcgac

SEQ ID NO: 723106 - DNA, 401 bp, Homo sapiens
  misc_feature (20)..(22): n is a, c, g, or t
  misc_feature (27)..(27): n is a, c, g, or t
  misc_feature (34)..(35): n is a, c, g, or t
  misc_feature (39)..(39): n is a, c, g, or t
  misc_feature (46)..(46): n is a, c, g, or t
  misc_feature (49)..(49): n is a, c, g, or t
  misc_feature (54)..(54): n is a, c, g, or t
  misc_feature (380)..(380): n is a, c, g, or t
  misc_feature (387)..(387): n is a, c, g, or t
cacgaggatgcgcaggcggnnntgccnttcagcnnttcnctgcggnggntcggncagctcagcgccaccgtggcccggtcggccgcagtgaacagcacgtgcaggcgcggcgccgaaggatcgtcggtgaaggcgcccgcctgttccagcgcctcgcccatgtgcggctccagcttcttggtcatcgacgacagcgacttcgcgccgtcggtgtccggcgtttcgatcaggaagtcgctgtagccgtcgcacagcgcgcgcgccgcgtcgacgaccggcgtcacgcggtcgcccggactcatgccctcgaccgtgcggccggaccacagcagctggcgggagaagcacaggtcctgccagcgcagcacgcgggtcagggnccacagngcgccgccttcggg

SEQ ID NO: 723107 - DNA, 163 bp, Homo sapiens
tcgttcactcactttaccacggtgcttactacgctgttaacctgttggtgctgctctgtgctactcacgacgcttctctgtgcttgatgggctctgctcttctcagggccctgcccatcaaaagtcagtgttgccagtctgttcttgcagcttgtggccatgg

SEQ ID NO: 723108 - DNA, 426 bp, Homo sapiens
agaggtatccccttgggcaggacactgtgctccttcaatttcctacacctgcgtatcagtcctcaccagcaggtaggacatgcaccagctcctccaactccagcgccagaaccatgccgcctactaagccccatgcccccagccaggcctcctccacctgtgctttcagcatatcgacgctccttctgctactgttccatctccagtgggggctgtgactgctgtgccagctccatcacaaacgcctggttcagctcctcctccacaggcgctgggatcatcctatcccacctatccaggatatcctgggtattgccgaatgcccatgcccatgggcttattatccttatgcgtctggccagtataatatgccatatccaccagtgtatcacagagtcctggacaggctccataccctggacccct

SEQ ID NO: 723109 - DNA, 439 bp, Homo sapiens
cacgaggataaatggcgctttgccggtacagcggcaggtggtcgcagtacttggcggtgagcacgtgggcgagcagcccggggccgggcagcccgcccatgatcgggcggctgggggcgggcgcctgcacgatggcctcgcaccggccgcaggcgaatttcgtgcgcacgtggcgcaccacccggaagcgggccgggacgtactcgagctcttcggacacgtcctcgcccaggtgcttgagcgcgccgccgcactgcgggcagtcgctgcaggttggcagatgttccatgcggctgcgcggcaggtgatcgggcagccggttgcggccggggtgtcgcgggggggattcgatcgggatgacctcggcgagtgcggcgagatcgactgatgcgccacgggcctcgccgtcttcttgctgggccgtactcaacccgagatc

SEQ ID NO: 723110 - DNA, 104 bp, Homo sapiens
gtcgaccaaaatcaaaactgcacatccacacggcagagatctcaaagattatgcgagaatgtcatgaagaaagtttctggaagagagctctgcctttttctctt

SEQ ID NO: 723111 - DNA, 180 bp, Homo sapiens
gaatgtgtttgaaatgcaggtgtgctctggtatgtaatgcaccatatgtgaacacacctgtggaattaaagttgaactagtcaatttgatacagtggcaaaataactaagcatacacaatactggtgcaggctggtgaaacagggatgtagaatgcacactagtagatagcctgcatagc

SEQ ID NO: 723112 - DNA, 391 bp, Homo sapiens
agatcgactgacaggcatgcccgcctacagcagattggaactgtttaccagacgcaagatatgtctataaccctgcgagaaggcagatataaatcgataaatggcgaacctagaggtgatggtgcaggtgggaatagtgattcagataacttggacagcacagactgcaacagagagagtagcagtggtggtaaaagccaagagttaaataaagggatggatgtgaattcctctaaatacccctcaccgctccttcattcccaagaagaaaagacaagtactgctacttccaaaactcagacacgacttgaaggtgaagtgactcctaattccttgtcaaccagctacaagacagtgtcattgccattaagctctccaaacataaagctga

SEQ ID NO: 723113 - DNA, 552 bp, Homo sapiens
  misc_feature (67)..(67): n is a, c, g, or t
  misc_feature (87)..(87): n is a, c, g, or t
  misc_feature (97)..(97): n is a, c, g, or t
  misc_feature (114)..(114): n is a, c, g, or t
tcgtgaggagtaaacaggtcatctattcacaaaactgaatcttcattaccccacaaacatacaaacngcttacagattgctgaaatngtctcaattnggctatcaaattcattnggttttcctcaaattcgtgtaaaaaaaaaaacccacaaactggccatctactatttctccaggactgggcagtcggccctcaaaagcttcagacgagatccaggagtataagccggaaaaagagaaacctacaacaccgggaaatcggcctaggtccccatataaatccctttacacctcagtacgaaactcccccattatatcagaaaataaataaagggttaccataagtaagtcccagaaaaacaacatatggccgacctcagggatttttaccaaccactcgctttcccgggggcctgggcacactggcatggcgggtctaggatcctctaggcacaaggcgggctcgcctcctcgggggggtggccaagccaagcggcgtgttaccttcatcaccaaatggcactcgctccttccgggaatcttttttcctag

SEQ ID NO: 723114 - DNA, 423 bp, Homo sapiens
agaaatctacaatcttgctgagtgcttccccaccccgtgaacctgcaatggagaaatgggctaagaatccagggaaccctgtggacaccccacctctcagctttcttgtaccttccaggcagctgtggcgactggagaagccaccctggaactgcacctgcagctgtgtgatctgaacacactggggaaactcgagtgacacccactgggaggggccctggaagcagagggataaactgaggcacttggtaactgcaaggttagggccctatgatgttctgttcatctttctttcttttttttttccccaagacagggtttctctgtgtagctctggctgtcctggaactcactttgtagaccaggctggcctcgaactcagagatccacctgcctctgcctcccaagtgctgggattaaagg

SEQ ID NO: 723115 - DNA, 144 bp, Homo sapiens
cgtttggtgccgctctttccacgattggcttctgcggttcttggaggaaactattgtgcacgcgagtctctcgccgacagttaacgattttgttagcacagttcagcagacactgtccagtctccgttgactattgctgacacc

SEQ ID NO: 723116 - DNA, 555 bp, Homo sapiens
  misc_feature (255)..(255): n is a, c, g, or t
  misc_feature (270)..(270): n is a, c, g, or t
ttggtgcgcctattttgttccaaaccccccggccccctgcatagttggggtacaaatcccccttttccctgggcgagccgggggggccctgtggttttcccttattcgggggccccctccaggagaggttgtccccctcccccgctctccccccggggttttccccgggtggtgggcgcctgttccccccttttccccagtttttttggggcaaggggaaggggcggtcccttttcgggccccaggggttttttnaaagggggatgaaangggcccttggggacccccagtttttttttgggttgggggggcccccccccattagccctcctggggttggcctttgtttcccagaactttttgggggccccgggtttggccccctggggtggggcccccctgggccaccccgccggggtttttttttttttctgtcccccccccccccccccccgggggggggggttcccccccccgggggggcccccccccccgttcccccccaattgggttttttttttgggggtttttttaaaactttccccggttccccca

SEQ ID NO: 723117 - DNA, 808 bp, Homo sapiens
tcttggaaatggagtctcactctattgcccaggctggattgctgtggcaccaatctcggctcattgaacctttgcctccgttggtaattcaagtgattctcctgcctcagccttccgagtagcgggggattacgggcttgcaccaccatgcccagctaattttggttaattttactagagacggggtttcaccacttgggtgaggcttgtctcaaatctcttgacctcgtgatccgcccgcctcagcctcccaagtgtgcttgggtattccgggcgtgaaccattgccgcccggcctcattggccattcttgacgctttaattcaacccttgcaaatgtggggccactatgttggccactggagatctttagagaacatctggttatccgggaataactcttctgggagttgctgcggggaagcactgcagttggggaggtactgggtctaaaaagagcttccttcggcttaaaatactttttggatcggtcggtggcaagggacctcaattgagccctagtaattgggcggaggtcgagtggtccgacaacataaaaggaagcatcctttcttccccaaccttttttttttcctcaccaaaagctttcaccattgcggtgttcctttcattcatctcatgagacgtccctcggacctgctggtgctgcactcccttgtgtcccctggtcattctgtggggagctctgccaatttggggccggttaacccgctcgttttttttccccccatgccatattcggctttcttccccgagactgcggctcgcggggtttcctggggataccc

SEQ ID NO: 723118 - DNA, 590 bp, Homo sapiens
  misc_feature (314)..(314): n is a, c, g, or t
ggaaatcgcttcaaacatcagaaaagtagcccgtgtaccagtccaaacctgggagggatgggacccagcaaaccttctaggagggtggttctctaatttaggaggatttaaaatgctggtggggacagtcattttcatcactggggtcctcctgtttctcccctgtggtatcccattaaaactcttgttgaaactacagttaacctcctgacaatccagatgatgctcctgctacagcggcacgatggataccaacccgtctctcaagaataccccaaaaattaagtttttctttttccaaggtgcccacgccnaccctatgtcacgcctgaagtggttattgagaaagtcgtccctttccccttttctataaccaaatagacaggaatggaagattctcctcggggcctgaaagcttgcgggatgaataactcctcctcctcaggcccagtcccaaggtacaaacttgcaccagcagcaagatagcagaggcaggaagagagctgggctggaagacacgtaccccctgaagatcaagagggaggtcgcctggtactacatagcagtcacgttaggctgggaccaattcc

SEQ ID NO: 723119 - DNA, 115 bp, Homo sapiens
gtgctagtttctctagccatcagtgccatctggtcgctgcaggcacacggtttggcggcgcatgacttagcagatgaccctcgtggacccttaagggcacaacggctgggtaacc

SEQ ID NO: 723120 - DNA, 335 bp, Homo sapiens
  misc_feature (327)..(327): n is a, c, g, or t
  misc_feature (333)..(333): n is a, c, g, or t
cgtgttttttaaacctgatattttcattcctaattgagtgacagccatcttttaaggtgttgggcatggaaccccaggccttacctgcttggcaagtgctttacccccgaactacacctgaagctccattccttgtcccttcatgcaccatttaaaggtgggaactatattttgactttatctacctctgagaaagaggaaaatgtaattattcacagagtttctcaaaatggcatctttcctcccaaactgggagccaaattcctgcagaaaatcatggacaagtaaatgggtgacagatgtcctgaagggggtctcaaagatgcnaggggnac

SEQ ID NO: 723121 - DNA, 903 bp, Homo sapiens
agcctatgttgactcatttctaaagcttgataatataaatgtgtggaaggaaataatactttgaaagagttgcgtgtgattccattaaggttttttcccctcatttattaggaataggatagtgctgactcagttccaactctcagaagtgtgccctgtattcaagtttgaaaaaggttcttctgtctagttttacactctagtttcaattttgataatgctgtgggtttccaaggtagtctctatctgttgctgaaagcttgatttaaatgctagcttttaggaattaaaaggggaaagaaaagaaaaaaaaaaaccttgccctaatttgagagcattgtcacctattatataagtagttcatttttttccctaccaaatctacgggacactgaaaaaattaaaaagtaaaactaaatttaggccaggcacagtgcctcacgcctgtagtcctagcacttgggaaggccaaggcaggcagattacttgagcccaagagtttgagaccagcctgggcaacatggtgaaaccctgtctctacaaaaactgtagccaggcgtggaggcgtgtgcccatagtccagctactcagaaggctgaggtaggaagaactcttggacccctggggattcggacggttgcagtgagctgagatcaccccactgtactcccattccgggtgacaggagaggacctgttccccccgcccaaaaaaaaaaaaaaaaacacaaaacgcaacacaacacagcgccgacaagaaccacgcaccagcaaacgcaagaaggggggggcgcgcgtaaaaacaacccagggggcacacaaacacaccacacactttagaagacagagccccagagcgtcaaaaacaacaggcgcgcgcgccacaccgcgcgccgagaacacc

SEQ ID NO: 723122 - DNA, 592 bp, Homo sapiens
aattaaggtgcaaatacagaatgatgtctggcggggcttggtggctcacgcctgtaatcccagcacttggggaggtcgaggtgggcggatcacgaggtcaggagatcaagatcatccgggctaacacagtgaaaccccgtctctactaaaaatacaaaaaattagccaggcgtggtggcgggcgcctgtagtcccagctactcgggaggctgaggcaggagaagggcgtgaacccgggaggcagagcttgcagtgagtggagatcgcaccactgcactccagcttgggcaacagagcaagactccaatctcaaaaaacaacaaaatcatcaccacaatgcatacaataaaactattcagctgggcacagtggctcagacctataatcccagcagtttgggaggcccaggctggtggatcacttgaggtcaggagttggataccagccggcctaacatagtgaaagtccatctctaccaaaaatacaaaaatggttacagaataattatacatgtttataggggtacatatgatattgtgatatatgcctacgatgtgtactgatcagatcaggatgtataggatatccatca

SEQ ID NO: 723123 - DNA, 771 bp, Homo sapiens
ccttttgaatgcagcatttgtgggaaatcctttagatgtcgctccacacttgatacacatcagagcaattcacactggctgaaaggccttatgagtgctagtgaactgtggcgacacacttctttagcgcacaagctcaacatcatacttacgactatcggagcaaactcactttcggacgacaaggtcttttgcagctgcatctgagctgtgcgcagagctttttagctcaaacattccctacctcattcggtcaccaaataagttcacatctagggcaaagaacttacaaactgcacgcaaatgtggcgaacattttttactgcgacagtctccgacactccattagctcatgcagcagcagttcattactggcagacaaacgccttactgcagctgcacgctgacatgctgggaacagctcttatagcactacatactctcagccctcacttaacacatcgcgagaacttcacatctggagcagcagacccttactcacgtgctcctgcactgctggccccgccgctcctttacccccctcctttctcactctctcttcagctctctgcactcgctccaccaccagcattcaagcacctgtctcttctcccgcagactgcgcgcccgccttcccccccccccttctcctctgccttccgcactgtggaccttcgatatcccctcccctcttcttgctcctccttcagtttccctatcctctaccctcctacccccgctcacgcgccctcccccgctccgccccccccc

SEQ ID NO: 723124 - DNA, 179 bp, Homo sapiens
gactggttgtacttgaggatctctgtatgggcggcctcttcgtcctgctgggctccttgcacgttctcgtcgttcctctgtatggtttcctcctgttccttatccttgtgtgccttctgctgtttgatggtgcccttctcatcttttgtcgtctctttgttctgcatggagtctgcccg

SEQ ID NO: 723125 - DNA, 405 bp, Homo sapiens
  misc_feature (85)..(85): n is a, c, g, or t
ctcctcgccaaactttttttaagtccctaaaacataattccagtggaggacaaagtgggaatgctgtgccaaagagcatctcctnccgtaatgccctgcggaaaaaacttcattcttcttcctctgtgccaaattttctaaaatttctggctcctgtagatgaaaataacacctctgattttatgaacacaaaaagggactttgaatccaaagcaaaccatcttggtgattctggtgggactcctgtgaagacccggaggcattcctggaggcagcagatattcctccgagtagccaccccgcagaaggcgtgcgattcttccagcagctatgaagtctagcattcctagaggaacgtcatgcaccaggtaaattccgccatgttgcctcttaatgagctttgcg

SEQ ID NO: 723126 - DNA, 500 bp, Homo sapiens
  misc_feature (111)..(111): n is a, c, g, or t
  misc_feature (204)..(204): n is a, c, g, or t
ggcaaagctctacttcacgtgggcgccacaatttggcgctctctttctgtgctcccagctctcggatacagccgacacatgggtttcggagaactgaaaagccctgccggnctcatggtgctcaacgattaacctggcggacaagagctacatcgaggggtatgtgccatcacaagcagatgtggcagtatttgaagccgtgtncagcccaccggctgccgacttgtgtcatgccccacgttggtataatcacatcaagtcttacgaaaaggaaaaggccagcctgccaggagtgaagaaagctttgggcaaatatggtcctgccgatgtggaagacactacaggaagtggagctacagatagtaaagatgatgatgacattgacctctttggatctgatgatgaggaggaaagtgaagaagcaaagaggctaagggaagaacgtcttgcacaatatgaatcaaagaaagccaaaaaacctgcacttgttgccaagtctt

SEQ ID NO: 723127 - DNA, 666 bp, Homo sapiens
  misc_feature (105)..(105): n is a, c, g, or t
  misc_feature (640)..(640): n is a, c, g, or t
  misc_feature (660)..(660): n is a, c, g, or t
agaacaaaaatgtttcttttattttgaagcttatattttatactttgtgtttttatgtttctttatcctaaactcttttttcaaccaaactcttagcatctcctnccgtaatgccctgcggaaaaaacttcattcttcttcctctgtgccaaattttctaaaatttctggctcctgtagatgaaaataacacctctgattttatgaacacaaaaaggtagggcttaatttagatatatcaagcctgggtgttactaagtgttgaatatcattagatatacaagggtgttttaattactattttgccatttaaaaaatcatttcagctaaatctgttgtatcttctttcttatacttttttcttactgaatgccatttttaaaaatgtgcaaccaacctgttctctagttttgacgaggattagtttaagtgttatcttaagaaaagtctttgccaagtctctgagaccagtgtttctggttagtgagcatatgtctgtttcaaatcaggatgtctgatctgttcaggacgtctaatctgtaagttgaggggattgcttacttacaggtacataacttgggtataaattggaagggccttctcaggttgtcctgtgaataggagaaaacatttatgattgngtttatatattgataactgnattttg

SEQ ID NO: 723128 - DNA, 590 bp, Homo sapiens
  misc_feature (37)..(37): n is a, c, g, or t
  misc_feature (59)..(59): n is a, c, g, or t
acactctcactaactcctttattatgatttctttganagaatatgaagacagccataanaaagactcttattgaagttgagagggtctcctgtaggtcttcacttcactgtgtctaaacattggtctgttgcttgtgctttgcttttctctcaccctggatgaccttcaaggctcttccaaatgatttctctgattccctgaaatactgaaattgtgattaacagaagtttcaagtgttaatcaatatcaagatagtagttgtctcttcctggggaaactagaaatgaaaaccaaacataggcctctgtaatcattgcacagattaaaaatgaaaatgcagctgagaaacagaggaatgaatgagaaaaccctaaacctagttctagccccaggatgaggtctttgtcatgagtctgacgctagccacagccggtaagagaaggaattccctagtagtgtagttgttacaagggaatgagtcattttgcaggtaattgttcttcttccattttccacttgctgtcagccactttacagaggagtcggactttgttctgcttaagagaagtctctttccttttattgttta

SEQ ID NO: 723129 - DNA, 128 bp, Homo sapiens
gtacttagactgaacttgctcgagaggagtctcgcggacgtcagcaagattcagatgactactatcttgacttaccctttaaaatcttccactgcatcaaaatgggcctcagattttcataagactat

SEQ ID NO: 723130 - DNA, 1403 bp, Homo sapiens
ccgaagaggggaaatgtgtgtaattgataacctgcccacagcatgcccctgccctttgttctcagccaagtttctctagaacgctgcaggagacgatcaggtttgctctgcgaatttactccgaagagtgttcacgtgtaatatcttgtattgttcgccctataaggggaggacaggtcttatctaaggccacaattctccagacagtttacacacataaaacccatttacacctcattaactggtgtaaacggttggtcacctgtgtaacattttgaaacacctttaaaatgccttcggatcattgtgcatagtacattgttcgctgtgccttggaccaaagttgtggctactgtctatgtgagattaggtgtcactacgcttaccaatctgggttcacactggggcccacaaattggacagaagactcgaaaaacagtgaatcccttcgccattcggacaccaggaaaggatttcaaagcctgatttatagggccaacttaagagcaacgtgcccccaggaatgtgcacgggccaccattttatagataacgggcaggttgatcaagtcacaattaattgttacgttgggaaccttcgaattgttgacctgttgccttgacaataatcctctgccaggcaaggtacacagcaatactcgggagtattaaacgcggttatacataagaggttcccccaaggttcatacatgttccgcttacattacaaggtatttgtggtgtggaccctcccagacgttccaacacctttggcactcacaactcggtttgtgccttgaattttttgtcaacacagagaactaaggtccactacgcatttccaacgcttcgccagagcgaaaatgtaatttccaccaaaccagatcaaagggactcaaagaacctttaatgaaacgttggacacagattcaatcaagggggctgtggcatctcctgggcactgcaactacttcagatacacttcggctacgacagtggaagacaggacatccaggccacgaagaacttcgtttgtgttcccccttcatcccctaacaagccaagtgtgtaaagcccgaaaaaggggcactttacagaaaggggtctccaaaaaggtgttaacggtctaaaaacaccaaaaaaaactcttcaaagctgtcgacaacacatcaccatatcgatctcattacacataatgtaacacactggcacaatcttcccgatactatcatttttaaccaataacgagagcagcgacaaccatcatccaacactattggtgaccatcagacaagatccacacgcccacacaaacttcctgtcgaacaacacacctgttctgacaacaacacgaacactacctctatcccccgtcaaaatacaatgtcgcgcacataacccctc

SEQ ID NO: 723131 - DNA, 401 bp, Homo sapiens
  misc_feature (85)..(85): n is a, c, g, or t
ctcctcgccaaactttttttaagtccctaaaacataattccagtggaggacaaagtgggaatgctgtgccaaagagcatctcctnccgtaatgccctgcggaaaaaacttcattcttcttcctctgtgccaaattttctaaaatttctggctcctgtagatgaaaataacacctctgattttatgaacacaaaaagggactttgaatccaaagcaaaccatcttggtgattctggtgggactcctgtgaagacccggaggcattcctggaggcagcagatattcctccgagtagccaccccgcagaaggcgtgcgattcttccagcagctatgaagattattcagagctgggagagcttcccccacgatctcctttagaaccagtttgtgaagatgggccc

SEQ ID NO: 723132 - DNA, 415 bp, Homo sapiens
gctgtcctgggcactgtgacgtttctggctggcaaccgaatgctggcccagcatgcagttaagagaacagcacattagttccagaagaagtctgaagaccctgaaggctgaaatgaacatttaacaaggagtggggacagttcatggtgtgaaaggaagaactggggacacaacaggagggaggagatgcctgttcgttaaaaagagaaaagctgagctgtgcttacatgtttacttgtttctcactttttgcttcacagagcagacatgtttgggcccagattgtctgtccctttgtcttgatgcctggcaagatgctgtgaatatcccaggctacccagatgttgtatttgaaaagttgaaatctgtaattcatcatcagctttggaataaagagaatggtggactcccagaa

SEQ ID NO: 723133 - DNA, 281 bp, Homo sapiens
ggctacattgggcatgggccttcaaactttttggagtagtgatgaatggtgaaagtgcttatatattataggcatgagaaaaatctcgcagtaaaagcactagttaattaaataggatgctggatttcattggctggcaagaaatgccaaatattgggaaattaaaacttattttctttatttgttttttccgaggcgggggggtgcaggggggggacccgtcagagggcgacgggagggcagtgaacgcggggcaggggcgggggcaatgaaaacacgga

SEQ ID NO: 723134 - DNA, 359 bp, Homo sapiens
tctctagaggttccccttctgtcagccggtgtggggatgtgactgagggcccgggtccagaaccctaccaacgccgagttgctcaaggtcctggcgaatcccaacccgtgatgagatgaatgttaaggtgctggactttgaccactttctgcccatgctgcacaccgtggccaccaacaacgaccaggccacctattacgattatgcctgaacgacttcgtgctgtttgaccaggcacggaaatgtcaccgctcattggagctgcctgaaattccggcatgttcttttcacactgcgtgataagatgactgcaggaccgttgctccgcgtaaggtccgttgctagggggttaccgagct

SEQ ID NO: 723135 - DNA, 197 bp, Homo sapiens
gagtcttacaacacataagcttttagagagcagagtttcatattaattacctgatgtgtcagtagtgcctgacgcagtgcctggcacgtaagaagcactccataaactcccccaattatacgtaaaatgtccctttatttatagaaacagagtatcacgctgttgcccaggctgaactgcagtggcgcgatctcgga

SEQ ID NO: 723136 - DNA, 107 bp, Homo sapiens
actttcacaggacacatcctaataaaattgctcaaaatcagtgataaatagaacatcttaacgtgcataccaatagtatagacacatttaattaaacagaaacacca

SEQ ID NO: 723137 - DNA, 982 bp, Homo sapiens
ttttcctgaggcccgggagccaaccgagggcgttcctgtcggggctgcagaccggtgggagtgtaaggcatggccaggccggctgggctgcatgagcgccggcacgggtccacgcctcgggtgacgggcttccaggatgttcgggcgcggggcggccatccgcatcccccaaaccccgcacctcctggacgtgagcctcctcagacgccgtgggaaccaaccttccgtgtccgctgttgctggcccgctatcttagcagcaggcttgacgcgcgatcccaaacccttggcgagtgccccccttggacgtgagaacgatgagcaatacgagtggggaagcccagttgcaagggcgcccctcccgaagcgccattgcccaatttgctgaagcagccccagacacttcacggctgctgatgtcaatgagtaaccacctacctgtgcccaaatgccccccaggccaaacagcggactccatggtgggccttatgtgtaggggccctatcattcccttaccatcaccctggtcggcgtgttcgagtggcatgtggggtggaccgtgtgtggcccatcaacatgttccgcccaatgtcaagctattaggcagatgagggaactgcatgaggcttgcagcaggagctggtcttctgaatgggaagaacccaaggttggtacatggcttggccagacgtggctaaccagccactagcggattcgcactggtggatcgcagcgacgttggcttgcccccttgtcccaccttcagacagctgggtcctggcttgctggggcctgcatttgttccccggtgcacttgggccccttgtggtgaggggccatatcctccccacctcagagatttgtccgtgcgacaatacaactggcagcgttgccttggttggtgccgcccctcgtcttgaaggtctcggagcggcgcacactgtctcgttgcgtgcacacgagcggccatgcggggctccatg

SEQ ID NO: 723138 - DNA, 1117 bp, Homo sapiens
ggagacgctgtgctgttagactcatctcgctagacctaaggcagcactatcgctgctatctcgtctaaccttgggcccaaggcagggtccacatgtatgacttcacgcaggcagaggcaggtcagtatgtgttcgtcgtggcgtagcgaggatagctgcacttcgccatctgacgatgtcacgacagcatcgttacgacaacagagagagataagtgtgacatccttaagaaacagaccgagggaaatggcaacagggaacgacggcttgtgacaatacgtgatacgcagtcgctgatccaagcgtggtacatgatggcgtagcttcagacgtaggcatataggttaccgtagtatagtaaggactttctatttacccgacctcatcaataggtttcatctgcgattaagatgcacacgatgatgcgaagtctcatgtgttgagcagcttcgacacgtttaagaagcgcacgatttgtacggacgcgaggatggctccctggctattccttgacacgaaacgtttggcttcgcttttgtgagtcaccatgccaagtgcaatgaaggcgattaacgtattcggaccgagtgcgaacacacgagtcgagaggtcagtacttcgcctacgcacagggctcccatggaagtgacaagcatctgtcggatggacaactgcagagcattgtgtagatagcaccaagacagcgttccgactgccttggagagaacaattcaaatgccggggactccactaagccttgattccccacaaccttttataggaaagcaaaggtggatactgtggtcgcctaactagtttgatcagacatatacctaggaccgagtactcacgtgaaaactaatcccaataccctccacttgaagactgggtacacggggtaccaaattggatcgatttctactcgaaaggggttgttaaacagcaagccagcaagtttgcgacggttttcaaaaggaaggaataaggaccgttgtggcaacgtggcttagcgatatttacccttttacagccatcttgccttggacccgcacttgcaggaagtttagggaacttgcgagcacaagggggtttacaaaagttccgtagcttttacccg

SEQ ID NO: 723139 - DNA, 105 bp, Homo sapiens
aaacaatgatgtattttttaaactgccacattcactcctgaaggcccactcatctccttcagcatcccacagatgaatgcagtggtacctgagctcgcaattctg

SEQ ID NO: 723140 - DNA, 1634 bp, Homo sapiens
atgactctgactcgttggtctatgaaactgacatggtagtaaaacactctcttcctacaagtctatccacgaggagcatgtcagtctcccatggacggtagactgcatcggaggtatgagactacgagtgcaatgtgtacgtgactgactgagtagagacgaccacacgtgaactgcacatggcatacgcacgcacgctacggatgccaactaccgcctgtgttccctctactgcacggtacactgcgtgaccaacattcctgtaagctgccttgctgcacacgcctaccatctctgtcaatccccccgtgtaccctaagccaagccaacttgcgttccaatgtgcaccaaccgcctctgccctgtcacctgatgagcacaacctatcagacccagtgtccgcgccatcactggcccgcggtgactgcccgccccagcaagcacactgaacatacgaatcgagcaggtacagaatcggcgagacccgagcgggaaccagccactgacccccctcggtaactggcgaccgccacggccctcccagctccgctaccgcgacaaggccacccgacctgagacgatgcacaacccccgtcccctccacgcgacgacccggcctctcccaccaccaagcccgactcgccactcactcgctcgacgaaacccccccgacttcccaacgccccaccagccgacccgccgtcctccgccacccagagcacccaaaacccgcaatcgccacgccaacagacgccgcgcactcacaaccgaccgcaagcacaaaggcaacgggccttggacccagtatggcccgcgtggtacaagccgccaagcaagcccccggcccagcacgcaccggcccccccccggcctcacacgatcgccgcggcgccccaggcacaccggacccggagcacgcccccgaaggcgcctcaccagcaagcaacccggcactaatacagcatcccacacacctgggcaacgcccatgccccagcacataccgtaccacccctgccccctcacaccccaaccacacacctcgcacgcgctgggcggcccaacaatggaaccacggcatcaccacgcacacgacccgtgcacaggcctgcattcaccacatcccacacaccagccgccagacccacacactcgccgagacgccaacacaagcgaatcaccccgacagcaaaccggcaagagccacacccagaccaccaacaatcggaccagaccctcgcaatccaatcgcacctcgcgtgacccaccacacgacagcccccacaacgcgcaccacgccaaccgctaacctcggccacacacagcacatcacaaggcaagaagctcaatccctcaccctgccatcgaccacacacaccccccgcacccgggcccacgccaacccgaacaaccctgccaccacgccacaccggacacacagccacaccgcgaccaaccccaccacgcccccctctgcccccacgaccaccaccgagcagacgcgaccacacacaccgggcaccccacagccccacccccccccccgcaccccccccacaccgcccacacgtcctcaccacatcacgcacccacctcaccaccccccaccgccacaacacacccaccccgcccacc

SEQ ID NO: 723141 - DNA, 237 bp, Homo sapiens
gatccggactatttcttcttccggcacagtcagcagctggaagaagatggcgctggtggacagcaaaggctttgatgagtacatcacggagctaggagtgggaatagctttgcgaaaaatgggcgcaatggccaagccaggattgtatcagtcacttgtgattggtaaaacacctcaccatataaaactgcagagcactattgaaaacaagcagagcttttcattgtaccccgagaa

SEQ ID NO: 723142 - DNA, 182 bp, Homo sapiens
tcaagcccccggggacattgggaaggggaccccccccccccccccccccctttttgccccgttttgtggaaaaaaaacccccccttagtctttaaaaagttttttttaaaacgggtttgggtttgggggggtttgttctttttattgaatccatttaagtaaaaaaaaaattggttctttta

SEQ ID NO: 723143 - DNA, 402 bp, Homo sapiens
cagtggcactttaacatcagcaaccgcattcaccgtgggagctgcggtcaggacacttgccttttcttcttgcttcgctttcgttcttcatccctgatcttccgctcagctcccttgtccacagcaagaccttgatctaggcagtaggcccggtgcacaggcttgttgctagcggttgtcgtccctatcggtatcaacttgaatgataagaggcaaacccttcactcccttctgggaaaagacatctgtgcttaagcagttcacagagatgaaaaccttagcttcatcgtaaatatcccatgtcaaggaaatggcgtaatacgcaaatctcctcgatgtatactgatagtattgaagctatctttatagtcagctatgtcaatgcatcttcgtatcgcggtg

SEQ ID NO: 723144 - DNA, 478 bp, Homo sapiens
gttaacattgttaacggtaacctcatcagaataaatgagcccgcgcattctcctgttagtgctttttatcgcctataaaggacattgaacttgtgacaaactggttcatggtgtagcacgttgtggtaatgtgtgcctaggtaagtccatgagccccacgtagttgcattgatcataaaaatctgtcttgaacttgctcttgttcagaacatcagtgtcagacaatgacacagagcataggccacccgcaggatctcatgattaaaggggacctctcccgcttcagaggccttgacgtactccaagatgagcttgacgcggctgtgcagcatcttgatggcgctgtgctgtgctatcaggtgttcagcctcagtggagttctctccactgcctgttgctgtcattcgggctacgtggtctacaccaatgcgttccgcttcctctgtggccagagtgtaggtcagctcagcaaacagca

SEQ ID NO: 723145 - DNA, 364 bp, Homo sapiens
ctctcgtggatccccttagctgcatctggtgcaacctagtctctactatatatcatacacacaattggctgggcatggtggtgggcgcctgtggtcccgtgctactcgggaggctgaggcaggacaatcgcttgggcctggaaggcggaggttgcggtgagccggggtcgcgccgctgaactccagacctggatgacagagtgagactttgtcacacacacacacacacacaaaaggtaaaggacttgaatagtcatttctctaaagaagacatacaactagccaataagcacacgacaagacgcttaacatcattagctatgagggaaatgcaaattaaaaccacaatgagataccatttcac

SEQ ID NO: 723146 - DNA, 928 bp, Homo sapiens
tcggttccaagcgctgttttgaccccttttgacccaaatagttctccgtaaatgccgggtgctctcccgggttttggctccccagcgtttgttaaggcccgttgtcttggacccacaaagtttcctctctcaaaaaagggtaatccccctctgtagaaattagcccacggggtccaaaaaaatggtcgactcgtaagttgttcaagcagattcaaaggcctccaacctgtgtaggccaaaattggactcttgttaaggttcctcttgaatggcgccaagatttaacagtgggtgtcctacacaacatcacgcggcgggtgtaagtagacatcctctttccatgcgggggtgaaaaaaggtttgctaaaagagattttggtgaagtcaacgtgtctctcgtcgcccccgggttgttgatcccccatctataggggccacctgccctttttgaatcagaaaagcagggggaccttccacacgccgtcataaaagtgtatgagtggttaaaaaacgtgcagtggcgttcatcaaaaaaaatccttgtaacaccgacatgtttttgtacagaacaaggggtgtgtaacccgcaaaggggcgagcttataagaagcccgctgtggtatatcccacccccccccatggggggagacttggcgctccatttctaaacggcctgtgtttgtatcccgcgattttttttttccttccgccgggcttgctaaattgataaaagaataattttatccgggggattgtctatgatcgcacacaccttgggtggagaagaaaacaaattgttgcaagtaggggaaaaaactgtgaggaacacaaattaaatctgcgatcggcgtcataaagaaaaaatataaccaaagtaatgcgggaatctctaccaagacataccacaactgacactctctcttcagga

SEQ ID NO: 723147 - DNA, 306 bp, Homo sapiens
  misc_feature (68)..(68): n is a, c, g, or t
tatgtttaattatatatgtaagtaatgatgtatgagattgagagagggatttggaataggttggattngaatgaggtaaaagaaagagtaattagaaggtttaggataaagacgcgagtaaaaatattgtcttaatacgttagtggaaccggtccatatggcatatataaaatatgcgagtaatatgttaaccgacaaagagacggggggggagagatagatgttggtttgggaggaacattacgggcgccggcgggtgaggggcagaacgttgagtatgtactttgtctaatcgtgtagatgcgg

SEQ ID NO: 723148 - DNA, 388 bp, Homo sapiens
cgaactggcgaccttctgaaggctgcttctatataatgtcaacatctctgctaataagaaaagactggggaggttctgtgggccactgggttctccactgagcaacccaccggagaagagaaggaattatatgtcccaagggaacaagatgctgctgagcttccacacagacttctccaacgcggagaatgggaccatcatgttctacaagggcttcctggccatactaccaagctgtggaccttgatgaatgtgcttcccggagcaaatcaggagaggaggatccccgggcccagtgccatcaccgtgtgtcactaactacgtcggaggcatacttctgtctcctgccgtccaggctatgagcttcacgaagacacgctgccctgcc

SEQ ID NO: 723149 - DNA, 274 bp, Homo sapiens
gttaattcttagccaaccaactcttgcgtggaagcatctacataggtctaccatcaagccccagaagagctgaagatgaccttgggctaccaagcctgtgatcggctgattggcctttgaccgaacatatcttttggagcgtgtacctgtcccacgtggagtcaggatgtagtcatctttgttaatttgtcctgcgaatgattgccatgttatatacactgattctcgtactcgctctacatgataccctagtctcgtgtgatacgagtcctct

SEQ ID NO: 723150 - DNA, 216 bp, Homo sapiens
ctgctcgatctctagcaggatccccgtatacgtgtggtacgcaactaagagcctagaaataaacccacacatctgtgtccatctgattctttacagacagatgctgaagggtatcagaatatgccactcccaaatgtgctgctttggcatagggattattctgagttgaaggcaactgagaagaagcagatgtatgaaaagctgcgaatcccagca

SEQ ID NO: 723151 - DNA, 186 bp, Homo sapiens
tacaatcatcaaagcaccaagctcaggatatacccaggattctctggggaaaaggcaaaagaagttggattgccatatatcagcatatgctgtgaaaactgatagtagctataaattagagattcacattattagttcaattcaaagtattagacagagggctacattgacaccattcctagatac

SEQ ID NO: 723152 - DNA, 332 bp, Homo sapiens
cacttggctatgcttttgaacgacgacgctgagataccgcgtacgcatttgcgaaaggctcattggcataaacgagagcagatatgtgcctctcggtagactatcttacaccgactgcacatttaaagctgctttgtttaagccaggcccagtggcatatacctgtagtcccagctacttgggaggctgagtcaagaggactgcttgagcctaggagttcaaggacagcctaggcaacataatgagagcccatccctgaaaaactttttttaaaaaataatgtgttaaatgtctgtcttacctgcttcatataatatcatagaaaatatctg

SEQ ID NO: 723153 - DNA, 119 bp, Homo sapiens
tcgatggctaggaggatcggcccaggcagaggtttgacttgcttcttatcagcagctagtccagctcttcttaccgatgtatcaggttcgtactcgttggtaccggagcgcgaattcgt

SEQ ID NO: 723154 - DNA, 302 bp, Homo sapiens
ttgccccccccccccccttttccccccctttccccccccccgggggggtttttttttggggggggggggggtggttttgtttccccccgtttttaccaaggggggccccggccctggttgggccaaaaacctttttcccaattcccttgggggggggttggcccccccccccagttttttgggggtttttttttaaggtttttgggtttttttttggcccccccttttttttccccccctcccctttttcgggggggggccttttgtttttaaaaaaaaaaccctttttttggggccgggga

SEQ ID NO: 723155 - DNA, 1491 bp, Homo sapiens
  misc_feature (20)..(20): n is a, c, g, or t
  misc_feature (36)..(36): n is a, c, g, or t
  misc_feature (43)..(43): n is a, c, g, or t
  misc_feature (48)..(48): n is a, c, g, or t
  misc_feature (73)..(73): n is a, c, g, or t
  misc_feature (87)..(88): n is a, c, g, or t
  misc_feature (101)..(102): n is a, c, g, or t
  misc_feature (115)..(115): n is a, c, g, or t
  misc_feature (126)..(127): n is a, c, g, or t
  misc_feature (137)..(137): n is a, c, g, or t
  misc_feature (232)..(232): n is a, c, g, or t
  misc_feature (238)..(238): n is a, c, g, or t
  misc_feature (266)..(267): n is a, c, g, or t
  misc_feature (284)..(284): n is a, c, g, or t
  misc_feature (287)..(287): n is a, c, g, or t
  misc_feature (323)..(323): n is a, c, g, or t
  misc_feature (332)..(333): n is a, c, g, or t
  misc_feature (354)..(354): n is a, c, g, or t
  misc_feature (356)..(358): n is a, c, g, or t
  misc_feature (363)..(363): n is a, c, g, or t
  misc_feature (372)..(372): n is a, c, g, or t
  misc_feature (376)..(376): n is a, c, g, or t
tcttggtccaaaattttatnaaagggtcttataaanagcaacntccanactccaaaatacagttgccaagganacccggtaatggcnnggggggacgggtnnggggcatgtggcngggggctctcnnggctttcccnccctttcgtggtccgtgaaagtggggggtgggtgggcagatattcctcttctctttggggttctccacaatgtgcctcacgtgtggctcagggcnggggcntctttatagggccaattctttaccacgnntgtgggtctcccagggncangcatgtgatctctttcccctgtgtgagtgccacagnacacacccnngtgtgtctgtgagccaacacncnnngtggncgcacacgncagnggtgtctcacacgcgataagaacgtgtataaacgaggggtcttctcgcgcgcgtggtggatctctaatcgagcggcacatctcacacacacaaacttttcgatgtgagcatcttatagccgcctctctgtgtgtctctctccggagagtgtttctccacgaggaaacacacaacaaaagctctctcggacgagactctgtgtgggggccccccaactctctctcccagagtgagagtggaaaacacgcggcagaggcgcacacaccagatatagcacgaggccccctctcgcggccacagagcgcaaagagcgcccctctctctaaaagagagagtgtctggtgatcacacaggcggaagaagagacactctctgtgcgctgtgcgcgccacagatggtgcggcccacacacagagacactctctctcttagtgtggcgcccccacccctatgtctatcgcaggccatataaaagaggctctcttataaccagctggtgtcgccctctggtgtgagaaaagaggcccaaaaaccctctctatctctgtggaacactataccaagagacgagctctcgaggtcttttccgccgaaaaaatcgcgcacgcggagaccccttttttttttacagcccgagagagaacaccttttttcgtgggtgtttcccgtgggggtgggactctacaagaaattaccagtggccattttgcaggacgtcccggggcattcgggcgtgggttaacccttcgggccaccctttcaaaagttttccgcgaggagaggtgttacgccccatattctttacgaagccacaaagctcttcccgagaagtttaaacaaaacaccgcttcatcttagcaaggtaccaacgcctatctggaacacagaaatcgccccacatcagagcggggaaacaaaaaactttccccctacattcctgtggcgagcaaaattagggcgccctcgtgggcgcccagaaattatctggcaccaccccaggggggcctgtggcgataaccctttatgggacacccggctaaacaaagataacagtagggcgccagcgacgagattaaacacacagcgcccggcgactatcgtgggcgcaccacaag

SEQ ID NO: 723156 - DNA, 295 bp, Homo sapiens
agctgaggagcgacaggcagtgatttgtgggtagcattatgcactttgtccatcaaaagctgtagctcggtatcttgttcgatctgtataagtaccaagggtttgttaacttaccagctagttggacaatacatgggtatgtcctctatctacatggcagcagcagcctcaggtactttctcgtcgatggtatgctcaacattatgctcggccatcatgagcgtcaagggtgcctcctctgtgacgccagagaggtcagatccagtgttagagaccttagtgatgagcagttgac

SEQ ID NO: 723157 - DNA, 343 bp, Homo sapiens
catcagccatcacaagagcatccatggagtggccttcaaaatgcgtgcgcctcgggcactcaaatagcttcggaaatgtgccatgaaggagatcggtgctccagatgtgcgcatcgccatcaggctcatcaaagctgtctgggccgaaggagtaagcaatgttccattacaaatccgtgttcggctgtccagacgacgtaatgaggatgacggttcggcaaataaggtatagtcgttggttacctatgtgcctgagatcacgttcaaggctctgcgtaccgtcactgtggattcgatctaatctctgatcgtcgcatcaaataaagttataaatctgcggtcc

SEQ ID NO: 723158 - DNA, 378 bp, Homo sapiens
cacgaggcctcgtgccgaggccgcctcacgccccttctcgaaagagcgcgacggcttcgtgatggccgagggcgcgggcgcccttgtactcgaatcctatcaatccgctgttgcccgcggcgcggagatcctgggcgtcgtgcgcggatgcggcgaaaaagccgacgactaccaccgcacccgctccaagccggacggcacggccatcatcggcgcgatccgcaacgcccttctggacgcgggcgcggcaccggaggaaatcgactacgtcaacgcccacggcaccagcacgcctgagaacgacaagatggaatatctgtcgctcaaagccgtgctcggagaccaccttgcttcaacgccggtcagctcgaacaagtc

SEQ ID NO: 723159 - DNA, 748 bp, Homo sapiens
  misc_feature (8)..(8): n is a, c, g, or t
  misc_feature (10)..(10): n is a, c, g, or t
  misc_feature (168)..(168): n is a, c, g, or t
  misc_feature (503)..(503): n is a, c, g, or t
  misc_feature (551)..(551): n is a, c, g, or t
ggagggtngngggcatgatttcctgccaatatcagaagtttcacaggcttcttgtgtatccataaacacccatcccattaagacgcctagaaaacctggccctccccaagcctttattgaccgcttgtgaatgatcccagggtgtgtctgaccaacagctcttcctgnagggagacaagtctctcctaggtatttggttatcaacctcaaccatttgctcagccttccccaagaccaggcacctcggcagagatttctgggttgtcaggcagaaccgagcattcaagggtgataactcactggagtccctgaaatccctgattaacgcaccaggtctgtagaggtgcatccacgttgcaggtattttcccttcttgctgaggagaaacctgggtttctcagctttggcacagtcacaacacttggggtcagaccattcatggtggtggtggtggggccgtcccgtgtattgtaggatggttagcagcatctctggtctccatnctctaggtgccactctaccctcccagctatggctaccccagatgtctncagacggtttcaaatgtcatggagcaagggagtgctggactacacaggctgaagctttctctgccgagatatagatattttcctggtgacaatctttcaagctgacatgaagacatggccaccactggaacgggggtgtgctgccctggccgtttgtaattgtgaggaagctctgaggaagcatgggttgcattttt

SEQ ID NO: 723160 - DNA, 139 bp, Homo sapiens
ggctgtgtctctctatttctgtatcatgccatctccctcagcactagcatagtgccagtgcttcacttggtgctgggttcatatctgtcaagctgatgtattatcacacacttttaaagggtttaatgatattgtttta

SEQ ID NO: 723161 - DNA, 802 bp, Homo sapiens
  misc_feature (8)..(8): n is a, c, g, or t
  misc_feature (10)..(10): n is a, c, g, or t
  misc_feature (168)..(168): n is a, c, g, or t
  misc_feature (557)..(557): n is a, c, g, or t
  misc_feature (605)..(605): n is a, c, g, or t
ggagggtngngggcatgatttcctgccaatatcagaagtttcacaggcttcttgtgtatccataaacacccatcccattaagacgcctagaaaacctggccctccccaagcctttattgaccgcttgtgaatgatcccagggtgtgtctgaccaacagctcttcctgnagggagacaagtctctcctaggtatttggttatcaacctcaaccatttgctcagccttccccaagaccaggcacctcggcagagatttctgggttgtcaggcagaaccgagcattcaagggtgataactcactggagtccctgaaatccctgattaacgcaccaggtaaaagcatccagggttgaaaccagatcaggaaggttattgtcagcctggggctcctgtagaggtgcatccacgttgcaggtattttcccttcttgctgaggagaaacctgggtttctcagctttggcacagtcacaacacttggggtcagaccattcatggtggtggtggtggggccgtcccgtgtattgtaggatggttagcagcatctctggtctccatnctctaggtgccactctaccctcccagctatggctaccccagatgtctncagacggtttcaaatgtcatggagcaagggagtgctggactacacaggctgaagctttctctgccgagatatagatattttcctggtgacaatctttcaagctgacatgaagacatggccaccactggaacgggggtgtgctgccctggccgtttgtaattgtgaggaagctctgaggaagcatgggttgcattttt

SEQ ID NO: 723162 - DNA, 232 bp, Homo sapiens
  misc_feature (3)..(3): n is a, c, g, or t
tantggctcgagcgctagcggctgagcaataccttcaaccccttactatagagttcatccaggaaggccatgaaaggagggacgctacacgtgtcctggcaggaaaacaaaagttgacgatgaaaaaaaattcaggagtcagctctgacaatgaagatgatgatgatgaagaagaggggaataacccttcatccctctctctttgcctccaagaggtgtacccattcgagag

SEQ ID NO: 723163 - DNA, 497 bp, Homo sapiens
  misc_feature (1)..(1): n is a, c, g, or t
  misc_feature (36)..(36): n is a, c, g, or t
  misc_feature (54)..(54): n is a, c, g, or t
  misc_feature (63)..(64): n is a, c, g, or t
  misc_feature (71)..(71): n is a, c, g, or t
  misc_feature (100)..(100): n is a, c, g, or t
  misc_feature (178)..(178): n is a, c, g, or t
  misc_feature (245)..(245): n is a, c, g, or t
  misc_feature (265)..(265): n is a, c, g, or t
nccgcgggcgctccctggtggtgcacttgaagactncagttagtaaagagtctncccgagctnnaagaggncctcaccagcatcgacagtgttaaagacnggcttcgagttaaggagattggcgcacctgtctggcgaaggggacgatgattcctgacctgcgtcgcgagttccgatnggagttactggactagcattaccctccaatcgggcaccactccttcagggcgctgagacctattaantctatttactatttgttganttatttttccgtcagttatgtaaataaactactcttcttcctcccctgattattgccattagcctttaaatctaaacaaattataatgcatcatctatttaggagttagatttggatgtgctattgtatgattacgaatagtctgtatgtttcaagcccttctgtaaaatatgaagaaaagtgctcttagcattctgtgtaaaactgtactgttaaatatatgtgtgtaacc

SEQ ID NO: 723164 - DNA, 628 bp, Homo sapiens
  misc_feature (445)..(445): n is a, c, g, or t
acaaaacaccccctgccgacccttgttgtgaaccttacgggcccacggcaaaatggcccaatgggagccctcgcaaaaaccgggtttgtggcattggaaaattcgcccttacaggggaggaatttttgtcacacatctaaatgagaaatcagtgcccacaagtctttgaaaggggggtagggatttccccttccttattatccctaatcttttaaccaactcccgggaaatccaattaccaattttcccccataaaaaagaagggggccctgaatatttttgggtaaaataaagggtttaaaacggcttttggccccagctggggggctattattacaaaaatgggtaaatcataaacccttcttcccccccccattttttttcgggggggggcatcaaaacaagggtttaaaccccttgggcccgtgggttccaaaagcttggnggggtttagggtgttttggccccccaaggactgttgggcaataatttgttttggccccccccgggaaaggaaaaaaggggccccttttgaggttaaaacccccccccttttgtttttgtttggcattttttgtttttaaccccccggggggggttaaaaggcattaaaataaaccccagggta

SEQ ID NO: 723165 - DNA, 411 bp, Homo sapiens
  misc_feature (8)..(8): n is a, c, g, or t
  misc_feature (388)..(388): n is a, c, g, or t
ttcggcanagggtaactgaggaatcacaaaagaagtgaaaatgccctgttcttgccttaactgatgacattaccttgtgaaattccttctcctggctcatcctggctcaaaagctcccccactgagcaccttgtgactcccacccctgccagccagagaacaaccccctttgactgtaattttccattacccaaatcctataaaacagctccaccccatctcccttcattgactctctttttgaactcagcctgcctgtacccaggtgataaaaagctttattgctcacacaaagactgtttggtggtctcttcacaaggacgcaagtgaaattattatttaaggccttccaacatatctaatatctggaaccttcaactctttcatnttactaggcttaaatggacatca

SEQ ID NO: 723166 - DNA, 104 bp, Homo sapiens
gcggccgcctactactactgctcgaattcaagcttctaacgatgtacggggacatgttcttattttagacctgttttgtaaataaagctgtttcccaagaaaaa

SEQ ID NO: 723167 - DNA, 306 bp, Homo sapiens
  misc_feature (71)..(71): n is a, c, g, or t
gagaggattcctccaaaaggccagaaagatccttggaggaaaaatggaaatattaataatatatcctttanttttgatgggaggccaccaatgacctggaataccattttggccaaggacctccagaattggaccaccatgaatttggccagtcccattttatgaaattatatctccaataaaattgatttaaaatataattgataaaaagatatatgtatatatatacttgatatgtatatgtatttacgtgtgtctatatatttgattttccaatatttacgtgtgtctatatatttgattttc

SEQ ID NO: 723168 - DNA, 268 bp, Homo sapiens
ccacactttggagccagcgggtggatcacttagatcaggagtcaagatcagttggacaacatggcaaaaccctgtctctacaaaaaattagctgggtgtggtggcacgcacctgtaatcccagctgctctggaggctgaggcatgcgacgcttgaacccaggaggcggaggttgcagtgatccaagatcgcaccactgcactccagcctggaagaccaaacgagactctgtatcaaaaaataataataattaataaagttttactgga

SEQ ID NO: 723169 - DNA, 462 bp, Homo sapiens
gtacacataaatcattcattactcattacctgaaagtagaagtaaaatagtaaacagagagataataaccataacttctagagctagtattccgaatgatctctatatacattagattttactgtaccaagataacctatagatttatccaccttgtcaagcatatttagaagaaccaggactaccttctgaaaagcagtcaagtcacatgatgaaaggggctacatcagtataaagaagaatacgtggtggcatgcccttctggaacttatatgatctaatcaaggttgtaggaaagaggactgcagctaaatgatccacagccagtacccaacttccctcaaaatgcgcttctgctttacaataatactcatatctgtcttcaaaacttaagatattatctgccaaggttgacgtgtgtgcagcccataagtacttcaacagatcatcaaacttcctaaa

SEQ ID NO: 723170 - DNA, 81 bp, Homo sapiens
tttgaccatctcgggaagtgaggagagcccccattggaccagtgtttgcttagtgtcttcactgtattttctttaaaaaaa

SEQ ID NO: 723171 - DNA, 339 bp, Homo sapiens
atgggtcacaataaggaagggtccccaggttggggagagccccaagttgagaacaataatgaacaattagtgtatgaacaacttgttagaaacagcgtaatcacaaacaacctgcgggcacaatgacctcattccacacgtagcacccttcagacaggaccctataaaactttcctccagcccttgcctctttgcaggtagccccttctctgctgagctgcccactgcaacatattttcacaatggcatctagtaatgtatgcccttcgtttgactacaaatatcttggtgaatggctttaccacctgcaaaactgaccctaggttgtcgctacccaca

SEQ ID NO: 723172 - DNA, 449 bp, Homo sapiens
ggtaccggactatcttggtgtgttgctccattcctagcttgggagcttccgcttagaggtccttgtcgcctcgtgctacagctgccacgggctctcctgggcttattgtccggtcacaacctcagtgtgactccacagtggcccctgtagcccgggcaacgacagagagcatgtctctctgcagtctgttctctagaggaactcaacgttgggttgccacgaaaaatgtgcttcattccccccgtgcgtttaatttctagcacgaccgctatgaagacatttccaaaatcctgtgatggctagacaaatgatccttaaagaaggtgtggtgtctttcgcaagctgagcgatttctgaccggttcacacgttcaatattgaatgtttcataagcatgtgacggttcccagcacaccgtggaaggtccggcgtgtcctcctcaggatgccg

SEQ ID NO: 723173 - DNA, 163 bp, Homo sapiens
gttctggcagagaggcgacaatgtggcgcgacagacttgtcgtaacggactggtgagggctctcggtgtgttgggccagttggcaccaaacgtgggtgcctctcagcgttcccgcttgcgtgggccacgcctggactgacagcgaagggagcaggtactagcc

SEQ ID NO: 723174 - DNA, 490 bp, Homo sapiens
  misc_feature (490)..(490): n is a, c, g, or t
caacagagcgaggctctgtcttccaaacaaagcggagattatctgcgagaatgactgcattggcccctggggtgggagggcttctccagggcaaggagaggggatgcccactgctgggagtgctgcctggaaaggagtcaattccagtggcgggggccctgggttttggctgaggactgcgtgttggcagctgatctgccttttacagaccttcccaactgcacacgttgtgagcgtcagtgtgcaatcacaggcctgcctcctttgggccactttgtgaccatgttttttgcttgtggggcagggtaatttcaggatctaaattggtgcagttggatgttttcacccccgagaggcagcttttcccgttgtaggcttttttgttttgttttgtagaaatggagtcctacgatggtggcccaggctggtctcattacccggcattgagccactggggcccggctggatttttctggccttttttttggcn

SEQ ID NO: 723175 - DNA, 106 bp, Homo sapiens
atagccctgagcacgccaggatgggtaggcgatagtccatagtggcgatggcacgctgcacctggcgtggacctgagccgcattctgaacgagatgcgtgaccacg

SEQ ID NO: 723176 - DNA, 484 bp, Homo sapiens
  misc_feature (23)..(23): n is a, c, g, or t
tttattttcttttgcccttttanaaaccaggggggtgttctcttggccccctatttggaatctattaagaagggttttttttttcccccaaaggggatgggtcctgttccaaaaggaatgcccccccagtgttcccatggcaaaactggaagagtttccaatttttccccccctcctgttggccttgttgtaaccaaaccagttaagggcaagatttttccccaaaaaattaatgggggttttgggccccttaagccctttaaaacccgagatagcttccttaaacgtgtgaaggaaaatgttccgaaaaaaaaaaaaccccaaaaaaaaggtccctgggtttaattaaagcgcccccctgctccccccaaaaaagccccctttttgaaacccaatgggaaggggcctgagctgctggacccttttccctttgatttcttggcttattgggtgtttaaaaaaaaaataaaggccctttgggcta

SEQ ID NO: 723177 - DNA, 218 bp, Homo sapiens
  misc_feature (81)..(81): n is a, c, g, or t
tcagctgctactaagattatgagcattagcgttcactgacaaagaactccagcagaaagtctgcacatgtgaccgtgtctnggggcccccaaaagcgaggctgtgcttgggacacacaaattacagatcatcacggggaattctgctgctgttattaccccattcaagttgacaactgaggccacgcagactccagtctccaataagaaacagtgttg

SEQ ID NO: 723178 - DNA, 285 bp, Homo sapiens
tctgcatgtcatctctaaagatccccgtcttactactcactcttattaactaactgtatataatctcccaatttcatgttttactttttgctttaatcaactaaaagttaaattgctgtataaatatttacttttactcatattttgattttataatactgtttaccaagtccgtgatgtaaacaacccttggggcaagaaaggcatgctctctacaggtctcattgctatattgagaggggcggctaatgtcataggtgtgggtagattcattggagatgtgat

SEQ ID NO: 723179 - DNA, 118 bp, Homo sapiens
ctcctatcaacagcatcattaatgtataatatacactgatactttaaaacttgtgtggaacaaactaacttataattgaggtatcacgacacacctggaatatgtagtatctgttcct

SEQ ID NO: 723180 - DNA, 723 bp, Homo sapiens
aggaccgacctaatcccagcaatggtgtggagtgcagcacatacacttgtaaccgagccaccattctggctccaaggctgcattctctccactggatctaagcgagagggttgtcacgcgttttgctcctgggctctgccttccggctgcattattttgaactcctagctctgcgatggacctattcctctggctgctgtcgcttctcttctttcctggttactggggactctggaccacgtgtaattgactatagtctttgtcgcatgctagccaagctgtcttggctctgatttttgctcacttttcagtctttattcattgctatactctcacgcatatctcactatatcttatgtgagcttctgtcaccgctgttgttcattgctagcgctatcctatctcatccattctttgatttttatacttttgcaactctctgcgttaactctttctgtcctctgcctctgttataggcctattcgcctcatctaatacatcatgacaaattttatatatgttgtaatgtctacacaccacttatcttacatcatcatcgatctcttccgcatttgttcttttgcacatctgctgcagagtctttcatcatctgccaccgacatacatcttcttgcgacgttcatgcgctatttccacttttcagctctacacgacacactccttttctctctctccttattctttattctttcattttcatga

SEQ ID NO: 723181 - DNA, 162 bp, Homo sapiens
aataatggagtaatgcattgcttttgtcgaagatgagttttgttttgttttgccttttgccttttctagggccgttcccgcagcatatggaggttcccaggccaggggtcgaatcggagctatagccgccggcctatgccagagccatagcaacgcgggatc

SEQ ID NO: 723182 - DNA, 493 bp, Homo sapiens
gctggggcagagtacacaaggaaataacaaatttggaaaagtatgcgcccctcccccaccctgcccccaaagctgattgcatatcttggaggaagtctccatttggtagtaaagatgtttgctgagttgctgcaggtcagggtgatgtggggcaaacaagcccccagactggggcttaacccaggagggttcttggctttgccaggaaagaatttaagggtgagccagtagtgagagaaagaaacttttattgaaccagtgctgcttcttgctgagcagggctaacccataggcagtgtgcccagaatcggtgtctgtgagctgctagctagatgtttatatctgttattaattacatgctaattaagaggcaggttatttagaactttctggaaaaggggctggaagtttctgggaatcagataaggtaacttctaggctgttgccatggcatttgtaaactgccatggcactggtaggagtgtctttatgc

SEQ ID NO: 723183 - DNA, 232 bp, Homo sapiens
attttcgggcacgtctcgagagttgaacacatctgctctcccagacttctctggtggagatctggaagaacacccagtccgcacgcaggcaaggcactcaccaggtcaggtacctatgtggacaaggcaacagcatcaacaccccagaaggatccttcccacgagggcagcccaggcaggccgctcagcaacagacgtgcagacctaacgccaggtatgtagcgggatgccg

SEQ ID NO: 723184 - DNA, 338 bp, Homo sapiens
aggggaaccacacacactagggcctgttgaaggccggtgtgaggagagggagagcatcaggaggaataactaatgtacgctgttcttagtacataggtgatgggatgatctgtgcagcaagccattgtgacataagtttacctacataacaaatgtgcacatcgtgtacatgtacctctgaacttaaaaggtaaaataaaattaatatgctaaaaagtaaataactaaattcatgtgttatatactctgttaaaaaaagttatgtatgctcatagaaagatgaaagagtataaacagtataaagattcatttgttcatatatagtcagaacgtagact

SEQ ID NO: 723185 - DNA, 191 bp, Homo sapiens
  misc_feature (9)..(9): n is a, c, g, or t
  misc_feature (12)..(12): n is a, c, g, or t
  misc_feature (49)..(49): n is a, c, g, or t
caggtgcgncancctccgcccatccccaggggccgcctcccccggggcnacacacggctgctgacgacctataaaggccgccaggttttctcaatgaagccgggacgcactccggagcgcactgcgtggtcgcaccctacccgggctgccttggaagtcgtccccgccgcccctccgcaccggcatgaagc

SEQ ID NO: 723186 - DNA, 376 bp, Homo sapiens
gtgataaatgacagttaaatatcttggtggtgaggattcacaggtagcacacttattcgtgcactcatgggggtgtgtacattaaacatgcacagctttttatatattaatcatacctcaataaagtggtttaaattttttttttttttggagacagagtctcactctgtcgcccaggttgaagggcagtggcgtgatctcggctcactgcagactctgcctcccaagttcatgccattctcctgcctcacgctcccgagtagctgggactacaggcacccgccaccacgcccggttaatttttggtctctcctcaggtcacaatggcatcttcttgtgtgtccttagagcttcacagcttaagtgtggggcgggt

SEQ ID NO: 723187 - DNA, 835 bp, Homo sapiens
ggggagcgaaaaccatcgtgttcggtgacatgatcctcagcgccgactgagcctctaaagcgacttcagctctgccccaccaacaccagccgcgctgcccggtgaacagccggctccgtggaagaacacctgaggggactgcggggggcacgacgtggacacgctgacggtgacgcggacggaccgcgacgagacacacacgcgcagagcagcgctgacgggccgcggggttgccacggacgacgggcgccctgcggacccagcatacgctgggcacggacacgtgtcccgggagaccccagggcgccgggacctggaacgggaccgacactcccgaggactcggcgcttcggccagcactcacagacccgaccgacacgcgggacgtcctcctcgacactaccctccgcgacacgacggacgcgccgacagccgatacggggacccagcacacgcccaccacgactcccgcacccgacacgtcggacacacccgatacgccgcacaccccaggcggcgccacccgcgcccacaacaaaacgacgatggaccagacagcgccgacctggatacgaacaaccacgcaacaaaccggcaagcacacgcaccactccacacacataagcggaccctcacacacccgcgcccaacaaacgggccccggaacagcacaaaccgctaggcgtggaaggcacacagacggacgaacaaccgccagcagcgcacccgaccgacacaaacaggggcacaagcaacggaaagcagcacggccacgagaagacaacgccgcgcaccacgagcaggggcaccaagcacacgcaaaccagaccacaaa

SEQ ID NO: 723188 - DNA, 656 bp, Homo sapiens
tttcttatgtcgtttaaggcacggttaccccaagcctatgttgcccaacatgtgactaccaaccctagccgcctttatgccaatcgagccctcaggcctgcatttatgtggtagaacgcgcttgacacattgattgaagctctgcttccaggtaagcaaacttattcagtggtgtgtgcaaacacccttcacctgccatgaccaagagtgccccctctgttacgggtgcgaggcgcagtcattggagagttcaaagacctaagccttggtgactttaagacataatctctggtgctttccttctatcctgtccattccacctatgtgtgccctacattcaccgcctgtcggactgccaccgctaccgattctcacgacgccaaacggagaacctctgacaatgccaaatatcttgccacttttgtgtagacctcatccttcccaccaccaagtttggatcgctggccgcgggcccccagatcccccgctttcttcgagagtcctatcccacccgcaaaacctcgagccaccttgccactctttgaaagttgttgtctttctcacctcccccgccccactccgcgctccttccacttcccccacccgttcccttgttctcccccccaagcttctcttccggcgccaccacataaaaa

SEQ ID NO: 723189 - DNA, 304 bp, Homo sapiens
  misc_feature (73)..(73): n is a, c, g, or t
ttccccaggaagccccgggccccccaaaagggagacagttttttttaaaaatttaaattggcccccccccttnccgggccggtttttcccctccggaacgtttttaaaaaggaaaaagcccgggttttcccttgggaaaaaaaaaattttaaaccctttctttttttccgtttggcccgggcccacccccggttttttggcattcgggccaaaaaaacccaggaaccccccaacccggtttttttaaaaaaaaaataaaccccccctgggggcttggaatccgtcggccgtccttttgggtcca

SEQ ID NO: 723190 - DNA, 117 bp, Homo sapiens
tggtccgctacgtgttctgttcggcgctgggcatcgagctgcgcgcgtctcgcgcgaaatggcccatgacgacaacgccgaactgatcaacgaccgtaccgcgctggccgccggcga

SEQ ID NO: 723191 - DNA, 490 bp, Homo sapiens
ctccatcagattttgacccttaccacttaaatactgtcaaaaagaaatgttccaaacaaaactttttttagtccccacacccctcacctcctgtgttgcttttacagtcatgatgaaaaaaaaatgaaaagcttatttgccgttctgagttaataatgtacgagttagcctatagattctctcttaaccttcgcgggactttttacgagagttttgtttgcatggacggcagaccccagcgtgtttgtcctcttgtgtgcatgatccataaagtaaaactgctctctctgttcatctgagcattgtggcagtgcttgagagctccactgtacacatgagaacaaatccgaagtctgttttcatctctctctttttttttgttgcttattttttgtaacctaagttgtgtttgacattgttggaccctgcagaaatgtctgactttgaagaaagtcacattaaattgaaagaaaaatgtctcaaaaaaaaa

SEQ ID NO: 723192 - DNA, 211 bp, Homo sapiens
tgatctacggatccttggtgagcagctgacagaaagacaaaagaattactatttaacagaaaatgagtaacaacaatggtaatagtaaatactttcctgtaacaattactttaaatgtgaatggattaagttcaccaattaaaagatataaagctgattaaatggatttttaaaaaatcatcacccaattatatgctgccagctagctcag

SEQ ID NO: 723193 - DNA, 982 bp, Homo sapiens
agcgggtgttgagaagcgttccagcacgccgatgatgcccgggggtatcctcggatactagtggtacacccttcccctccgctctcatccggagagccgatgtgcatccagcctgaggctacggatcttgctgaacacgggatttacacatatccaggtccccgtgggccttagcagtccatgttcatggaaactaggatggctattgtggtaggttggctagcgtcaaatcaaccggaagagcgagaccattgagacgcatgctcggggcccaaattgtgatccataagggagcccttgcagaaccgaaggattgagatgcagtcacctagtgggccgacctgtggcatccccatcctccgcgtaatctgccataacatggcattagtctcttccagaaatacatgcgggagaggggattgcgcaaaaggcctagaggaatcaagggctcgtcgaatgatatcatactttgagacgagttctgtggcccaagatatagtaacaacgtatatatggattgtgcccccggtgttgtgtccaagaaccaaggtggatgaagagttctccacagacaggactgtgatataaactttactgttgatagcccggtcggggcgtcggggtggccttaagccatgataggtccccagacatcttttgtggaggggcccgaaggaccggggcgcaacctcgacatagggtcattgaagtttcgaacggcaggcttggtgcgctagtgggttgatggccccggctcgtgctagagggcttcagcaagttggccgcgggttggcggcgtgctgcgtgtggggccccagctgctctgggagggcttggggcggggccaagggttggggctccgggggggggcccgcccttcgtgggcccccacggggctgtgccctccaaccctgggaggctcgggcccagcgcgggtcgttctggggcgggcatttagtttgggttaccttttggccgccga

SEQ ID NO: 723194 - DNA, 214 bp, Homo sapiens
acagaacctgccgacctgctactaagcatgcaatcaggttccaagtgatcaaacaagttcctagtgaccagagtcctcccatgctgacacattcccacccaataacagttttgttgagagtggagtccaagctggaccctgtgaagtatgttgtcccctacctgtttgttggctcccagaggggtgtgtaagcttggccatggacagttaccgg

SEQ ID NO: 723195 - DNA, 932 bp, Homo sapiens
tataaatgggtcccatagtggtgtttatagaagactgtgagagatggtcaccgcaacatgttcccccggcggggccctagtgtaatattatctccacggcaatataaagcctccggtgagcaccctgtttccggccccccaccggcctggggattagagccccaagggggtgagaagcaaaccaagacctgggtctgttgtcccgcgaaaaagcgcttgtttttaaactgcagaaatggccaaagacccggtgacaccaccccggggcacacatcacccgcgttcaaaagtgcgcaaacccaacgtgggttaacccaagagagggttgttggcccttttgtgctctgaaaaaaagggtgtccccaaaaattttgtggcccccgcgccctactccagacgctgttagaaaatatttctcggtgctccgtcgcgcccttgtcgcggtctcaaaacaccttgtcgttcaattcaaaagcgattaatactggttgtccgccccgcaggtagatcccagcatcattttctttgtacacacgcaccagacacactaagtttctttttaagaagggaaaaaaaataccccgcgttttaaacccactaccagttcctactgacccccattgttaaattgaaccttcagagagccgcactaatccccgcttggtaacatcatcttcaagattaccatattattagcgtggttttcttccctctcaatttttcttaataaagcctcatcataacattcctaaataaccttaacaaaaccaccacttcgggaaaactatcaagtcccactcgctggtctttataaaaaaaccacacaacatgttcctctcttacttttgcatcgaccacattcctctcttttaccaaccctcaaataatataatctcccccaagcccctttcgggccaaacccacaaaaaaac

SEQ ID NO: 723196 - DNA, 524 bp, Homo sapiens
tcactttataaatctcgttctgtcaacactgtacattaccttttacctactttactacagtatatatacatactcatatctgtactcctattaagaatacaaataaacaaatttacccactttaaaattctactgtagactaaccttgcctttccccaaaaatcagatataaaacatcaatttcttaagataatgaggtctatataggaagaaagcccctttaagatttagtcctggatatcctaaggattggggtgtactgaattaggccctaggtctaaagttagctatgcctggcaaatagaaggcgtatgaaaaagtatttttggttattcaaaaccatacattctcaaagtccatggaatatcttgctagtgattcctctttgcatatgtgatttacattttaaatattcaattattattcccagaattccttataccaacagctaaatttttttagatacttttttttcaattttctgtactcctcagatcacagtaagttgctagcatacatttcca

SEQ ID NO: 723197 - DNA, 147 bp, Homo sapiens
cagggttttaaaactctctgaagtttttatttacccagcgctctggctcccacttctgttttaaaagattataagtaaatactctgctctttcaagtgaaccaaacctatcaaacctgtttagaaaataaaccaggtatgtttcaaa

SEQ ID NO: 723198 - DNA, 109 bp, Homo sapiens
ttgagatacagctagctcccgggaaggttcaactatgagagctttcggagcattggggagaaactttgttagtgtcacctgatgcattacctgatgtgcgtcgtgattt

SEQ ID NO: 723199 - DNA, 669 bp, Homo sapiens
  misc_feature (5)..(5): n is a, c, g, or t
  misc_feature (99)..(101): n is a, c, g, or t
  misc_feature (103)..(103): n is a, c, g, or t
  misc_feature (106)..(106): n is a, c, g, or t
  misc_feature (108)..(109): n is a, c, g, or t
  misc_feature (113)..(113): n is a, c, g, or t
  misc_feature (115)..(115): n is a, c, g, or t
  misc_feature (117)..(117): n is a, c, g, or t
  misc_feature (119)..(120): n is a, c, g, or t
  misc_feature (122)..(122): n is a, c, g, or t
  misc_feature (129)..(129): n is a, c, g, or t
  misc_feature (132)..(132): n is a, c, g, or t
  misc_feature (137)..(137): n is a, c, g, or t
  misc_feature (147)..(147): n is a, c, g, or t
  misc_feature (289)..(289): n is a, c, g, or t
  misc_feature (329)..(329): n is a, c, g, or t
  misc_feature (340)..(341): n is a, c, g, or t
  misc_feature (511)..(511): n is a, c, g, or t
  misc_feature (524)..(524): n is a, c, g, or t
  misc_feature (538)..(538): n is a, c, g, or t
  misc_feature (541)..(541): n is a, c, g, or t
  misc_feature (552)..(552): n is a, c, g, or t
  misc_feature (558)..(558): n is a, c, g, or t
  misc_feature (575)..(575): n is a, c, g, or t
  misc_feature (584)..(584): n is a, c, g, or t
  misc_feature (665)..(665): n is a, c, g, or t
gtgangtaagataatgtcccccaccctccttttaggtctgactcctttttaagtggcttcccctcaataaatgataagcatcaaccctttcccacccannntnccnanngtanangnannancgagttnatnaagtnctctgaaaangatagtgcagcggctctagccaccgtgcgtgctctgccctggctctgaagggcctgaccctgggctgcacccccttgctggggatggaagaccattcagtactcagccctacaccagggcatctacccaggaagataggagnacagagtgtgagaggggctgtgtcaccctgtcaggtcacnaacaggaggtnncaatggatgcggtgacacaccagtgggagctgctggctgcgcgccttgcagcccactccgccaaactgggctacccaggcatcgcaggcattctggccctggagctcagggaggcagccctgagagtcggagcagggaaccacaggcgctacgctggcgcgcttcgcagngtttatagcgcanaagcacgcgcttanacntgcgcgcaacngggcanagcggcacgcgcaagtnctcctgtgncatggcagctcaatgtttacttgtgtgtggcatgtgctgtgttagaggggtaaggctgcagggggggcactgctgtgccancgca

SEQ ID NO: 723200 - DNA, 120 bp, Homo sapiens
acacggcgtcgaactgccactacagggaagccccgtggctgaccgcgcttttaacgcctttgtcgtcttcgtaaggagcataccctggtttatctctagcaggctcatgcaaccactctg

SEQ ID NO: 723201 - DNA, 333 bp, Homo sapiens
atgatgcactctatgaatgccccttctagtatggcccaggctcctttgtccacatgggtccattgtgcagctgttagctattgttttcttcaagattcaaatttaagtgtcccgatcttctgagtctttaagataagtcaagggaccattagctcactgaaaataattgacaacaccttttgggacagtgcagctgggaatgccagcatgggatatcaatcatgctggtcgtgatataacagggcagagattattcctctaccttataacattctctaagaaatttagagaaagcaattccacctctgataatctgagtcatagtctttgaga

SEQ ID NO: 723202 - DNA, 958 bp, Homo sapiens
tgcttctatcacactccagtgctttaagcaggttttccccccatattttacctaggagggtatagctgttacctgtggaaaggttggttcagtgggggctattctgccattaccaaaagttgggtcctgttctctactttttaattggccggaaaagaggcataaactcggagaacccaagaccccggcctggcgtgcagccccagcagccggaccagccttgggcaacagcgtgcgacgttcagctgtctgtgtctccagtgctcccattccatcgcacctgaatgagggatttgggaggtaaaacagggctgagcgtgcgttcgagcttctcctgcatcatgaccaggatgctctgggacaccttgtccacgtctgtgtccaccagtcctgctcagaatctccccaggggcttttccacgatgcccatccaggcgtcaccctcactctaggccaggaggagaaggcatgccctgaggattcagcctcttcttcttcatccctcccagcacccagtgtgttgggtgcacacattatggttccaaaccagagtttccctaggaaataaacacggaggggctgaaaggacctggggccatcgggggtggatggccatatcctggggccttgatgccagtgccgactgttccctgcaacgcttccacgtccacgccaacattgcaaggctatgtcacggactggaacagctacagtgatgacacacctgaggtgaacacaaactccagcagcatcctggctctcatgggggcaagtgcatgtgggaatctaaaaaaccttccacaagttgaagccctgcaagggtggctcatgggcttgccagaaagttgtttcctggatcccagtgggtaggcaaggcatttcaagcaaccttgtgaaccttcaccagaagcagctcagggatatcctgctgcctcctaagagccggtgtccggcccca

SEQ ID NO: 723203 - DNA, 117 bp, Homo sapiens
attacatgctgttagcagaacatgaatgagcctacagcatgcataggcatgtatcatgtggtgtatgcatcggggtagtccgagtcacgtcggtggcattccggagtaggccgcaga

SEQ ID NO: 723204 - DNA, 863 bp, Homo sapiens
tgctaagaaagaaaaggcaatcaacagaaacaatgaagaagtcacagatctaaagaggcaagcagttgaagagatgatggatagaattaaccaagggagttcatcttagagccgttaatcagacagcagaccgaagaccaaagccagaatcttcgaaaggctgcgaaagtgcacgtggatgaactacaaaggaataactgggacacttaacaaatccacctagttcaagaagcttaaaatcccttgaccctgaaaacagtgaaactgagttagaccacggattcgcgtcgcacgacacggtgccagcagaagcagatagcagtagtccaactgggatattagccacctcagagtccacatccatgccagtgtgggttctgtatccagtgtcaacaaaaacagccttgaacaagaacaatctggaggcagaattcaaagccgtcccccccaacactgagccaggtgcacgggcccgtaaatgtgaaggatgcacaagttcccaaggttacgtttcagcctcccagtacgcattggctgcaggaaacaacttcctttgaggtgaacaaaccacagccgaaccagtgtagtttagatcctgtttctacaatgaaccccacacaaagaccaggttgttaaaagatcatcactcaagagctgacgcgaattcaccgaaaacaatgaacagttgcaacgtgaacagccgaaggccactgtgtcctaacacaactgcttgtggagcccttctaacacgtaggtgtatggcaggggcaactgctgtcgttcaaaggactcggctgagacccactactcggccacactcgtgttgctaaacagccactatgtctatgactagccgaccacag

SEQ ID NO: 723205 - DNA, 347 bp, Homo sapiens
  misc_feature (105)..(105): n is a, c, g, or t
  misc_feature (110)..(110): n is a, c, g, or t
  misc_feature (127)..(127): n is a, c, g, or t
  misc_feature (129)..(129): n is a, c, g, or t
  misc_feature (162)..(162): n is a, c, g, or t
  misc_feature (176)..(176): n is a, c, g, or t
  misc_feature (179)..(179): n is a, c, g, or t
  misc_feature (236)..(236): n is a, c, g, or t
  misc_feature (247)..(247): n is a, c, g, or t
  misc_feature (253)..(253): n is a, c, g, or t
  misc_feature (275)..(275): n is a, c, g, or t
  misc_feature (277)..(279): n is a, c, g, or t
  misc_feature (282)..(283): n is a, c, g, or t
  misc_feature (285)..(285): n is a, c, g, or t
  misc_feature (290)..(290): n is a, c, g, or t
  misc_feature (299)..(299): n is a, c, g, or t
agcctgccctgcctgggaaagtcggccgagggcccaaaacttttgaggggtttgaggctggtgcccccccccaagttagtgcgttttttgcccctccctgcccgngtttnagggcctcggtccatananaaccccccccccatggccaggtggaagggtttnttagtccctgccancanctgtcctccctggggcaggtggcctggccagccccctggattggggacgggccaggntgggccaggtngggggntcagtttgggaggtaataaaancnnnccnncncccanatgttgctngggaagcaaatgttgatgcaaaaataaatcaccccctgtttccgggga

SEQ ID NO: 723206 - DNA, 1733 bp, Homo sapiens
atcggatctgagcgaacggaacgggtgcgggtgttcaagatgtccattctcaagatcatccatgcccgtgatatctttgaatcccgtgggaatccaactgttgaggtagacctttacactaacaagggtggtctgttcggaagagctgctgttcctagcggtgcctcaactggaatttatgaagctctgctggaacttcgggacaatgacaagacacgctacatgggggggaagggtgtctcaaaagctgttgagcacattatcaataaaacaattgcacccgcactgattagcaagaatgtcaatgtagtggagcaagacaagatcgataacctgatgctggacatggatggatcagagaacaaatctaaatttggtgccaacgccatcttgggtgtatctctggctgtatgctcgaatgctggtgctactgctgagaagggtgtccccttgtaccgtcacattgctgaccttgctgggaataacccagaagtcatcctgcctgttcccgcttttaacgtgatcaacggtggctcccatgctggcaataagctggctatgcaggagttcatgatccctccctgtggtgctgacaggtttaacgacgcaatccgcattggtgcagaggtttatcacaatctaaagaatgtcatcaaggagaagtatggaaaggatgcaaccaacgtgggtgatgagggtggcttcgcccccaacatccttgagaataaagaagccctggagctgctgaagactgccatcggtaaggctggctactctgacaaggttgtcattggcatggatgtggctgcctcagagttctaccgcgatggaaagtatgacctggacttcaattcccccgatgatcccagcagatacatttctcctgaccagctggctgacctgtacaagggctttgtcctggggcatgcagtgaagaactacccagtgggcgtctccatcgaggaccccccatttgaccaggatgactggggtgcctggaagaagctgtttactggcagcctggttggcatccaagtggttggagacgatctgaccgtgactaagcccgaagcgcgtattgccaaggctgtggaggaggttaaagcctgcaactgcctcctcctcctcaaggtcaaccagattggatctgtgacggagtccctacaagcttgcaagcttgcccagtccaacggctggggcgtgatgcccgtgagtcaccgcctctccggagaaacagaagataccttcatggctgacctcgtggtcgggctctgcactggtcagatcaaaactggtcccacttgccgatctgagcgtctagccaagtacaaccagctgctgaggattgaagaggctgaggctggcagcaaggcccgctttgctggaagaaacttcaggaacccccgtatcaactaagctgcgtggatcgacacccgttctggttatgtaagcactagtcacctacttagactcacaattacttgtattagaagatgaggggcaggctgaagaaaagaccagtttgcaggtcctctcccctcctagatgactctccttcacctacagtgtttccaccagctctgatctgttacttgtaacgatcgtgctttgtagaacaatcccagtctttgatgtttgggaggctgtttgacttgcaggacagcaagacggtacctacaaaacagctagtagtgtttttacatgtgataaataaaaagcatcaaacaaaaaaa

SEQ ID NO: 723207 - DNA, 880 bp, Homo sapiens
acagaaaaaagaaataaatataaacagaatatccacaacagaacagattatttatttggccgacagtctctaatctgcccaaagtgtgccaacgtacatttcccacgacggcaaaaaccaagtgaccactacaaagttctgtctgttatctccctttaccgcacagtaccacaacgcttttaacatctataagactgcctcttggccttacttgtggtctacaacgcgtcacagaccttcagcaactctccgctaccctcgcaataaggacctatctccccacgaaacatcagaactgcacttaaactcaatcccggtccaacagggggtatagaccccaaggaaaccctaactagccccgttctccagacccactgtaaacaaaggcacatatacgccccgcccatattggactcatggtataaatttccccagaaactaaatacctgttcagaacaacttccgcctctacttctctgatatcgacctatgagcgtctatttatactactttctggagaaccacttaccctccattggggcaaaaacaacctgaaaccctttttgtcagaggcccattccagcatcccaaggggacaaaagccggggtatagcccgacatcatgtgggtggacgacgacatgcggtatgatctcccctgagaacacacatctattattttaaaaccaccgctacagtcctccttgaggagaaccaagagaggtctcgcagccatctaggtgggcatacataactcatgtcaatcttctcccactaatgggttatggcaagagtgggtcgagggcccgatttttgcccaaagagaatccccgaacatctaaaggtctctcaattaaacaatttttccccaaaacataaca

SEQ ID NO: 723208 - DNA, 183 bp, Homo sapiens
tccctcctagcctgccagtgggagaggggctgtttcatgccaccacccaaaaaaacaccacaatggtgtcatgtccatatgcccaccctgacatgcttccctatcccaatgcggggtgtttcgtgggaacagtgcaccatgtgcagggccacttggctgaggctagtgactgggtacctgatg

SEQ ID NO: 723209 - DNA, 2517 bp, Homo sapiens
gcaaaatacctagactggactaggtagaagagatagaacacagctgttggtcttacagaattattattattattctgtaagaccaacagctgtgttctatcagaataataataataattctccttatttacttatttatttattttgagacaaagtcttgctctgatgcccaggctggagagcaatggcgtgatctcagctcactgcaacctgcgcctcccaggttcaagtgatctcctgcctcagcctcccaagtagttgggactacaggaatgcaccaccatgcccggctgatttttgtatttttagtagagaccaggtttcaccatgttggccaggctggtcttgaattcctgacctcaagtgatccagcctcagcctcccaaagtgctgggattacaggtgtgagccaccacacctggcctaataataataattctctaaggctaagagaacaggagacaataatactataacattctgtaaattggaaagctgagagagtgaagagttgcatttcttagcaaacccaagaaagccagttatatgtagaatgaaccagaggctcaggaattgctagcactagggatctctggaaaccttagctggggtcttttctaattcggctatcacaggacacagcgagtcacctctgccatgtttcacctgctgcttacacggcacacagtccagaattagaaggtgaggtttgaaaattcacctgttttcgttctgctacctacagaagttccacagtagaaaggaaggagacctggatcaaaggataggctttaattatgccactaacagtatgaacttcatcaagtcctttactctctctagacgttagttaccactgatgtaaaatgaagggctagactagactacccttaaaggtgccatccttgctgtcaaacctcatgatgttagaacaaaaaagtatttcaggacaagactctgaggttgacctggttacttttcagaagtgtgtgcacacacatatgcacacacataataaatttagaacagaacaatattgtattctgatattattcatgaggataattaatagtatctaagaattattgaatatccaccatgttccaggtacttgcactatcttacttaatctcatttgatataataatagtgttttatgagagaaattctgttatcttcagtctacagattaagaaactaaggctctaagagtttaagttacttacagactttagaaacattaagtggcagagtctagcttttaaagatctggccaccttcagagccctggttctctagacctcaccatgcacctcttttctgaacactggtgcttctccagaaaggtcatcacattcattccagttcctatgattgctttcagtttgtagtatgactttattaccttcaactggaaaattatttggggtgtccccctgtaaagtggattggcattggaattataaacaagccaagtaccatatttctctcacgaagtcagtttcctctgaattctcaaagtccacaggcatgtaaaaggccctgcatgtgtgaaattacacattattaaagtcctgcatattaaacctttacaggatctgtagttttccattgtgaccaaacttatacagatcactgttgttcaatagattacatggccaattgtccttgggactgcagactatttataaatctacaagtaaatattttaaccaatctgtgtatgtaaattttctgtttaatgttgatttttgagtataaaaataaggagaggacatttaatggatggaatgaaagagataatatattaaaaggggaggggaagcttaggggaggatgggggtgagaacttccaacttttgttgtacgttgtttaaaattgtggattagggttatgaatgcttttgaggaaggtctcaaaagaagatcccccagcaaagtagggaagggtacttcccgataggagtcgaggtgcccaggccagctgctatactggcactgggaggagccccacgttctgccgtacctgcccccaggttggctgcatgtgccagggagtagtagaagtgccctgctcaacaggaaatgactctttccccgccacagtaaactgggccatctgctgcccttttggtttgctgcctcgattttgcaggttggagacattaaggcatgaagaaaccaagtgacacgcttcaattcagagcctaaagaagagtagtgacacatgtcggacagctgccgtgttcagcacagtccagagcgcgccatatatatgaacttgttgttctcacctcaaccctgagaggtggatttcagtgtgtctttggatggcaagcattaagagaagagtcctaacacacagcctcaggtgcttcctctctatggtgggtttcttctccaaaccaagactgcttccctggtgtgccataaaaccaccaggttggtcacagctcttttggggcatagtatgtaagggaaatttcacccatgtggtagccaagaagtgtcaaaaaa

SEQ ID NO: 723210 - DNA, 486 bp, Homo sapiens
tgccattgttggtatggttcctggcaagcccatgtgtgttgagaggttttcagactatccccccttgggtcgctttgggtgttgggaaatagaacagacaggttgggtgggggttatcaaaacagtggacaaaaaggctgctggagttggcaaggtccccaagtttgcccagaaaggtcagaagggtaaatgaatattatccctaataccggcccccccccttttaatcagggggggaagaagggtttcaaaactgtttgtttcaattggccctttaagtttaggaggaaaagacggggtaatgataaccagggtttgttaaaccttccgaaggaaaggggaatgttttggggccccctttggtttttttttttgggggggggggttttaaggtattagtttttaaaatcaggattttttaaggggaacaacttggccaaaaatttgttccagaattttgaggcccctttaaaaagttaaatggga

SEQ ID NO: 723211 - DNA, 156 bp, Homo sapiens
atcgagctcgccccatttgcacacgtggcagtggggacacggcaaggcatgccagtgaggcttcccgttcagctcatgggataccttgcccacagtcttggcagctgccagtagaggcagtgatgatgttctggagagaccccgcgtcatctaggc

SEQ ID NO: 723212 - DNA, 579 bp, Homo sapiens
tgtggcaaacggagttatttattcgctattcccagttggaagctactatcaggggcgttaaaagttatacaattgacacttacaaaaaataaaaaaccaaaacacccagagtgagatgcttgtggggggacgggggagaggctgggcacggcagtggggtgccccggggtgttcaccccaggggtctcccggagggggcgacgccgggtttcttccaccggggaggcccaggagcaccaatcacagcaaggggctctggcccagtgtgtcggcagcccatggcccagggttggtggctggacgggaaggacggaacagagggggctcgagattgcacccccccggggtggagtggtcgcgtgaagatggcccccgcaggaacaagactcacctgcgtcatattaccagcgcaagcaaataggcacaggggaaggccctccaacgacaacgaaaattatgtgtcatattgtcaaacaaaaagataccaggatatggcggacatgactggagtatcacagagaaagcgaaaaagaggtgaagagggaaaagaagaccacgcgaggcaaagccgggacgacc

SEQ ID NO: 723213 - DNA, 565 bp, Homo sapiens
gggcgcacgcagctgaagtcccgtagtcgagtgtgcacgctgagtcaacgcaccctgtagaccaaacgtgggagtcccggcgtacgcaagcgctgcccttaccattgctgaacatctcccccttatcctcctcgggctggtccatccaggcagggtgcttccgaaccagactggcagcactctagcaagcccctgcaaagtgcttgactattgacagaggaaactctgcattctcagctatcatggagggctgtccgcaatgatgtgcacagtgtctagtctgcagattggctatccgcaacctgatctgcatcagtaccccattatatcatcaacgggttacataacgagtccaggccttgtactgtggagacggatttacaccttcccacttgctgaaaaggtcaaggcctttcttggctgatccatctgcgttattgtggactgcatgccccctgtggctgctgccaccacagctgtctcctgctgacttcgtgcagccccagctaaggtcgaagcaaaggaagagtcggaggacgtcggagaggatacgggctttggtcta

SEQ ID NO: 723214 - DNA, 366 bp, Homo sapiens
ctgtaggctgagggtacctgtgcagacccagtgtattgtgcgtgcaccagacccagatggagcaaccctgcttctggtttaggcacacgtgacgggtgcgtgagacccgtgcacgggagacccgtgccgccttcaggcgcgctctcccgagattctggggcacacggaagatgtgggccctgggtgggagcagcccacttctgcagcactgtcactggctttggccacctgaggtgacccccaggccttccagggcttgtacagtgtacctatgtgtgtctgtacagcctcgcttctgtcaccccacccttgcgatctgcattagggacttccctgggagcacttgctctgaggtcccagggtgct

SEQ ID NO: 723215 - DNA, 178 bp, Homo sapiens
gccgactccttaactgacggaccgtcactgacaacttcaactttacttaacacttagttacgacggccgggtgcggtggctcatgcctgttatcccagcactttgcggaggctaaggcaagagaatcacatgaggtcaggagtttgcgaccagcctgggcaacatggtcaaactctgt

SEQ ID NO: 723216 - DNA, 351 bp, Homo sapiens
cggcacgaggtttaacagcaaagatgcttttctgttaaaaagaactgattacaatattgccatacccaacaaaatgatatcccttgatactgtctaataccagattatacctgtctcgaaactgtctttcattagcttaccttctaaattccccctttatcgttaacagtgagacatgcctagacaaaattaaagccacacagaagagtatgcagtgaagaaagcatctccccctcatctggcagccctaatcttactccccagaggttcctgaagtctcttaataaagacacttctatatattcctctagacacttcctgtgcatgtataatcacacatagacacacaca

SEQ ID NO: 723217 - DNA, 395 bp, Homo sapiens
  misc_feature (80)..(80): n is a, c, g, or t
  misc_feature (98)..(98): n is a, c, g, or t
  misc_feature (140)..(140): n is a, c, g, or t
  misc_feature (145)..(145): n is a, c, g, or t
  misc_feature (155)..(155): n is a, c, g, or t
  misc_feature (239)..(239): n is a, c, g, or t
  misc_feature (277)..(277): n is a, c, g, or t
  misc_feature (285)..(285): n is a, c, g, or t
  misc_feature (304)..(304): n is a, c, g, or t
  misc_feature (319)..(319): n is a, c, g, or t
  misc_feature (368)..(368): n is a, c, g, or t
ggtctcaccatgtgggtcagggcgggtctcgaatcctgactcatgatccacccacatgggctcccaagggggtggggatnatagacatgagccaccanaccgggctgttttaaaatcactacccacagctctgtaatttnctttnagctggtatnacctgctaccataccacagactctaatgtgagctctatggggacaaggccttctgtctgtttggatggtttctatgtcctcagngcttagatcaggactgggtccatagtaggtgctcagtnaatatggngtaaggtaaatgaataaanacccgtaatcaaaantctgagctcgtcacttataaacccagtgaggtagatcccagtaaaattnacttggtatagatgacagagctgagac

SEQ ID NO: 723218 - DNA, 106 bp, Homo sapiens
tggaaagggagtctcgctcggtcactcaggctaaagggcaggggcacgatctgggctcactggaaactccacctccggggtccaagggattctccgggctcagcca

SEQ ID NO: 723219 - DNA, 270 bp, Homo sapiens
ggatggggtgcagtggcgcgatcttggactcatctgcaagactccgcctcccaggttcacgccattctcctgcctcaggctcccgagtagctgtgactacaggcacccgccaccacgcccagctaatgtttttgtattttagtaaagacgggttcacagtgttagccaggatggtcttgatctctgacctcggacaccgctgctccagagtctggatacaggtagcacagctgctattgattagcgccgaataatagcatcgacgagcta

SEQ ID NO: 723220 - DNA, 112 bp, Homo sapiens
caagtatgagacggaatgtgggagagggatattaaaatgctctaataccctcttctgatgttcgccgcacggcaagaccagattcttgggcagatccagacgattaggggca

SEQ ID NO: 723221 - DNA, 551 bp, Homo sapiens
  misc_feature (242)..(242): n is a, c, g, or t
  misc_feature (405)..(405): n is a, c, g, or t
gaaccatccccttgtagacgaattttggagactggggattagagccctttggaggtcaaagccaaatttaagatttttatttaagaataaaagagtactttgatcatgagacataggtatcttgtccctctcactaaaaaggagtgttgtgtgtggcggccacgtgcttctatgtggtgtttgactctgtacaaattctagtcccaaagatcaagttttccgaaggggcccaaggttggaangtgggtgctggtttcggctttaaagtcatcatctcaacccagagtgtctggtctccctgctctttctgcatggttgtgtccctagtcctaagctttggttctttagggtgactgtggtaagaaggatatttaatcatgacatgcacggacacgtacatatttnactgaagtcgtcgtggccaaacaggatttacgctcgatgtgcgtcgtgcattcagatatttccgcgccattctatcgtggtctacgttcacctaacagaataccctcgggatgttgatcaagaataaagatgatgagctaccaaaa

SEQ ID NO: 723222 - DNA, 311 bp, Homo sapiens
cgataccatctatacataataggtccaaactctattaagtgcatgtctggattattcgtaacaaaagtacattatatgcttccctgactgggcctcaagatcaatattcctaaggcacctttctgatcatggcctacactcctctaaaaaagtccaatcgaacctactatgtatcgtcaatctgacaacccatgcctccctccccaactcaatctcctatagtttcacctcccaactcaaagccaaatgagaactttctaccgtccactgcattttccttcctctttagttgtgctatgacatacccttca

SEQ ID NO: 723223 - DNA, 192 bp, Homo sapiens
cctgcgctcgcggtgtctctgcgtgtccacaatgaacggtccatatagccggggcgacgccatttaaatcaagaacaagcgagggcatgacgtccgtgacgctcacagctttcacgcataatatcgtagataaaatcgtcaagttattggtcaacaaaccaggcccccctacccttcataatggattggtcc

SEQ ID NO: 723224 - DNA, 219 bp, Homo sapiens
cgtctatgaattttatttttcatcaaaaaacaaggaattaagcttgaatagtgactatatggatgacaacagtctatgtgaataacttcgaatatatgcctatccctacaggtgtgtgcttgtgggagacagactttaaacagcctccatacaatgcgtgtgtatagcaaactatcatgatgtataaagagctcacaattctattgtgaaaaataaaac

SEQ ID NO: 723225 - DNA, 753 bp, Homo sapiens
  misc_feature (36)..(36): n is a, c, g, or t
  misc_feature (86)..(86): n is a, c, g, or t
  misc_feature (114)..(114): n is a, c, g, or t
  misc_feature (118)..(118): n is a, c, g, or t
  misc_feature (125)..(126): n is a, c, g, or t
  misc_feature (168)..(168): n is a, c, g, or t
  misc_feature (201)..(201): n is a, c, g, or t
  misc_feature (203)..(203): n is a, c, g, or t
  misc_feature (208)..(208): n is a, c, g, or t
  misc_feature (215)..(215): n is a, c, g, or t
  misc_feature (234)..(234): n is a, c, g, or t
  misc_feature (237)..(237): n is a, c, g, or t
  misc_feature (355)..(355): n is a, c, g, or t
  misc_feature (358)..(358): n is a, c, g, or t
  misc_feature (417)..(417): n is a, c, g, or t
  misc_feature (426)..(426): n is a, c, g, or t
  misc_feature (438)..(438): n is a, c, g, or t
  misc_feature (444)..(444): n is a, c, g, or t
  misc_feature (455)..(455): n is a, c, g, or t
  misc_feature (476)..(476): n is a, c, g, or t
  misc_feature (478)..(478): n is a, c, g, or t
  misc_feature (482)..(482): n is a, c, g, or t
  misc_feature (500)..(500): n is a, c, g, or t
  misc_feature (502)..(502): n is a, c, g, or t
  misc_feature (515)..(516): n is a, c, g, or t
  misc_feature (536)..(536): n is a, c, g, or t
  misc_feature (540)..(540): n is a, c, g, or t
  misc_feature (548)..(548): n is a, c, g, or t
  misc_feature (561)..(561): n is a, c, g, or t
  misc_feature (570)..(570): n is a, c, g, or t
  misc_feature (584)..(584): n is a, c, g, or t
  misc_feature (608)..(608): n is a, c, g, or t
  misc_feature (720)..(720): n is a, c, g, or t
gggtgccaaaccagaagtggccagtggggttggggngggggggggggggggggtgagatggggggggccccgttcttggtcggtgntggggggttggggagacggaggcgcgcntgtntgctgcnntcctctgggctccaggtaggagagcagatgaaatctcaggcntgtggcttctccacaccactgccccccaggttngnggggngctaagngatgagagaaggggacagnggnaagagaagatgttgatcaagaaagatgagaaccaggggtgagggctgagggagaatcaaagataaaataccagtttaaaaaaaaaaaaaaggggggggggggggtgggggagagtggnggnggggaacaaaaccaaaatccaccccaaatccgaaccagcctggaaaaaaatgaaagttntcgagtttnacagagacattntttggngcggcaagctntgcggcaggagcgctcaggcntnagtncagccctggaggcaggcntntttacagctcgtnnttggcctggccggggacatnttcntcctcatnttcctccttgtcntcctcatcntcctcatcctcatntttgttttcatcatcctctttgtnctctgcttcctcttctctctttgcgtttcttgtcttcttcctcctccttaagcctctgctcctcgtcctgtttgtccttcatttgtttctctgctgcctttgttacgccccncgtctcgttgccaaactcctcagcgtatgcctc

SEQ ID NO: 723226 - DNA, 374 bp, Homo sapiens
  misc_feature (102)..(102): n is a, c, g, or t
  misc_feature (228)..(228): n is a, c, g, or t
  misc_feature (338)..(338): n is a, c, g, or t
  misc_feature (349)..(349): n is a, c, g, or t
  misc_feature (356)..(356): n is a, c, g, or t
tttcctttatttaacttccattgggggcttttgggaagggtttaccccctttattaattttccaggggttaattatttgttggaatttatttttttttgccnctttgtgtttttggttttaaaaaatatttgggccccccccattttttaggagttttccccttttctttaattgagatttggttttcctttaaattagggtttaaaggtagaaatttttaattaatnattggaaggcttgttgtttttaaggtaatttttttttttcccaaggttgtttggaagggagttccctcccttgggggagttttcccttttttcccgacccaaaatttaanaaaagggcctnggttttntggagatttttctttgta

SEQ ID NO: 723227 - DNA, 338 bp, Homo sapiens
tcttatctcaggtggttcagataaagagctgtacggtacccgtacctcctctgtaaattcaggatcgttttttaaaaaaattaatggaggatatgtactactactgtgattagaaaaactaaacaccctaaggccgggcgcggtggctcacgcctgtaatcccagcactttgggaggccgaggcaggtggatcacaaggtcaggagttcaagaccagcctgaccaatatggtgaaaccgtctctactaaaaatacaaaaattagcctggcatggtggtgcacacctgtaatcccagctcctcgggaggctgaggcaggagaatcgcttgaacccggga

SEQ ID NO: 723228 - DNA, 130 bp, Homo sapiens
ttagatcctttaactgcaaagtggtttctcactcctcttcccaaagcccttgagtatatttctttcagctccctcatgcttttaaaaatcctgtaatactccttttattcttcctgtgttacgtctaggt

SEQ ID NO: 723229 - DNA, 320 bp, Homo sapiens
  misc_feature (264)..(264): n is a, c, g, or t
tatgtgtaagttggaaatgaaattggaaaaggaggttggtgctgtaaacattgggcagagtagctaggaagaagactgtggttaatggatgcgctatggcctttgttccagtgcaggtgcttagtggagggtgcagtgctgttgcaacatagaaggacccattttgaaggaggtgatgggttagctgttgggaacgggaggagaggaagggcttgtggacccaacctctgttgaattgcctggctttttgagagaccactgaanctctcccctccccactccaccccccatctgtgctagcggaagtctatctagaaaga

SEQ ID NO: 723230 - DNA, 129 bp, Homo sapiens
gcagaaggaggtctggtattcatgcaggaatgaatactatctggtcctattgggatataggcttcttcacactccgtggtaggtgtcaagtggccatgcattgagagcacgcaggtggtggatccatct

SEQ ID NO: 723231 - DNA, 119 bp, Homo sapiens
gactctagaggagtccctactaaatggctgtcgatgatgatagtcgggacacagcagggtgttggttggacacctagatacagtctcacctgtggctctctgcatggatggattagttg

SEQ ID NO: 723232 - DNA, 211 bp, Homo sapiens
atttacttttattttttcttgtagagacagggttttaccatgttgccaaggctggtcttgtactcctggcctcaagcgatcctcctgccttggcctcccaaagtgctgggattataggtgtgagtcaccacgcccagccaggaatctcttatgtttgctgtttaactcaagagaagaacatccacctgcttgtatttgcagtaggtaatag

SEQ ID NO: 723233 - DNA, 158 bp, Homo sapiens
tgaacattcgttccctgtggtactggtaatacaccaggttctgctgcatgaccttgtcattctgatcaaagagcagatagctgacggcacagggtggctgcggctgtcatctgccaggagagggaggtgctttggatctacagggacacgaatgttca

SEQ ID NO: 723234 - DNA, 244 bp, Homo sapiens
tccccacacatgtgcctcttcatatatctacaacatatgatatcaaatacaagctgattattattaaacaaccacatattaacattatataggagatgacatttctgattattcagacaattaacataaaatccagaagcaagataccgtaagctgagaactctggacagttgatcagctttacctatggtgcttcgcctttaactagagtgtgtgatggtagatatagaagagtgcacttatg

SEQ ID NO: 723235 - DNA, 274 bp, Homo sapiens
ctttcccccccaattttttgggggcacccttttttttttccccccccccccccccccctcccccccccccttttttgccggttttttggcaaatccccaattcaaaggggggggtttttcccttttttttcccaatttaaaaaacggccccaaaagggggggggggcccccgaaaatttttttttttttttcccggccccacccttttaggccccccattttttccccgttttaaaaccaaattggggaaaaattttaccccttttctttttta

SEQ ID NO: 723236 - DNA, 321 bp, Homo sapiens
agatcctttgcctaacaaaataaaacgcccgaacagccctcaaacgccgaactatatacctggacgaacgtgtcacaaataaccattttagggcaagtcaaccaaaggcaaacaacaaactaagaagtattatgggccagacacagtggctcacatctgtaatcagcacttgggggggttgaggtgggtggatcacctgaggtcaagtttgagaccagccgtggccaacatggtgaaacccgtgtccctactaaaaatacaaacattagccggccatggtggcatgcacctgtaatcccagcaactcgaaagccccaagcg

SEQ ID NO: 723237 - DNA, 441 bp, Homo sapiens
ttatctctggggctcctcctgctctgactgccacctcgtgctcacacagagcttctgcagtgagttggattgcattattagacacttcaaactattatatgtttaagagtagggcgatgaagaggggaatgcctatatatttttcttccatttacaaatatgtgtatactagcatcaaatatagaggctgtaactagaaggctaagccccatatgcaagttcactgccattccctaagctgtcggcaatcaggacatgtggaaggtggggccagccgaacctcactttcctgggcaggaagggaaagtcacggggcccaagcgaccaggtagggcagtttctcttagcggagagacaaagggcggcaggacgaggaggcaaacagcaagcacaaaggaacccaggggccaactggcagccctgtcgactcgtagcctaaga

SEQ ID NO: 723238 - DNA, 126 bp, Homo sapiens
agcacccagctcgtcagcatcaccggctgtacgcccgccgcaagcccgccagccagggctcgatggcggcaatgcagtcgctggcctgcgcgatggcgatcggcaggtcacgacactgcgcggcgc

SEQ ID NO: 723239 - DNA, 1010 bp, Homo sapiens
  misc_feature (1010)..(1010): n is a, c, g, or t
gcgcacccagagtggagcgatagggtccccaagatgcgccttgaatgtacagagccgtggctgaacccgggggttcccgtacgaatgggtaccacactgctgtaccaagcatcacctaccaggcgggcgagatctgctgcgcttgcttctgtctatggacggcgttgacgcttatcggacgaggtcaccatcacctgtgtgcccggggcacgcaccctcccccagtggaccagtcagccgtcctactctggcatcatgggactccagatgcacagatcacatctacaggcgatgcgtggtaaggggggaatcttgtgcctctggtgccatcctggatgcctcgtaggcttgtgtcgatggtactcgtgcgagtggcgtttacatctacgtactatccatagcttcagggtaaatgtccgcgttttctggcttcgtctgggcttgtcgcacgtcctacatggcccgaatcactcgtggaggtctggacttcagacaatccgactgtatgaaagactggggatacgcgggagtatgaacgttttcgcatctgaaccccgagagctacagctgcaggagcaggaggcccctcccctcctcattcgggcagagggaaatacgggacccggtctctggctccctggtgggctcctccctggctgtgtaaatagtctgcctatcccacgaggggggtttgattggcctggagatcccgacagtaaataagcaaggattctgacggccagagcagctcttctcagttgccgaatggaggggcttgtccccggctaacagggttggatctgggcgggggagccttggttcccttggaattttggaggccttctgtgcgggacccttaagggtggcgccgagaggttaagtccttggggaaagagggtcgctcagatggttgggcttatgttgtccccggtgtggtgcaaactggtctctgcatgcgcgagtgccctgagcaaccagagtccctgctgggtatgtagaaacctatctan

SEQ ID NO: 723240 - DNA, 536 bp, Homo sapiens
  misc_feature (156)..(156): n is a, c, g, or t
  misc_feature (171)..(171): n is a, c, g, or t
  misc_feature (184)..(185): n is a, c, g, or t
  misc_feature (192)..(192): n is a, c, g, or t
  misc_feature (195)..(195): n is a, c, g, or t
  misc_feature (201)..(201): n is a, c, g, or t
  misc_feature (227)..(227): n is a, c, g, or t
  misc_feature (230)..(232): n is a, c, g, or t
  misc_feature (234)..(234): n is a, c, g, or t
  misc_feature (240)..(240): n is a, c, g, or t
  misc_feature (255)..(255): n is a, c, g, or t
  misc_feature (259)..(259): n is a, c, g, or t
  misc_feature (264)..(264): n is a, c, g, or t
  misc_feature (268)..(268): n is a, c, g, or t
  misc_feature (270)..(270): n is a, c, g, or t
  misc_feature (272)..(273): n is a, c, g, or t
  misc_feature (277)..(277): n is a, c, g, or t
  misc_feature (280)..(280): n is a, c, g, or t
  misc_feature (285)..(285): n is a, c, g, or t
  misc_feature (292)..(292): n is a, c, g, or t
  misc_feature (304)..(304): n is a, c, g, or t
  misc_feature (306)..(306): n is a, c, g, or t
  misc_feature (308)..(308): n is a, c, g, or t
  misc_feature (330)..(330): n is a, c, g, or t
  misc_feature (343)..(343): n is a, c, g, or t
  misc_feature (354)..(354): n is a, c, g, or t
  misc_feature (357)..(357): n is a, c, g, or t
  misc_feature (365)..(365): n is a, c, g, or t
  misc_feature (370)..(370): n is a, c, g, or t
  misc_feature (372)..(372): n is a, c, g, or t
  misc_feature (382)..(382): n is a, c, g, or t
  misc_feature (384)..(384): n is a, c, g, or t
  misc_feature (399)..(399): n is a, c, g, or t
  misc_feature (412)..(412): n is a, c, g, or t
  misc_feature (425)..(425): n is a, c, g, or t
  misc_feature (455)..(455): n is a, c, g, or t
  misc_feature (498)..(499): n is a, c, g, or t
  misc_feature (520)..(520): n is a, c, g, or t
  misc_feature (532)..(532): n is a, c, g, or t
gcccagtgttggggactacttccacatggcctacaacgtcatcacgccctttctcttgctcaagctcatcgagcggtccccccgcaccctgccacgctccatcacgtacgtgagcatcatcatcttcatcatgggtgccagcatccacctggtagntgactctgtcaaccncagcctgctcttnngtggctnccngccacncctgtctgtaagtgagaaccccatantcnnnantatcanagccggagacgctgntcgnctccnttgngntnntctnatnttaanatgcatncctgggtccctncntntggtcccacccattcttcctcntactcttcatgtncttccagcggntanttacatgnctctncngctgaagcgntngcttcacgggtctgnccagctcctggtnggcacccgtgggntgtcctcataggtccatggatccccgcggnacgctcttcaaactcttccaattccacttcttcaccctgctgnngctcgtcctgaacaccgccgngaccggggtatntttg

SEQ ID NO: 723241 - DNA, 264 bp, Homo sapiens
ggtgaggaaatggtttttattataacttgggtcagacggggcacagccgggcgggggctctgagggtgcgggcaaagctatccagcccccaatcccccctccccgcggggcgccaccccggagggagccgagggcatgtcatctcaagcgcaggaagcaaacccgagcgccgcgacctctccccaggctggggtgggctgccaggcggaggtgggcagtaaacagtccctatggtacaaatatatagcgcgggcagggagcagg

SEQ ID NO: 723242 - DNA, 122 bp, Homo sapiens
taatcagctgtccgggttaggtcagctgaagatatgaggatgacgatgtcgatcaagaagcagaagaccgacgaggatactagacagcaaaaaaggaaaagttaactaaaaaaaaaaggccg

SEQ ID NO: 723243 - DNA, 1282 bp, Homo sapiens
tttttttcttatttcaaaaacagggatatctgcattaaattgcattcagtcaaatcaattccagttaacttaccatctcttaaacaattgggagaacaggaaacgataggacgtgaaaagttaaagatagcgtgacatacgggagagtaataagacatacgtggaaagtagctaagatgcacagggtggccaataaaagggatgtggtaatattacgatgttaacacaagaaaaaagaagtaaaatatacgtgtacttatatgggcgtggtctctattggctatttccccatgaaataggctaataagtaactaccacaggggaggccaccaagaggtggccaaacattacaggggtgtaaaaaacctttgttgggccaccatataatatcactatcttgggaacattgtgccaactttaataataaaaggggggggtgatttgtaaaagcaaacaagcgcaaaacaaagctgaggacgaacgttcaccaaaaacacgggtttggtccttggagcgtgagactatcctggaagaaggcttcaaaaacacaaaggggaatcacggcgcgggtaataaagagcggctgcgaaaaacacaaaacacaaaacaccgtgatccaaagttcaaaaccaaacgtcagcgagcaccccttgggggcaacaaaacctactaaatcacccaacaaacaggcgccctaacagaggcggaaggcgaaaatctccccacgggggggtgaaaaaaaccccatctaaaggatacaccaaaagattaggccaggaagtctccaacggcggaaaaaaccccaacaaaagagggaaagcacatataccgacacacaaaaaccccgggggatcaaaacacagggcaacaaaagagaggagacggcattggggactcgcggacactaagacatcacgggcagaacaaccacgacaaaagaataataccaaaaaaggctataccacagaagaaaaagaaggataagcgacgacggcatacgccgccaacaaccaagggggacctgataagaaaaacaaaattgacaacaacaagatacgcctaaacagagggaacacagggattacacacgaaccaaggtgagatgacaccacggtaatgaaaacgcaaaaaaatagggagcaagagcaaccccagagccaaaccaacgactcctatataccacccgcgacaaaaaaaaatgtttgcagaaaccaccccacgaggtgggaaaacgccgagcagctgctgaaaccacaaacaccacgggacgaacaccaaaaac

SEQ ID NO: 723244 - DNA, 413 bp, Homo sapiens
ggggtgtctagaggatccgttcgatatataaatatcatataacatataaacaaaagcaaacaatacacagcaatcctgaaagcaacaatcatatagctgggaatttggggacctggggcatgggaatgcacaggtttagattagtgtttagcgggcaaaaaggcagattcatgtaaacattttagagtggttttccttaggctgtttgagaatgagcaaatctttctaatgtaaaaccatcacttcagcaatgctacaagcattctgccctctcaattcttgttcatcttcttcaactgcagcaaacatacatattgcatcagcaaagttcacttcacaactcctcaattcatgccttcttaacatcacacatcccatcatttgtgcctcaacatcatgcaccattcatactc

SEQ ID NO: 723245 - DNA, 1007 bp, Homo sapiens
cctatggtagtgctgggtgtgtaaatctggccgattgggagatgatgaactagtctccccttcgcctgcatccactctcccgtgcctggcctgccttgccctgcctgcctcctccttgtgctgccctgccagcctcgccctgctgcctgtcaccatgagccatggcctactctgtccagccacgcctgctgtgtcctcctacctgcctgcaccttctgtgctgtgtggcccctgtgtgcattccctgctctgtgctcccctgcttgatgctctgccctgtgttccctgctgtgtgctgtggtttctgtgctctaatgtggctcctccatgctctgagttgactgtccctgctgttgtaccatgtgttgtcagctgcactgtcagtgagctgtgtgtgcctgtgtggtgccttgtgtgtgtctgcttgcagtgagccatgcctgtgcttgtgtgagaccaaccctgacaactgccctacctcctaactgtgactgcaggtgctgatgcttgcttgagacttactcacttgtgacctgactgcaggtgaaccatggatgttatcttgaccaccgctgcaccaaactgatgaatgttgtggtgaagcttgcatgtgaagctcaaatgacctggattactgcacaagctacaatctgaagaaagtgttgctgctatccttgtgaagcaagcagacactgcagtgccgctctgccttggcctgaaatattggagaccctggggcttcaatgtgtgccaggcagatgacctcgactggctgatgttgtgccctgaatgacctcctactgaagtgaagtgaagcctagcggtggaagccttgctgtggactgccaggttggagatatgatgctcaactaaacacagacaacagcagcggctgatcaccgtcatgaaggcggctgacaagcccttggcatcgactgacccttagatggtggggctccaagtggccaaggctagaaaggacaggacagacttccattatagaagga

SEQ ID NO: 723246 - DNA, 890 bp, Homo sapiens
  misc_feature (328)..(328): n is a, c, g, or t
agttctcccctttcgtgtgattatcgacctaaacaaggcgtcgcgtgcttgtgcaagcaaactgcgtgtgttccacacccttgtggcgacgccctcacatggacccatgggtgtcggccgaacagctggagaaacatcattttgttgtgcggccgccctacaaaccggggctcccccgcccgcatctccgtgggggtccctcactacagatacctctccgccctccatcgattgatcgagcttgtttacgccgcgattgctccctctctctttttcacagtgtgcgctttcatgttgctcgcacatttacaccgaatggttagctatntctaagaggccgtccgccccaaaggagttgatcactgagatgtctatcggctcagaggggtggatgccactccttgtggtagacaatccctcttggtgtgtatatatgctggtggactgagcgagtgggggactagacactctcgtagggcgaagagattatgtgggtgaggtagttccctcccctccccgacggtgtggccgcgcccgcctgtgtggtatctctctctgcgagcgtgcgatttttctacaggtggataaaagatgtctcgcctcccaagtcgtcacaaacgtcttatgtctcaccacctagagagtctccaacacactccatggttttattgatcacggggcaaaaccacctcctctgctattttttgtccccccggtagaaatggattgaccgccgccacacactcctgctacaaaagagtatcccgcaagtagtcatgtgcgtcccgaccacaggaccacctctgcggttgcaaattgggttccctgggggcacacaagcaagtggtcctgtcggtgaaggaacaaaaaaaattgcggccaacataaca

SEQ ID NO: 723247 - DNA, 529 bp, Homo sapiens
accaagaccgacctcgtgtccgccgaggacctcgggcggctcgagggcgtcatcgcgaccttcaatccgcaggcgcggatcgttcgcgcggcgcggggcgctgtcgcgctggacgacgtgttggataccggtttgttcgatcccgttcgcgccgagggcgcggcgggctggcagaaggcgttgatgggccagatgctgcccgaaaccgaggaatatgggatcagccatttcgtctatcgcgccgcgaagccttttcatcccgagaagcttaaggcgtgtctgaatagcaaatggcccggcgttatccggtccaagggcttcctctgcctggccactcgccatgaccgtgtcggcggctggagtcaggccggcgccgtcacacagtttggtccgcagggccgttggtgggcctcggccccgcgcgagcgctggccgtatgatccgacctggcgcgccgcgatcgagaaggtgtggcggccgatacatggcgatcggcgtcaggagatcgtgctgatcggtcagaatatgg

SEQ ID NO: 723248 - DNA, 295 bp, Homo sapiens
ggacttctctgtgtaatcggacttcctgctctacaagtcagtgagtgtaccaacaggtcacctgtgagagatgatgggtgtgcatgccatcctgatactgggactgatgagtggagaatggcacaccctagtggctggttgccaactcctgtaacaatgactggagtgacaatggctatcttcaaaatactcagaggacaggatcactgtggaatcgaatcagaagtggtggctggaattccacgcaccgatcagtactgggaaaagatctagtctgccgagtggctttgtactg

SEQ ID NO: 723249 - DNA, 418 bp, Homo sapiens
ataggagtcacgtctttgcaagcatgatcctccactaatggaggcagcgttcctagttgtcatcacacagctgaagacatcgctacatacgtgtgaaatcgatgacaaaggacaaacagagacacacggcattgttcatgggaggcatcgtcaccctcctgggtgttctgtgggaggttcctgtgtgaggaaaacgtaggcacagggttgtgctgtacccacccttccccggcgagataggcctcggactgtgccgctgcttacaccctcgccactccatggcagcttttggtctgtttccggctctggcctctgccctgaactctcatccggcttgtacctggctggtggaaccctccacctggaggccaggccatgtctcaggcccagccctagcctcttctcctcaaattctaag

SEQ ID NO: 723250 - DNA, 852 bp, Homo sapiens
ggggtgtggtgtgcttatgcccaaatccaaatggatgaatgtagaccatcccattcattctaggagatgaacagcacagccagtactccaaggttgctgctggcctctaaggagcaggtgctgcaccgggtagttctggaggagaaggtagcacatagaggcgagcagcgtggcagaggagagcacactcccgagtccgctatattgagggcagctatccaggagctcaagactcgggaagaggctctgtcgggattggccggaagcagaagggaggtcactggtgttgtggctgctctggaacaactggtgctagatggctcccttggcgaaggagtctgtttattcaacccaggaagggtgtgctggagatatctgtctgccttcgatgaagaaaccacggaagtaggttctctggacactccgttctagacctcttgctctcccgtctggtagaacgaggaggaagcagtgtctgaaccagagcctgaggggttgccagaggcctgtgatgacttggagttagcagatgacaatcttaaagaggggaccatttgcactgagtccagccagcaggaacccatcacaaagtcaggcttcacacgcctcagcaggtctccttgtgactacttttaaccaagcggaagatggacagcatatgttcctgggaccttgtgaattgtgcgctggcctcgtgcggggagtcgggcagcctggctgatgttgccccggacggatctcagcgacctgtgtttggccattggcggggtaatccatgtttgcgggtttttcgcaccgcgttcccggatattctgtccacatgtgcgcttccccttgtggtgtccacactta

SEQ ID NO: 723251 - DNA, 340 bp, Homo sapiens
gtgatccaaatggtgggggaagagcagcaggaacggggagtggcactactaacgtagccacagggaagaccttgtgtgccaaagggtacctgggcagacatggggcgcaacccaggcaggtgtcgggggaacagggtccaagtgccaggcaccacacatgcaaaggccctgaggctggtgtgtcccaggagcacaacgtgtcatgccagggaggtcgggtagagccccgcctgagtcagcattgaagatgccagggcggttcaaggcagagcagtggccaatatgttatatgcagatggctctgatgtaatttgctaaagagactctaggatgacaaaga

SEQ ID NO: 723252 - DNA, 461 bp, Homo sapiens
tacatgagcgtttggagcagcactgcttacaggagccacgatgtgaaaacctcgcacgtccgtcagctcgagaggacaaacagtgtggcctctccacgcaagggaagtccctcagccacagaaaggagtgaatcacctgacacgcagcacagcgcggacgaacctgggacacgtaatgccagtgaaatgagccagacgcaacaggccaaatgctgcgcaattccgcttctgtgaagtagcaggaacaggcagttgcacagagacaggaagtcgattcggggctgtcgggggctggggcgggtgtcgggggacagctgctgaatggcacagggtctgcaaaggtcctggatctggatggaggtggtggttgcacagcacggtgaatgtgtcgacgtggctgaattgtgtactttaatacagttgattgttaactttaagttatgtgacttttacctcaatta

SEQ ID NO: 723253 - DNA, 123 bp, Homo sapiens
ctgcgccatggacggcgacggagcccgtcaggcggtccagggcctgtctgttagagctcccaggcaaacacaagggctccctgaagccccacgattaccccaagtgggaggggggcgtaaaca

SEQ ID NO: 723254 - DNA, 222 bp, Homo sapiens
ctaattggttcttcgatgacgtgagcttctgcaccattagggagacacagtcaaatagtggaagtcacaccaggctgcttaattctactggtaaatgcagcaggtgcagttgcttgcatcaccgtgaaatgttcaaggaacgtggttcttctctcgttgcccaggatgacagaacaccgtaagcggtcacgtgtggccccgcgtcatcgaagaaccaattag

SEQ ID NO: 723255 - DNA, 284 bp, Homo sapiens
gagtgtcacttgtatggcatatccggtgccagcagcgcttgtcgttccttgctggcatccacatttgttcctcctatgtgactcctcattagctcatttatggttaccgcgttcactcctcacagagtccaccaagcagtcctgctatcgttgtacttcctcatctacctcccccgttcgtgcctggaaaacccttgccgctgctgccttccttggatgtggtagccgtctctcaggctccctctccggaatcgaaccctgattccccgtcacccgtggtcacc

SEQ ID NO: 723256 - DNA, 194 bp, Homo sapiens
caattatctctcactgccccttcggacaggggacagcgtatcaagcgtatcacagggagctgttgtctcaagagaagcagaatctagagccagggttcacatcgatgggctattacataggattggttggtagagctatcctggatttcagcaacatagagactcatttcaaatggccaaaatgaccatcccag

SEQ ID NO: 723257 - DNA, 434 bp, Homo sapiens
actacaggacttatggcgatcactgtactatatgcctgtttttcaatctactgagcaattgtggtatttttttaatctacttttttttttaaaagaggtgagggtcttgctatattgctcaggctgacatcaaactcctggactcaagcactctttctgcctcagcctcctcagtagctgggtattatggtatgtgtacatatatacttttagagacagggtctcgttctgttgtccaggctggactacagtggtataatcatggctcactgcagcctccaacacctgggctcaagcaatcctcccacctcagcctcctgagtagctagggactacaggcgtgtgccaccatgcctaatcttttttttttttttttttggaaagggagtctcgctctgtaacccaggcgggagttcagtgatcgacaaaggggt

SEQ ID NO: 723258 - DNA, 459 bp, Homo sapiens
aggatcccggattggagatgtctgaggagaacaaagctgactcggaaggcggtctccatcaggatggggataagaaaggcagctgtgagagagatgctcactctgccccaggctatgacaaagtcaatggacatctcatgaggtggtcaccccttcgtgttccttgtgtactgggagtgagtgacgtcctctatgcttgaccccaattacttgcagagtgtgattctgggcggcccctttgatagttcacaacgcgaagtcgttacattcaggtgggtgtactcagctggggagtcgtggatgtctgcaaaaaccagaagcggcaaatgcaggtacctgctcacgcccgagactttcacatcaacctctatcaagtgctgccctggctgaaggagcccctccaagatgcggatgggggtaaactataaggggttccctggcgggaacagggggggtacc

SEQ ID NO: 723259 - DNA, 436 bp, Homo sapiens
attaagtatttggtagctgaataaggggtcagaacttctgaaaccaaagatctgtaatcatctctattggcctggggggcctgtgctataaatgagtttcttcacatgaaaaacccagccagcccaagatgacttatctggggttaggattccataggattccccaaccggctttttcaaatgggcaatttcatcaaatctcccaactcttaaaggatgctttcggaaaaccccctgtatacctagatgatgactaaatgcaaaatccttgggctttggtttttttctagtaaggattttaaataactgccgacttcaaaagtgttcttaaaacgaaaaataatgttaaaaaaaatttgaaagctttggaaaacccaatttgtaaaatccttgtattttttattaaaagttttgtaataaattttttaatttccca

SEQ ID NO: 723260 - DNA, 682 bp, Homo sapiens
gtcgccgattcctcctccttgggtcgccgtgtccttgggtggcgtccgaaaaatggctactaacttcctagcacatgagaagatctggttcgacaagttcagatatgacgacagctagaagaggagattctagcgagcagatgaaccgggccgtgtggcaggtgcctcccgtcgcagagctcaggccccggggtcctccagacgggcaccagcggagaccacggtgagctcgctcgtccgtgattgccagtctggaagtgtgaggaaccagagtctgcgtggcgtggtacaggagctgcagctaggccatctccaagtctggaggcccggctgaaacgtgctggatgaagagctcgcctggccaccgggccactggccccacagaccctagcacgtatctcccattgcgccaagttggaggcccccagtccaagaagccagtcacaccagcagaggatgacgacggatgatgacattgaccttgtatggcagtgacaatgaggaggaggacacaggaggcggcacaagctgcgggaggagcggcatacagtgcagtacgctggagcaatgaaggccagtgaagcctgcactggtggccaagtcctccatcctgctggatgtcaagccttgggatgcatgagacggcacatggcccagctggaggcctgtgtgcgctctatca

SEQ ID NO: 723261 - DNA, 94 bp, Homo sapiens
gcaggctgtacggaccgagggtaagatgtcggtgctaacctccctcacgcggcggtggctgccgggaccctagcaggtttcagctggagcggcg

SEQ ID NO: 723262 - DNA, 191 bp, Homo sapiens
cgcacatggtacttccagccgtgaatccaggatttgaacactgggtgagtaaggggtggagcccatgcttgctgctccgcaggttgttcacagccagtgaggtcgccagactagcagagaaggggtaggtcacgcatgctcacgtgcaatccccactcacgaacgttggtatagcgccgtgctgccacatg

SEQ ID NO: 723263 - DNA, 725 bp, Homo sapiens
ggcgaaggggcatttactggcgcgatatggtcgagctaaaagaagagaagtgtgacctagacaaccgggacaaagtggaagtagggaagagcactttgataagagaaatgtcattgacagtaaatacgtggataaatgagtagtctaaaacagttgtgaagagtatcacggggtaacgagggactacgctaaacggcatttggcatattcagtagtgtgtaggtcgtttgaaggactaaacacatgcgcagggggtcttgatgtgcgggttataatagtgtatgtttacaggacgtaaatgaaaacgaccccatcatgtggtatcttttatagataaaaccgtttccaataggtcgatttgatgggtgatatcggcgaatgggagtgttagagtgcgctataggctagtagaggcttaaccagagtgagattattcggcgactgacaagacgggcgagaatagaaacggtggtctcatcggtaattggaatgctgcagagcggggaatacattgaaagagggcgcttaccgcgtgcagttaaatcattaaggctccattcttcaatgattcgaggatatagtaacgtggtcttccacacagctaatagatgttaaaggttggcggctgacgtcttgtcatagatacgattggattatagcggctatgactcacgtcatatgtatccgggagttagttagacagtgatacataggtccctgcgcct

SEQ ID NO: 723264 - DNA, 417 bp, Homo sapiens
cctaacatgcttcgagccatctgtaagagagtgctcttctagtaaccctgaagactgcaggtctcgttagggccggtagagggatctgtcgtgactgaaaagactctcatgaggctcaaggtggttgggtttaatactttgaacctgaacacaggaatagatcactttttaaaattgttttcagcacctaaaattatggccatggacagctccatgcaagggtcccctgactacaaggacctgccccgtgatgtggttgtgttacccagaccctgcctgtccagctgtggaagccaggctgtcaatccgaaaatgtcagcgccttgctcagatcactccagtgtgtgaggatcataatttagataagaacccagatttcttggtttaaaattggtattttctactttatctcatact

SEQ ID NO: 723265 - DNA, 443 bp, Homo sapiens
ccaggctcaaattagtaccagacgacaagaacatctccattttgatggctgaataaaggtcatggccctcatcccagacagtagttcacagacagactcactcggactcttctttgctggctcccggcctggacaaaccaacagcacagaaccttcagcctggccagtgagtggctgtgcctttgtacccatggcaagcacgacacccatcgtgggaggaaacaagtgatgtagcttagcacgggcactgtgtcttctcaggacgcctcagcagctctctcccatgtcagcccttcagcagggaagacccaaacctgtcaggaggagactgtcccagacctgggctcccacgcgatgtccacaactactcaaagatgcaggacgcagcctccttgaacctgccatttccacaggggccagaggaggggggtatacacaaaagc

SEQ ID NO: 723266 - DNA, 302 bp, Homo sapiens
tctctccacacgtggacggaaaccctacgagatgtgctattgtcagagaagcttcaggaatcagagtagactggctgtcacaggagagttcacagtggtgagaagccctatagatgtgatcagtgtggaaaagccttcagtcagaaaggaagcttaattgttcacatcagagtccacacaggcctgaagccctatgcctgtacccagtgcaggaagagtttccacaccagggggaattgtattctgcatggcaaaatccacacaggagagacaccctatctgtgcggccagtgtggagagag

SEQ ID NO: 723267 - DNA, 103 bp, Homo sapiens
caccatgcgcgcaagcccatctccactccaaaagtttagacaaaatgccagggatgttcttctctgctaacccaaagggattgagagggaccactcattcact

SEQ ID NO: 723268 - DNA, 754 bp, Homo sapiens
gtaatgtgtactagcatccacggatataacttccacatgatgatgtgagaattttatcaattctgtaaccgttacccataagggtgaaagtgctgtggagcaagtacgaccgtttccagttccgagcttcttctccagttgaagagctgcttactatgcgaatgatgaaggaaattctgacatgttagtggtgaccactagaaagcaggccttcttgtagttgaaaaagttgagaaaagtcatgaaagaagctagaagaagcgtgttaaagttaattgccgttctggagaagaagataacagcacaacttcgagaacaagtgggagaatggaaagagaacttaggcatgagaaagaaagatgtgaccaactgcatagcagaataaaaagggtcttactgaagtaacactaaagcttacaaatggaaaagtgaagagttgtaagaagaggttcagtgatgctacatccaaagcccatcagcttgaggaagatatagtgtcagtaacaccataagagcaattgaaagaagagaaaccgaattagacagtttaacatggacaaactcgaagaatggcacaagatgaaagagaacaatgttgaatgtcagttgaagaagagaaggtatgaaaaggaactttataaggtacatctgaagaatacagaagatagaaaataccaagcttatgtcagaggtccagactttaaaaatctagatgggaacaagaaagcgtgattactcatgttcgaagaagaga

SEQ ID NO: 723269 - DNA, 210 bp, Homo sapiens
gctcgacggtttagctactatttcttctaaagttgtttaacttcatatggcagaaaacagccaatgttgatttttttggcaggaaaatgacatgatctagttaagaatttctctatcagaagtatcaaggatggattcctaggaaagagaaaatacgacatttcccagttgaaatgctatcatctcccactcccggggggaggtcgacgc

SEQ ID NO: 723270 - DNA, 948 bp, Homo sapiens
agcgtgtggttatttctcttagttcttctttatgccaagtaatttagatgtatattttatattttcttttatttttaaagatagggcctgactctgtcacccaggctgggatgcagtggtgtgatcatagctcactgcagactcgacctcctgggctcaagcaatccttctgcctcagcctcctgcttagctggaactacaggtatgcaccaacaacccagctaattttaaagaaaattgttctgtagaggtggtgtctcactatgtagtgacaggctggcactcaaactcctggcctcaagtgatcctccatgctatggactcccaaagcgatgagattacaggcatgagctaccagcattcggctattaggctgtgtatttataacggtttctaccatgtatacttcagggcggaggggaggtagtagataagtagcactaggatcgatgacctacgactcctcatgaacatggacacacagccgatggcgattggacaccaagacgaaactgctcgtctagcacacagcgcaggaaccaaacaaggactatagttctggcatataaggcacaggtacccctagtgggcgacctcagataccggacagcaacgagtgaaacgtggagtaaagaggagtacaagacacatactaactactcgtatagccaccagacgggatggaaaggggtgaagagtagcggcacagggtcgtcactagaaagagccagggtgagaacaataggcctggcccgggccgcgcaacgcgaacccataaccccgtgaagacacagggaaaagatacaacacacaagacaaaaaaggaagggtatcaaagtgaaacgcaacgacaaagaagcaacagtgaccaagaacaccacggcccacaccaaagacagcaacggaaccgcacaaggcagaacagggggaaaatataagacacgagac

SEQ ID NO: 723271 - DNA, 549 bp, Homo sapiens
tcatggctgttctagagtatccctatactcggaaatcggattgtccaatgtaatagtgtaatacattactcatatgtttgtggtgatgctggtttatataaacgtcctgcagtgccagtcctataaaagtatagcacatgcaattacgcacagtacataatagttgatagtgaaaataaatgactatgttactggtttgtgtatttacgatactatactttttattgttatttgagagtggactctttctacctataagaaattaactgtaggccgggcgcagtggctcatgcctgtaatcccagcactttgggaggccaaggcgggcagatcacgaggtcaggagatcgagaccatcctggccaacatggtgaaacccatctccaccaaaaatacaaaaattagctgggcatagtggcacgtgcctgtaatctcagctcttcgggtggctgaggcagaagaatcacttgaaccagggagtcggaggttgcagtgagctgagattgtgccactgcactccagcctggtgacagagcgagactccgtctc

SEQ ID NO: 723272 - DNA, 368 bp, Homo sapiens
ccgcgcccggccatatctgggatattttaatatcattgaaatgtatgtaaattctagatgcatatgttactatgctgagggtcattcaaagcagtgtaagttgatgtcgtcctcaggaggccttgcaattacagtctgtgtcagagacttgtgctcatttttctttttctttttcctttttttttttttttgagacaaggtcttgctcttttacccagcctggagtgcagtggcactaatcatagctcactgcagcctcaaactcctgggctcaagttatccttgcatctcagcatctccagtagctgggactacatgcatgcaccaccttgcccagctaattttttaaaaattttcttccctagaga

SEQ ID NO: 723273 - DNA, 291 bp, Homo sapiens
  misc_feature (12)..(12): n is a, c, g, or t
  misc_feature (51)..(51): n is a, c, g, or t
  misc_feature (98)..(98): n is a, c, g, or t
  misc_feature (101)..(103): n is a, c, g, or t
  misc_feature (106)..(106): n is a, c, g, or t
  misc_feature (149)..(150): n is a, c, g, or t
cttaagtatgtnatccattttgcactttgtttacctctttaatatggatgnaacttattaaaaatgcttggcctgggctatttcaacagggtatatantannnccnaaaaactagtgtgccaaatggtataggaacaactgtacttttnntgatcagttggcatgaagccatagaattaaattttggctttagaatacagatgtgttcattacattccccaagggtcaaattggagcttttaaagaattaaagcttctatgagtatatggtttaagacttaacttattaga

SEQ ID NO: 723274 - DNA, 178 bp, Homo sapiens
tctaatcacgtgcattgtggacactggagaattttcttgcacacacgtctgcgtggacaccggagaatcttctcgccatacacactctgccgtggacactggagaatccttctcaccacacacgtccgccgtgactctggagaatccttctactcacacacacgtcgcgccgtggaca

SEQ ID NO: 723275 - DNA, 158 bp, Homo sapiens
tcagtctgtggctcatgcctgtgatcccagcactttgctaggctgagatggggggattgctttaggctaggagttcaagaccagcctggtcaacatagcaagactccatctctattttatttaaaaacatttttttaaatctttataaaaaaagaatg

SEQ ID NO: 723276 - DNA, 419 bp, Homo sapiens
  misc_feature (143)..(143): n is a, c, g, or t
  misc_feature (232)..(232): n is a, c, g, or t
  misc_feature (291)..(291): n is a, c, g, or t
  misc_feature (322)..(322): n is a, c, g, or t
  misc_feature (342)..(342): n is a, c, g, or t
  misc_feature (344)..(344): n is a, c, g, or t
  misc_feature (351)..(351): n is a, c, g, or t
  misc_feature (410)..(411): n is a, c, g, or t
agatgcttgttctgaaagtaagatcagtgaactgcttttcagtctcaatctttgagaattgtaaattcatcaaataattgcttacatagtaaaaatttaaggtattagaaaacctgcagaacaaataggattatatattaaanattttgatatgtaaagctctacacaaagctaaatatagtgtaataatgtttacactaataagcaaatatgttaatcttctcattttttnaactgtcaaataatcttagtgatatgcctattaatagttttaaatccaccaaaaggctnatctggctttttaaaaaaatatgaaattctnacagatgttgattaggtaancnacaaatnaatttcaattttaaaatgatgagataaaaataaatataagatttttcttgtgaatgtanncaattaat

SEQ ID NO: 723277 - DNA, 310 bp, Homo sapiens
cgtcgacctttttttcaacttgaaattataatattgattttattcatggtctgaaacatgtataccaagatgcactatagagtttctgtgtaatgaagacacttggctttgaccccctgggctcctctgctggctgttgagtcaatctattattttccaagtgtcctttctggctctctgaatccagaactgggtagactcattacaagaccaattctctggtaacacctgagcctgggtgttaacgtttttccctgcagacagaagtgatcagggttcccttgtgactacagaactttttcgtcgacgc

SEQ ID NO: 723278 - DNA, 224 bp, Homo sapiens
tccatcccaagatatggaccgaggatggaatgataattttcaaaaatatttgtaaggaggtttaggtgtcaaattgtgacttgaatttgatgaccttctaagcccttcctgatgttatgattctgttttaatttatatattgtcaaagactattcaaataaaaaacaccttctatgccaggtgctggaaacaaaaagataaacataacacagtctagtatttta

SEQ ID NO: 723279 - DNA, 504 bp, Homo sapiens
  misc_feature (55)..(55): n is a, c, g, or t
gtcacatgaggtccctcagccgtgtgtgggtcacactttcagaatgctggtactntggtgctgtaaaggaaatagcacttgaacataaatttaattttctcagcaaggtcatttttactttctgcagaaagggtacactcaccagcagtttggccaggagagtacaccgaacaaaggagacagggtcatttataacctgacgcgttcaccttactgctgtatctggtttccactggccagaacaggacctcgctttctgtatttgtcctgattggctagcaacttagaactttttaaaagagcaaaggtagaggagaacaaagggaggaggaagtaacttgtggaatgctgagaaaggtgaaaacacctccaaataaggaagaggaataggctatgacctaacgcccgcttggactagtataagcatgccagggcaaatatttaggcgaaattgcgggacctaagaacataaagtacgttgatttttcttttcttttttttttt

SEQ ID NO: 723280 - DNA, 800 bp, Homo sapiens
  misc_feature (99)..(99): n is a, c, g, or t
  misc_feature (368)..(368): n is a, c, g, or t
  misc_feature (528)..(528): n is a, c, g, or t
gatcagctgccgaatgataggcctgtaaggctctgcgaactcgaaccccgaccgaatccgttgctcccagcgcaggattgctgaagactgcacgacganagattttattacgcgtgagaggagcgccgaggggatgcctgtgagtgagaagtcctctgcagggaacacgaggacataacctcgggagatgagtaatgaggctgtgacatacatagggagacgccttgactatgcaatcgacagtcggtccctaaggcgtgtcaggaatagtcctagtaggacggacacgtacatgtgaggagctgaggcgcttgtgagcaaataggccaggagaacagagagcccctacgatcaggctcaactctggnaagacgtgtgtggcgataggaccttcagtcgtgatcactgacccacgtgctgatgagcctgctgccgtctgtttggtgcaagtgcgtcctcgtatgtatattgaggtcagtgactgagacgatcgagtccaggaaagttggtggcacgaataggataacntagctttttcttcaagtgaatggacttgatcactagaagcttccgcgttctgacaagaaggcgcgtagttgaaagatggctccatggaattgctcgaagaactcgagaatgagctagatgatttcgaatgacggggggttatgaaggctgggtaagctgtagaagattactagcgcagagtgactgggagaatatgaaaatacgtgggaattagaccttgtacgattgtgaaatttaattcagatgatttagtagggttaatgagaacgtgt

SEQ ID NO: 723281 - DNA, 890 bp, Homo sapiens
  misc_feature (69)..(69): n is a, c, g, or t
  misc_feature (73)..(74): n is a, c, g, or t
  misc_feature (81)..(81): n is a, c, g, or t
  misc_feature (88)..(88): n is a, c, g, or t
  misc_feature (90)..(90): n is a, c, g, or t
  misc_feature (96)..(96): n is a, c, g, or t
  misc_feature (117)..(117): n is a, c, g, or t
  misc_feature (123)..(123): n is a, c, g, or t
  misc_feature (134)..(135): n is a, c, g, or t
  misc_feature (147)..(147): n is a, c, g, or t
  misc_feature (154)..(154): n is a, c, g, or t
  misc_feature (156)..(156): n is a, c, g, or t
  misc_feature (160)..(160): n is a, c, g, or t
  misc_feature (163)..(163): n is a, c, g, or t
  misc_feature (173)..(173): n is a, c, g, or t
  misc_feature (177)..(178): n is a, c, g, or t
  misc_feature (196)..(196): n is a, c, g, or t
  misc_feature (198)..(198): n is a, c, g, or t
  misc_feature (205)..(205): n is a, c, g, or t
  misc_feature (210)..(210): n is a, c, g, or t
  misc_feature (226)..(226): n is a, c, g, or t
  misc_feature (228)..(229): n is a, c, g, or t
  misc_feature (246)..(246): n is a, c, g, or t
  misc_feature (249)..(249): n is a, c, g, or t
  misc_feature (253)..(253): n is a, c, g, or t
  misc_feature (287)..(287): n is a, c, g, or t
  misc_feature (294)..(294): n is a, c, g, or t
  misc_feature (298)..(298): n is a, c, g, or t
  misc_feature (315)..(315): n is a, c, g, or t
  misc_feature (885)..(885): n is a, c, g, or t
aaggacagcggatcttcaacacacacctatatggccatgcgagccacctacttggtggggtaacagggnaganncaaaccnggaggcngntttgantgagctgattcagcagaaaanaagganaggaacacagnnccacaggctgcnctgcgcnangggnganagggcagggngagnncccgggatggacctgggnanggggganatagngggggggggaggcggngnngggggcgggggcatggnagngggnggggcttgggtgggcgcctgcgggtcatagcgtnggcgggngtcnggcggcgagggagcggngagggaagtggggggcgaagattcagggggcctcggggggcgggggtgctcagccaccgggacagatgatgaaccacctcttcccggtgtgcaggactgaagggcagaacagaaacagcacgctgagtgagtgagcgcctttccaggccagtgtgacccccatcacctgcaccagacttgccacagtgggtctgtgaactcctttacacctatgggattttctccaggaagggtgtgggcagagaacactgttcccagtcattaatccccaacgcttccctccacgaagcaggtggttccccaggctccttggtaaagaggccctggtgatgggcttctgcctgctcttccctcacaccagagggcaaggggtgcacagcagaacctggggtgcctcactggcagcccccgaagctcccgagaggacccctcgcgtaggcttggttcctgggatgcccaaggcaccatccatgaaggccgtgatgccggttgcaggtgacagctcctcggacagggcagctgtccccagactggggcccctggtcaccacatgcttccataatccccccnaagca

SEQ ID NO: 723282 - DNA, 390 bp, Homo sapiens
aacatgacagtgctgaaggaagccatacctctgggcagagtaacgggcgagaccaccaagcactggccaaggcggtccaggttcaccaagacactctgcgcaccatgtactttgcttgacatgttttaatgtttaacgattgtgtaccgagtgggattctcgagaccagctacactcagacccacaaatgggcagcccttccggtgcaagcagccttggacattaagcggcctttgttttaattaaattcccggttttccaaaatcccttccgtcccagatttcaaacttggattttgaactgcagcccggattagaacccaatgtcataggaaaaatggtttgctaaaatttataagctggttattaaaacagagtaccgtgcgtccta

SEQ ID NO: 723283 - DNA, 836 bp, Homo sapiens
  misc_feature (2)..(2): n is a, c, g, or t
  misc_feature (72)..(72): n is a, c, g, or t
  misc_feature (84)..(84): n is a, c, g, or t
  misc_feature (86)..(86): n is a, c, g, or t
  misc_feature (109)..(109): n is a, c, g, or t
  misc_feature (113)..(113): n is a, c, g, or t
  misc_feature (115)..(115): n is a, c, g, or t
  misc_feature (211)..(211): n is a, c, g, or t
  misc_feature (244)..(245): n is a, c, g, or t
  misc_feature (248)..(248): n is a, c, g, or t
  misc_feature (455)..(455): n is a, c, g, or t
  misc_feature (539)..(539): n is a, c, g, or t
  misc_feature (588)..(588): n is a, c, g, or t
  misc_feature (616)..(616): n is a, c, g, or t
  misc_feature (671)..(671): n is a, c, g, or t
  misc_feature (674)..(674): n is a, c, g, or t
  misc_feature (769)..(769): n is a, c, g, or t
  misc_feature (795)..(795): n is a, c, g, or t
cnttgccgccgtctgcatttcctggaatattgctctttgaacacggccacattcaggtttgtcaaatatatnctcttccgcttntngagtcagttggatgtcatctctnactngngacaggggtttcttacaaggaggaagcttttcagaatcttttttaaatccaaagtttttccagagctcattgagtttgatctgttaccccggcttnttcttggcatttttttttttttttttttggttnnttnctggctttttgctcagcccactggctctggcaggtcctagaggtttgatcttggttgttgaaagagagtttgctgaactggacttatatagctcaggaaccttgttccttagaggtgtgtctttttttgagagatgagagaaacatagcttggaggtctggtcactttgactgttaagttacttaatattgcaattagattgctctnaattagagttcttactagagctctgagaaagctttgatgcatttgaactctgcagtgagatttctccactttcctgggactgtnaagaacatgccccttctcgtaagggatgagaattatcgtcactggactnctcgctctttaactgcgacaaatcaganatattattctcaggcaaagaggtgggggaatcgctctttcttcggaactcctgcnatnctgttcttggagaggggctcggcgttcttgaaaaatctccaagaactccagaacaactaaaaaaacttcttagtgttcccaaagtgggtggtganatggtccttgttaatttgctgctctnaaaagagtaggactcttcatctgttaacactgttgccttgt

SEQ ID NO: 723284 - DNA, 286 bp, Homo sapiens
atgatacatccacaaacagcgtgggcgtacacatcatgcatcgtccttagaagacggatcatcgatgcaactgtgagctgcgttctctacttgagttgctagcagaatagtaatcgaggatgtaagcccgtgggcgatctatcagaatgactgcgccggtcaagcttcacgcggtttggatgacaatggctgttactacgagggctatgtggttgattgaagagtatgcaatgagcgattttaggtctgtttgtgtaggtagcactctgtttgtggaggtagcact

SEQ ID NO: 723285 - DNA, 1497 bp, Homo sapiens
  misc_feature (863)..(863): n is a, c, g, or t
cgcacctgcgcgacctgcgacgccacccgcacacgcgcccgcctccacctccgcacgcagcctacacccctgcgccacacctgcacgcacctctgctctgcacccacgccccctctctgcacctgcacccacctgcacacccccctccctccgccgcacgccctccccccctctcccttccccgcctgcgccccacctcccttacccgccccccctacctgcgcctctctcctgcacgcacaccgcccccgcctcccctgccccccactccccacgcccgcaccgccccgcacggcccccacctcctcctaacccccgctctgcccctacttccacaccgcgccgcctctcacctgcaccttgcctcgcacctctcgcccctccacacgaccccctcccaccactcctctgcgccgcacccctcgcgccgcacacaccacccgcgccccccacccaccttctcctgccccccaccgtcaacctccgcactctctcccttgcccacagcccacgcacctctggcgacacctctcacgcacctcctctatcaccaacacgcgcccctaacctccacaccgccgcccccctcttgcgctctccctcttatgctctaacccccccaacccccttccgccacgccaaaacctttgcgcccctcctacgcccagcaacttaacaccgcacacgcgctggcgctccactggccaccctacgcgcacgcaccctacccactgcgcgcccgcccgctcccctgcctcacccgccccctggcctactccgcgcgcgcgccacccatacccgctgcccgctgccctgacggcgctgccacgcacacaccctggcacgacactgcgcacacgcantccccccaccactccactccgctgcgcgcctacccccccctgcgccccagcttgctgctatctgcatctaacctgcctctaaccccgcgcacgcaataccctggcttcgccccccaaacaactaacacttcaaacgaactgcctccctggcgtacctgggcatctgcaaacgccgtgacccgacacaactgctctaaacgccccgctgggcactctcacacgtgccacccacgcactcctactgcacccctactttcccaaaaacaggcctcaaactaggccaaccacccccagagcttaccgttcttctggccttgcttccaagcccgaccaaactggcccttttcctgcaatggctggcctctggcaagccgctgaaccaccaccaaagcttcccttgcacgggaaccccccaccttccggcgacttcccccttggctcccaccgacacgggcgaccgaggcttttgagcccccttgggacgcgggggctactcccgccccacggcttcctccccacttcccccggctgtgctacgccgccccaccgccggcccccgccccctttcgccccccccccccctcccgtgcccccccccccctccacccccctgtccccctcccccccgccctgt

SEQ ID NO: 723286 - DNA, 900 bp, Homo sapiens
tgtgtctctgctgaagaacctgaagtcacgccaatattgtgaccctgcatgacctcatccacacaggatcggatccctcaccctggtgttttgatgtacctgtgcacacgtgacctgaatgacagtaatcttggaccagctgtgggaacctcatgatcatgctacaaaccggtccatgattttctatgttccagtcttgcttctctgtgggacctcgctcctactgtcacctacacgccaagtatcctgctaaccaggtgacctgaagcccccaagaaccctgctcatcaacagagaggggggagctgaagctggatcgactatggactggccagtcgcgccaagagtcatgattgcgccacagacagagcttagctctccaattgcaagcgtcggttgtcgctcgttgtcgcgctacatggcctccccctgacttgttgctcgctttggcgatccatcgagagatgctacgtcctcctcctcgagttgagtttgggttgcgtggctgtgggcctcgggtctcaacatactgactagttggccgcccagggacgcccccgtcttctcgcggggctcctaggtggccagttgagctgacgcttggagctcgatctgttgcgggctcgctcggggacgccccacaccgacatacgactgttggcccctggtcggttggacggcgtccgttctcttgggagcttcacgtcatctggcagcctttcctccgtggctaccttgccgcgtcagccgctccatcctaccaatgcggcccaccgttgggatccccgatggcattcggcctcactgagcctccggtcgtgaatggtaccacaccgcactttgtagcaaccgcttgcttagctctctgacttcggcctggggagcggtgcccctgacacg

SEQ ID NO: 723287 - DNA, 760 bp, Homo sapiens
aaactgttactacagcgattctgtctggcacgcgcggcctaataggtagtattaacatggtacatacctgtttcctcatgagatcctgctcgatgagttacgttagtttgctgtactcctcactgatctgcctggcctcgaagtcgctccacacgagtggttgcgtggatatcacagtgccggatgatgcgcagttgctgcacgcgtgcactttacttgttatcctattcataacgagagagtgcgcagattgggcgactacgtatatcttatatttacagacttccggcttgttgaaattaatagtgttttcttttgggaaatttttaatttttgtttattttgctttgttttctttttcatggaagccttaatggtgaagcaaggcaatgacacgaggacaacaaatcatagcaacttggttgaacttgcaaaatgtacctaggtcacacccccttctttacttcaagcagaaactaaacccaaactggaaacctattttgacctgagctgaaagctttggccatttcttatgcccactatttaccctctaggaagaagcatggaaaacttctctagcttttaccagtacacctttctaaataccatttcccactggagaaatggctgatttctgggtcaggagaacacatgtacctaggcaaatgaggtatatcttgtcattccagataaacaaaaaagacgtacaagattgcactgccaaaggactcaggagccaaaagaactgagaatatgccat

SEQ ID NO: 723288 - DNA, 651 bp, Homo sapiens
tgtttcacccgtacctgggaaaacatcgcgtgaccaaaccagggcttctaatcacacgaaacgtggggctcacctatggagaactggaacgcacgcctgtttccaagcgccgcccaatgggggttgtgcacacacagctaaatcgggccacgtgggagcaaatcgcttttaacgcctcctaaaccctaaattctctctttcctactaaggcggttatctggaactctttgctgcctatgaacggttgataaggccctcgtgtttaggataacaccttccagcatcttcctggtgggaaatccaagtacgggtattaggccccctcctgactgtgggaatagacccaacggctggtcaatatatgcgcttagttatgcttatagagagttcgcaaataggtcatactctaaataacgcgtgctctgctaacagaggcctgtacggactgttattggattcagggacagtccctgactcggtgcagtccgcctatctaagaggttcgtttgttcaagcgatgtaaagtgcctacgtgatctgagtctcagaccggagtaatccaggtcggtttctatcatacattcaaattccttcctgtacgaaaggacaagagaaataaggcctactcacaagtacctccccgaaatggac

SEQ ID NO: 723289 - DNA, 277 bp, Homo sapiens
ccccgcgtgtacgagataagcaggatgtactaggggaatgtaaaaggcaaacttaaacacctgcatcttcttgaagcatcagttttacgttaccaaagtggtttagcagtcataagatgacctatttttatataaaagttatattatagaataaaatgttcatacgcatcgacggttaaggcatcaaacatcaggatctggcacaggtaattcttatttgccacagtgggttatgtgttcactctcctctcacctttcatggtctttgggtgttcca

SEQ ID NO: 723290 - DNA, 897 bp, Homo sapiens
  misc_feature (63)..(63): n is a, c, g, or t
  misc_feature (377)..(377): n is a, c, g, or t
  misc_feature (498)..(498): n is a, c, g, or t
  misc_feature (553)..(554): n is a, c, g, or t
  misc_feature (557)..(557): n is a, c, g, or t
  misc_feature (559)..(559): n is a, c, g, or t
  misc_feature (562)..(562): n is a, c, g, or t
  misc_feature (565)..(565): n is a, c, g, or t
  misc_feature (715)..(716): n is a, c, g, or t
  misc_feature (732)..(732): n is a, c, g, or t
  misc_feature (736)..(736): n is a, c, g, or t
  misc_feature (739)..(740): n is a, c, g, or t
agaaggaaaaacaggacaaaatctacttcatggctgggtcaagcagaaaggaggcggaatctnctccattgttgagagacttctgaagaagggctatgaagtcatttatctcacagagcctgtggatgaatactgcattcaggctcttcccgagttgatgggaagaggtttcagaatgttgccaaagaaggggtgaagttgatgagagtgagaaaactaaagaaagtcgggaagcaacagagaaggagttgaacctctgctcaactggatgaaagataaggccctcaaggacaagatagaaaaggctgtggtgtcgcagcgcctcacagagtctccctgtgctcttgtggccagtcagtatggatggtctggcaacntggagaggatcatgaaggcacaagcataccagacgggcaaggacatctctacaaattactatgccagtcaaaagaaaacgttcgaaatcaatcctagacacccactgatcagagacatgtngcggcggattaaggaagatgaagatgacaagacagtcatggatcttgctgtagtnngtngnaanggnaacacttcggtcaggatatcttctaccagacaccaaggcgtatggagatagaatagaaagaatgcttcggctcagtttaaacaatgaccctgaagcacaggtggaggaagaaccagaagaagagcctgaagacacctcagaagaggcagnngactcagagcggatgngggnganngagatggtgccggcacgaagaggaaggcggggaacgcaagggatctcgagaaggtgactgaatttacctcggaggaccgggggaggagggagttgaaggccttggagaacgggggggtccaccctctccgcggaaagggtgggccggggaggcaggg

SEQ ID NO: 723291 - DNA, 138 bp, Homo sapiens
gccgccgatgtgcatggctgctgaatggttcaagagtgtgaattccagtgacagatggaagctgcatcaccttttatgacctagctttggaagttacacagcttcatctctgctgcattcttttttttctttcttaaa

SEQ ID NO: 723292 - DNA, 101 bp, Homo sapiens
ctagaggatctctgggatgaggacgtactgattctacagtaaagggaaaaaaggggagtagtttccgaaattgaagatgaggagaaatttcttctatgggt

SEQ ID NO: 723293 - DNA, 124 bp, Homo sapiens
ggcgttctagaggatatctaacggcggtgcagcaggactgcgtaacacgtacggcagttatagagtgccaatgccgcagtggcttcgtcctccatgacaacaagcacagcaccagcacgaatat

SEQ ID NO: 723294 - DNA, 533 bp, Homo sapiens
acgggcggcaactaggacaccagcaagaaagagaacaagcccacagaatggggaaaaaaaaaagcgaatcatatatccaggatcatatatctttaataaaatagagtaaaaaaactcttacaatgcaataataaaaataactcaattaaaaaatgagcaaaggacccaaatagacatttcttcaaagaagatatacaaatggccaatgaaacatgtgaaaagatgctgaatatcatcagggatatcacagttattagggaaatgcaaacccaaacaacgagctgccactccacacctgctaggaagggtatcatgaaaaaggtagtatcaagagttggcaaggatgtgaagaaactggagccctcataaactactggtggcagtcgaaaatggtatggccactttggaagaagtctgggagttcctcaataggttaaatatagattaccatataacccagcagttccactcctaggtattaaccaagagaaatgaaacatatgaccaactgggtaagtacgaggggatcccta

SEQ ID NO: 723295 - DNA, 579 bp, Homo sapiens
ctcggcgggggagcggaaggcttgaattattccgacctgtgagcggcccctgtgcaccaaaaaaacaaaaaaaaaaaataaaaaaaaataaaaaatagaggccaaaaaaagtggaatgtttcacctggtcacatccgcaataaattcctgaaaaaccaaatgggtttaaagacgaacgacattacccaggaacccacttagtaccagcagagtgacgcgagaccttcgagcggacgtacataccagcatgggggcggggaaatacgagagaatgcgaaggagaaacaccccggagcatgaggagcacccgccaaagacggataatgggcgaacatagcgacataaagggagtacgccgccatagaaaacaatcaccagaggacaacacaatagaaatacaagcccacagcgagagggtgcacaacaccgaaattcccttgggaccgggactatatactgaaaccacaggcaaaacaataacggcccgaggggaaacaatgtgacaggcaccaccacccacaaaaaggcgaacaaacacacacaaaaaagagggaagagcaaaaaaactccacaacaaat

SEQ ID NO: 723296 - DNA, 480 bp, Homo sapiens
atcaacgatcagtcaggaaacacaatattgacacaagcttagtactaccaccaagatcgttcctcttgccttggccatactaaaaaactttacttatgtcactaacagtcatggtgactacagattctgcctctctcatgtaagcagctatataagctagggttctaccagccttagctgacaggaaaaacttggctggaagccctgtaacaatcacttcattcacaatctgacgaatgaaagacaactttggctgtcaatacactacctgtcagtacaaggaagtccacctgtaaaaaaatctgcacatcactgtacaagtgtgatcggacgggcctgaaaattaacgcaacataggaattaactgcataatttagcaagcactctctaccccatgactgtaatcatgtatgcagagcagagatcagacactgagaggagatggcttctgataagcaagggggaagggagtgagtgtca

SEQ ID NO: 723297 - DNA, 295 bp, Homo sapiens
  misc_feature (14)..(16): n is a, c, g, or t
  misc_feature (146)..(146): n is a, c, g, or t
  misc_feature (148)..(148): n is a, c, g, or t
  misc_feature (152)..(152): n is a, c, g, or t
  misc_feature (190)..(193): n is a, c, g, or t
  misc_feature (199)..(200): n is a, c, g, or t
  misc_feature (203)..(203): n is a, c, g, or t
  misc_feature (212)..(212): n is a, c, g, or t
  misc_feature (250)..(250): n is a, c, g, or t
  misc_feature (271)..(271): n is a, c, g, or t
  misc_feature (275)..(275): n is a, c, g, or t
  misc_feature (278)..(278): n is a, c, g, or t
aggaggtgtgctannntctatcacaggctttctcaattaggtttgcaggagaaaaagccctaagtccctgtgtcatctagaatggtactaattatgtacagtccctaggagaatggagaaaatcataactcaaatcatcgactcantntctnttctcttcagatgagctcagagagcacataggagtccnnnnaataannggnatgtaatgnttgagataaaggattgagcttacataaacatctcgggnacaaatgcagcatagaaaacntctntgntagttaccctgagggga

SEQ ID NO: 723298 - DNA, 516 bp, Homo sapiens
  misc_feature (142)..(142): n is a, c, g, or t
  misc_feature (149)..(149): n is a, c, g, or t
tttttcagaatcgtactggagtccaaatcacttctaccacatgtaatttaaaaacatagtgaaagatgttaaacggatcataagatgcacactgaaaacacagttattgaaaaatcttgttcctagattggagttaaccatntccgctnacatatcaaaccaaatcattgtcatgatgctaagctagtgtatagacagagatatgagactcacatttttctaactgcaaagcaccctgattaagcaaatatttttgtagatgcttgagtcagaaaattggcgttttgggcattcttaaactgaattagaaacttctgaagaaaaacaaaggtagttatgattttaaaggcattagcgtaaggcaccaaagtctcaggattctttgatctagctactgtattttcttaacttcgttgcaacttgtcaaagagaatattaatattaaaggcatttgcaaaaaatctgaaatatgcttgtatctcctttccgtctcaaatttttaatcattactttaca

SEQ ID NO: 723299 - DNA, 145 bp, Homo sapiens
cccggcccactgtgctggctctttttctgtgggtttctcccaggctggcggctcctggctgcatgcccccagtcttgcaccatccatctccatggcctcccacattcacagccagcacgctgtcccacccacccccggggtcccg

SEQ ID NO: 723300 - DNA, 344 bp, Homo sapiens
tcttcagccacttctccagctcctacaggttctggtctaagtagtcagtgacccgtctctccttcatctcaccaggtctcccttcacaccgtctagccagaatatcttgaaaagttttttcagaaggtgcttaagatatctggctttctacaaagtgcctagacccaaccttgtaatatttttctaggtaatcccaagggttaaaatggcttagataggtgtccttgaagttaacgcctgattccattatgtctcacttctgtacctctgagagcactgccctccttctctttcctacaaaacacagagagtgaccctgcaaaaggtgtcttcctgagtctcag

SEQ ID NO: 723301 - DNA, 141 bp, Homo sapiens
  misc_feature (117)..(117): n is a, c, g, or t
tggtccgcgttcgcttagctgaaagagtttctaactgggagaccaataattcagctctccactgtgcaaagcatctgtcatttctataataaaagtcttcccatgttcagtccactntggctctggaacctggatgagtca

SEQ ID NO: 723302 - DNA, 190 bp, Homo sapiens
cggaatcagcggggaacgatctaatctgccgtgggcctgtcgtgccagtcctgggagcgagatcggagtcagaaatagagttcaattactacacgagcattcaatcaaattcattagaataattataagtatccgtccaggcagtgacagacaggattgcatttagtagataaaacgtgtaaaacttgaa

SEQ ID NO: 723303 - DNA, 1054 bp, Homo sapiens
  misc_feature (313)..(313): n is a, c, g, or t
ggtccagcaaagttcgtcagcttgaactggccaagaaccgcctctatcaggccattcatgagagctgatgacatcttggcacctgaagttctgcatggagtggagttcaggactgcttgtgaggagtgaagattactgagacatggctgcgtgcacatattcatcggtacttgtgcctggacaagtcgggtcattgagctcagccgacagggcaaagcaggggagcactgattgatcgccaacctgaaacttgctgcaggcaagctgagcaacgtctcagagccattgtggctaggagaagtttgccagttanacaccaaggaaggtgatttgccccaggtggagcgcttcttcaagatcttcccactgctgggtttgcatgaggagggattaacgaacagttctcggagtacctttgcaagcaggtggccagtaaagctgaggagaatctgctcatggtgctggggacagacatgagtgatcggagcagctgcagtcatctttgcagatcacacttactcttctgctttgacagggattgcccgcatctgctggagacccaccaaccactagtggagacctaattatgggccagggagactctataccctgatcacatatctgcaggtggacatgtgcacagacacggttggacacacgtcggtagcacaacttcacgccagccaaagaggactacccagcccgacagttgccgggcactgctgcgagatccgcccctgcttcagaacataccgcaccaccacgaacacagatgtgaacccctgatgaccctgtgaccccagtccatgcactgaagggacccgcacctgcaatttgaagtgacccgccttcggcagcgtacacagctcagagccggctacccctcctacgaaacagcagggcatacgcgtcacttaatctctcgagggttgggaagcacatctccagtggtcctgaagaggcgcaagtagcgacgacgcgcaacccccgcacagggcacgctgcacaaacccacttcacataaccggtacttcacgaagcggcgagcagcggc

SEQ ID NO: 723304 - DNA, 105 bp, Homo sapiens
gtaccactttttttagagatagggtctaactgttgcccggctgccgtgagctgtgatcgcacccctgcactcccagcctgggccaccgagtggaccccgtctgta

SEQ ID NO: 723305 - DNA, 608 bp, Homo sapiens
gagttagagcaccaatctatgttagatggtcctagtatcaatgcctctttagaggtatggtctccacagggagagatggatgctggatttgtagccatttatatacaccgggtccagacagaataaagtaaaaaaaaaaaaaaaatggccaaaatcagcagatggtgacaaaagtgatccctggctgccctcattgttcattagcataagacacttccaccagccccatggcagtttataagtgctatggcaacaaccttgaagtcaccactcctttccatggcaatgacctggaagttactgccccttttctagaaagttctaattaacctgcctgtcaattcacatcagcctgccccttaatttgcatataattgaaagtggatatacatgagtataaatacagttgccaacagcccatacttagctgactttgggtgcacagcctatgagttagcctgctctgcaaggagcagtaccgttcaagcaaatgttgctatctaacaccactaacttaaccttaagttctttcctagccaaagccaagaacttctgctaagccccagttttggggctcacttgtcctgcattactaggaggaaagttat

SEQ ID NO: 723306 - DNA, 728 bp, Homo sapiens
  misc_feature (235)..(235): n is a, c, g, or t
tttccccaggggttgtttttttttgacgctcatccgtcccattccccatagcgttttttttctgaggttttgcaagagttaacttacctcgggcgggttatggtttcccaaagtgtgtgtgtataccggcggtgggtgttcccaacccagcacatctttgtgggcgtgtccgttggaaagctaaggggcaagttccagtcttgttcacgggttattgtggcccacttgggccagntggaaggggtttggcattcgcttcctctctggggacccccaagagctgcttggggaaaagcagattatggtgtggttgcccccgtggtcttcttgcgcaaacagaccaagttgtttctctaagggggccccagccagggggagggtgagggccggggaacccctcccccctccttggcagggggcaaagcacggagcttcagctttaagttggacagcgaggagtgaggcccaccccagcctggccttgggttttttattgacccaccccagggggccaagggggttgggtttgggaggttggggacccaaatttttggccccagggttggcccccccagcccccccccttatttttcggtgtgctcctgggtgttatttcccttttattttaggggacccagccccggggggagggaggagggggtgggcatgggcccaaaggtttttccagtgtgtttaaatccttgaaaataaaccccccctgcccccca

SEQ ID NO: 723307 - DNA, 961 bp, Homo sapiens
  misc_feature (817)..(817): n is a, c, g, or t
  misc_feature (831)..(831): n is a, c, g, or t
  misc_feature (845)..(845): n is a, c, g, or t
  misc_feature (896)..(896): n is a, c, g, or t
  misc_feature (931)..(931): n is a, c, g, or t
  misc_feature (941)..(941): n is a, c, g, or t
gcaggctggtactggtccccaagtcgttacatagagttcttccagaatgtctccatggtgtctgctgcccccccaggtccccgagtgccgccagggcccaactcatcacccctacggcactaatcggtgcatgcaggagcagagacgctggcagctgggctgcactggggatggacaacgcacacgagaattcacacacatctggcattgtcctttggtgcgatctgtgcccggagtggaccagttgggctggtcaactctggcaggacagctgtgtggtgaatccggtcagacttggccgtgtgaggctggagctccctatgcttgagctgattggctgcaggggagcttcgtcttgggcaaggaagggaccgatcggtaccgcatggtagtacgggggtgcccaggcaggggacgcagtgcacctaccactgcactgccgctgagtggattcaggatcctgatggcagctgggcccagattgcagagaaaagggccgtcctggcccacgtggatgtgcagacgctgtccagccagctggcagtgacagtggggcctggtgaacgtcggatcggcccaggggagcccttggaactgctgtgcaatgtgtcacggggcacttcccccagcaggccgtcatgctgcatactctgtaggtcgggagatggcacctgcgggggcaccttgggcccgtgccgcctggtagcccagcttgaacacagagggatgtgggcagcctgggccctggctatgagggccgacacattgccatggagaaggtggcatccagaacataccggctacggctagaggctgncaggcctggtgatncgggcacctaccgntccctcgccaaagcctatgttcgagggtctgggacccggctttcgtgaagnagccagtgcccgttcccggcctctccctgttacangttgcgggangaaggtgagagggggcttgg

SEQ ID NO: 723308 - DNA, 767 bp, Homo sapiens
  misc_feature (599)..(599): n is a, c, g, or t
  misc_feature (665)..(665): n is a, c, g, or t
  misc_feature (676)..(676): n is a, c, g, or t
  misc_feature (697)..(697): n is a, c, g, or t
  misc_feature (719)..(719): n is a, c, g, or t
  misc_feature (734)..(734): n is a, c, g, or t
  misc_feature (761)..(761): n is a, c, g, or t
gcaggctggtactggtccccaagtcgttacatagagttcttccagaatgtctccatggtgtctgctgcccccccaggtccccgagtgccgccagggcccaactcatcacccctacggcactaatcggtgcatgcaggagcagagacgctggcagctgggctgcactggggatggacaacgcacacgagaattcacacacatctggcattgtcctttggtgcgatctgtgcccggagtggaccagttgggctggtcaactctggcaggacagctgtgtggtgaatccggtcagacttggccgtgtgaggctggagctccctatgcttgagctgattggctgcaggggagcttcgtcttgggcaaggaagggaccgatcggtaccgcatggtagtacgggggtgcccaggcaggggacgcagtgcacctaccactgcactgccgctgagtggattcaggatcctgatggcagctgggcccagattgcagagaaaagggccgtcctggcccacgtggatgtgcagacgcctgtgtaagtgcccacttatacatcccactgtgggagctgggaagggaacagtatcctggtgggcactgtggnccacagggggtacccagatagcccatcatactgactccaaggaactcatcttcccacagaagttgnagcagccttgnctagcatttctctcccccggncccttgaatgggttttctctgnctcagaaattgggtnatagagataggcaggccccatgcctgnaggggt

SEQ ID NO: 723309 - DNA, 296 bp, Homo sapiens
cacaacgtataagtgcatcaagcgaatgtggcatagacacacaatggaatggtatgcagccatgaaaaaggaaatcctaccatttgcagcaacatgggtgggactgaaagatacaatgtgaagtgaaatgaaccaggcacagagagacaaatatcgtatcatctcataggtagaatctaaaaaagctgaacgcataaacgcagagagtgcaatggtggttgccagggcaagactgcttcatgaacgtgtttggcaaagaacataacatttcagttggaggccaggatcgctgtctc

SEQ ID NO: 723310 - DNA, 783 bp, Homo sapiens
  misc_feature (639)..(639): n is a, c, g, or t
  misc_feature (653)..(653): n is a, c, g, or t
  misc_feature (667)..(667): n is a, c, g, or t
  misc_feature (718)..(718): n is a, c, g, or t
  misc_feature (753)..(753): n is a, c, g, or t
  misc_feature (763)..(763): n is a, c, g, or t
gcaggctggtactggtccccaagtcgttacatagagttcttccagaatgtctccatggtgtctgctgcccccccaggtccccgagtgccgccagggcccaactcatcacccctacggcactaatcggtgcatgcaggagcagagacgctggcagctgggctgcactggggatggacaacgcacacgagaattcacacacatctggcattgtcctttggtgcgatctgtgcccggagtggaccagttgggctggtcaactctggcaggacagctgtgtggtgaatccggtcagacttggccgtgtgaggctggagctccctatgcttgagctgattggctgcaggggagcttcgtcttgggcaaggaagggaccgatcggtaccgcatggtagtacgggggtgcccaggcaggggacgcagtgcacctaccactgcactgccgctgagtggattcaggatcctgatggcagctgggcccagattgcagagaaaagggccgtcctggcccacgtggatgtgcagacgctgtccagccagctggcagtgacagtggggcagcctgggccctggctatgagggccgacacattgccatggagaaggtggcatccagaacataccggctacggctagaggctgncaggcctggtgatncgggcacctaccgntccctcgccaaagcctatgttcgagggtctgggacccggctttcgtgaagnagccagtgcccgttcccggcctctccctgttacangttgcgggangaaggtgagagggggcttgg

SEQ ID NO: 723311 - DNA, 408 bp, Homo sapiens
tgcacatcacaaggtcgggagatggataccatcctggctaacacggtgaaaccccgtctctactaaagatacaaaaaatcagctgggcgaggtggcgggcgcctgtggtcccagctactcgggaggctgaggcaggagaatggtgtggacctgggaggcggagcttgcggtgagccgagatcgcgccactgcactccagcctgggtgacacagcgggactctgtttcaaaaaaaaaaagagtatctaggcttccctctgggatgtggggaaactgaggctcagagagaagaagtggggtgattggccttcaggcagtaggtttagtttggcccccagccccagcacatcctcgggcgaccttgtgtgctccatgcctgaggtcccgggacagaacagtggacgggtca

SEQ ID NO: 723312 - DNA, 144 bp, Homo sapiens
tactctgagatcccgatggtgcgatgtgcagatgagtcctggtgagctgtcactgaggagaatgcatgtggtgtgcatcagaagtacaacacggatctgtctgttggaaactcgttctaaatgtcttcccttctgtcgtcttct

SEQ ID NO: 723313 - DNA, 645 bp, Homo sapiens
ggggtctcgctctctcacccaggctggagtgcagaagcatgatctcgtgctcactgcagccttgaacctcccggcctcgtggtcgattctcctgcctcagacctcccaagtacgctgggcccacggtcatgtgccatccacacctggctaattttgtatattttgttgtacagactgagagtttcatgtgctgcccaggatgagccactgtgcccggccaaatgagactatttatgatgatcataaggactcaagataagggtaaggatgcgagagattgaagtgtactaattacgtagtgtggtcaccgggggtggtggtctcgacaccttgaagtcactagcactttggcgtaggctgaggcatggtagtattgcttgaggtcagagttcaagaccagcctgggcgattagcaagaccctggtctctacacaatatttgaacatttgctgggcatggtggcgatatgcctgtggtcccagctactcatggagtgcggacggtgtggacggatccccttgggcccgggtagtttcaaggctgcattgagctatgtatatcagcaatgtcgctccagcctgggtgacagagctccgaccttgtctcttgatacaaggggaaaccagaacatgctgtatttaccat

SEQ ID NO: 723314 - DNA, 182 bp, Homo sapiens
caatgctcgaagttcgcgccgcagatcacgccggaggctacatcatcctcgacgtggagcagtcaacaaggacagccgtgggcgagaccacgcgctgcgggcatcgcgaccaaacaccaagcacgtgaagacccaggtactggtcgagaacggcggcccggtggtaatcggcggcatcttcg

SEQ ID NO: 723315 - DNA, 274 bp, Homo sapiens
tcggacgaggtaaggacaaggagatgggtgtctttctaaaacatatttatataaaaacacatacccacttagtagtgtggaatacacaggttggtaacaagaaaacagtctctcccattctctagtacggctcccctacccagcagtcacttccagttcattcagctattttaaaaaggtgcttatatgactctggctggatatatcaatcttagacattacctgtggactccctgtggtcatacatgaggctttagctctctttggtcagcaa

SEQ ID NO: 723316 - DNA, 134 bp, Homo sapiens
  misc_feature (18)..(18): n is a, c, g, or t
  misc_feature (86)..(86): n is a, c, g, or t
  misc_feature (105)..(105): n is a, c, g, or t
ttgcgcttgctttgcgantcagacgaaccgaggacggatgcgggatcgccttgcgcgacacttgaccttgatcgcgccgtcttggngagcttgagaatgcgctgntcggcgtcgaacgagaagccgcgctcggt

SEQ ID NO: 723317 - DNA, 302 bp, Homo sapiens
gtgttgggacagtgttccctctgtggcccaggctggatcacaaactcctggccttaagtgaccctcctgccttgcactctcaaagtgctgggataacagatgtgagccactgagcccagccataggaaacagcctcttaagccaagtgcactgactacttgaactccccagagcctctgtgcattgctacctcgaattcagcttcacagatgtatgcaactgtgggatcaggttaggggcactcacttaccggcaggtcccaaaagctctggagagtctgtgctgagggaatggtccatgtt

SEQ ID NO: 723318 - DNA, 1014 bp, Homo sapiens
gtggagaccctgactccaccctctcgtgtgcagtctctcttatcacattaggtgaccttacctggtacagggagaggccgtctctaatgggtctccctgggatgtctcatgatgcacatggaagattggtgcaatatgatgatgggtgcagtggcgatgacacatgttaggcagatgacagcagaatgatctgtgtgctagagttggtgtgttctctggatagatggtagtgccctagtagtcagcattttgcagcgtgtaaaactttcagggaaacaaacagatgtgagggtaaagcactacataaaggggtgagatcatccattgagaaggaatccggaaaacaaaacggcacaaaggctcaaaagtccacatcaaagagtcagtggggcgagcagagaacagacgctggagggtgaattggggcataacccttgcataatgcgccaatggccatctttcagataaacacggacagctcccttcaccaaaaggatcccaggcaggcggcagaacacacaagggccagcaccgataatgaaaggaataacaatacatgccagcatgcaagcattcgtggattcgataaacaaggcaatctggaagcatcacattggtggacaataaactaaggccgacgcaacaatctatcgacactcccctcatcacaacctccaagagactgactaaagggtcgagaagcacaactcgcatggccatcagacacagggggggacacacaccgcgtatgcaaagctcgagcctacagcaacaaggcccgaaggccccgacaagcagagacaggaagcacacagctaaccgaacaacacgcatgagagcaaaagacgacagagcacgccaaacagcccaaaagcagagcacaagggcaaccaaaagacaagcccgccagcacaagaaagcgacaacaggaacaacacgcagacaagcgggatcggcaccgacaccacgcgggctagcaaagcgacagagcagaaaggagacagacataaccaa

SEQ ID NO: 723319 - DNA, 288 bp, Homo sapiens
aatgaaattcaacaaaggaatcccaacctgggcccccttcaacccagcaacccagataaccaagcagaagtggaaggcagaaccagtttacgcgcagcgggccaaggcttatctgaaggaggggcgccctagcactctgtagaaatatctgaaatacagcaaaaatatcccgaaccagcaagctccttcctatgcagcagaaaccaaccaccaggcctcaggagcaaagaagaaactacagtgctaacttgcgacttatatccagaacaaactgacgtacactggact

SEQ ID NO: 723320 - DNA, 150 bp, Homo sapiens
atgcatgcatgagacctcagtctggccctatgtcagggctccatgttaaaccattccatggtccaacatcataccttgtggccgcccttatatcctgtcacccaggtcaactcaagacgatggttgggtaagtgtggttcatccatcgtc

SEQ ID NO: 723321 - DNA, 333 bp, Homo sapiens
ccattgtgggaaaaacggtaccgggagggtccccctaaagaaaattgaaaaatagaacctaccccacataacccccagtaatccccctctccctgtgtttgtaccccaaaggaaacgaaatcacccatccctataaaaatatgcattcctatgtttattgcagcattattcacaatagccaagatatggaagcaacttaagtgtccatccactaatgaatggataaaggatttgtggcatagaatactatttagcttaaaaatggaggtcctaccatttttgacagcatggatgaacctaggggacattatgctacatgaagtaagccagaca

SEQ ID NO: 723322 - DNA, 279 bp, Homo sapiens
actgacttcactatttccttggttctccattattctttcctttaacctctctccttcttgacaatctcactctaattcgcaccggttatgatttcaccatgtgcctgtaactagtttcaaattcattactgtaaactgcaaggaacgggaaattcccaggtatggtttgatcgaggtcaggattcaaaggcacctgcttttaacctgtgggaccttgcttaattgaacaacatacttccttactatattggtggcaaactttcaagaagcaggacctga

SEQ ID NO: 723323 - DNA, 264 bp, Homo sapiens
tgggccagtaaactgacaacctacaaaaaaaaacccccatgttcttaaaaatgcttttgaaaaacatcaagccctgtggtaatttctactgttttaaaataagggcaactgcttaaaagaaaatggccaaattaggctttttccctctctggcagggccaaccatgtgctttagctgcaggttgattttactttagatttacttagtctcccctttcactttacagacccgtgcccagtttttggcctcctcttattttcctta

SEQ ID NO: 723324 - DNA, 667 bp, Homo sapiens
cacaagcgttatgtgcttatgataaaaaaagcccttgccgtaggaaaagcagcctagatcacattatggatgtggcagtaataccaaccagtgtacctctgaccttcttattaaaagagctggggcgctttgaagataatccctacccctctcccccaaaagcaggtgaagcattttacagaggtttgccattacgggattcattcagataatgatttcctactaagagaaacaaactttaaacactttttataatcttgaaaataattaaaacaaaggtaaagggcccgggaaatattatatttttctttactaaccattatggatttatggctttgtgatattgtgcgggaacatacttatgtcctgaagagaactgctctcagtgaaataaaagataatagtgcgaggcttacatatctcaattgaggataagattgtgggggatatgtggctcctgaggcattttgacttgtccttataaaagactttatatatttcttttaagactgatttcaatcttattggcgccaccccgatttcagtatgacctgtgtaaggactgggagtacttggtcggcagcaccaaatctggtgtgggtggataccatgcgtcttcggcagggtgccttcatttacacccgggtgggagggttcttttggttgc

SEQ ID NO: 723325 - DNA, 123 bp, Homo sapiens
gctttttcctttctcttttttcttgttccaatcgttcctcttctttacgcttggcttctaattcttcaagccgttttatacgttcttcctcttctcccttctgtcgtcttctcaaaccgtcca

SEQ ID NO: 723326 - DNA, 778 bp, Homo sapiens
tgtctgaggcagccgccctcgctgcatgtgcaagttacttggtcttatcgtatgcttctggtccaggctaataatagttatcaccttaatgcgtttaattttggttcttctagttttaacgggagaaattaactccccggggccgccgggttgactgcgctgcctgggccggaggtcttctccggccagggagcgctgtgggaaggggctcgagcggccagggccaggcgaggccggggggtgcggggggttaggggaccgcggggctactcttgggagcgcccctgtccggctggctgcgcgccggtttcaatagcatacttcggacttgtcttcgcggccaccagtccccgagctcggacgctgacctgggctcctgcaagcctctccctaagtcttctccaaacgaacacctcacggattccttatggatcgcagctccaaagaggaggcaggtgaagccttaggaccagcttctctgctggaagctctcgattatgatagttcagatgacagtgatatccacagaggagatgcatcaggactcgctgattcttgagaagagtcaaaactggagctctcaaaaactggcccatattctgattagctgtgtatgtctgggagatactagtgagtgacgctgactgaaataaattcagatggtgacaatgtggcattacaggtccatgacggctgtcatgaacgttgatggagacagtgactctatcatgagtcagatgcttgaaaaatcagatgaacatggtgagtgcagccgaga

SEQ ID NO: 723327 - DNA, 107 bp, Homo sapiens
actctttcgacccctttcctgatgcaagtaagggtaatgacctcttcccgctggcacttagggttttatccccttataggttaacacagaaaccgcacagaggcccc

SEQ ID NO: 723328 - DNA, 433 bp, Homo sapiens
  misc_feature (41)..(41): n is a, c, g, or t
  misc_feature (304)..(304): n is a, c, g, or t
  misc_feature (370)..(370): n is a, c, g, or t
  misc_feature (400)..(400): n is a, c, g, or t
  misc_feature (411)..(411): n is a, c, g, or t
caaggctgggtgaccaagtgagaccctctctcaccaaaaantgaaaaaaaagcttgagtccaggagttcaggatccattgggggaacatggtgaaacccatctctacacaaaatacaaaaaattagccgggtgtgatggcacacacctatagttccagctacttgggaggctgaggtaggaggatcacctgagactgggaggcagatgttgcagtgagccatgactgcgcactgcactccagcctgggtgacagaacaagaccccttagaaaaaaaaatacgaacatttgggttttttattaanaaaggtcttatgttgggccaggcacagtgtcctcacaccctgtaatccattggggtggatggcttnagccccaggactttttgagacccagccttngggcaacgtgngcaaaaccttgttttctacaaa

SEQ ID NO: 723329 - DNA, 477 bp, Homo sapiens
gaacagtaggtctagacgcttcactattgtggcctttctaaatttgatactcataggggttttctccccctatctttcactcttatattggtgagttcccaaatttgagtgcactggccgtcatcgcacagccttctatctcatctacggcgtgggtggggctggaggatgtgcatgtcttaagcgttcccaggtagatgctggtgctgctgccgctccagggagcacactttgataaccattgctccatttgatattaaatacattcggggaactccttttccaaacgcagcttttcccagaagagctgactggggccagcagatggtaagcagcttaagacaaggtggtgagtatgaaagtgtgtgtctggcgagctcccttacatcatcagggcttttggttgtctacaacgggcttccagagagagtcttataatttggaatgtggctagctgcaaaggtaggatcccaagga

SEQ ID NO: 723330 - DNA, 589 bp, Homo sapiens
  misc_feature (589)..(589): n is a, c, g, or t
aacctcaaacatatgatacgatgcggggactaaaggacgaacctgatctcttatactagtatccttaatcgtttctattgccacatctaacctcctcggactcctgcctcactcatttacaccaaccacccaactatctataaacctagccatggccatccccttatgtgcggggggggtgcctatagggtgccgctctaagattaaggatgccctaggccacttcttaccacacggcacacctacactccttatccccatactagttattatcgaaaccatcaggctactgattcaaccaatagccctggggcgacgcctaaccgctaacattactgtgaggcacctactcatgcacctaaatggaagcgccaccctagcaatatcaaccatcaaccttccctctacattgatgatcttgacagttttaatactactcgctatcctagaaatcggtggcgtctaaatcaaagcctacggtttcacactcttcgggcgccttttcctgcacgctctcacaacttcggcctcgcccggtttctgttctcttcgctttttccgggctactttctcaattgcccctatacgn

SEQ ID NO: 723331 - DNA, 408 bp, Homo sapiens
  misc_feature (394)..(394): n is a, c, g, or t
accactggggttccgttcgtgtccctaaacagctcccgggtcatgaggttgccgccagccgcggcaacgggccaaaatccccactcggtgaggttccggccccccacttgagctttctccaaactcatatacacgcttgatgtcgtacaccccggggctgatgtaaatcgcttggtttgactccccgctcggcaccgcgttgctccgggcgacttcgctaaccagcccagtttgggtgggactgggagctgtactgcccgtgcccactacagcgtactgggacggccccaacaagcccataggacggaatgagggcatcgtagaactggattgaggattaggttgtgttgctccccttcggcgctccggaacccaaacccgtccccttccccanggccaacccgggcg

SEQ ID NO: 723332 - DNA, 455 bp, Homo sapiens
ccagagatgttttagaaatgtgagaaaaacatccttttgcaccatttcaaataagaaagacacacactaaacaatacaaccatgaaattgatcccccggattgccaatctaattgggaacccagttgagcaaccagctcggactgttcgcacctgtcgccctactttttatatgcactttataaagtattccagcaaaagaggatgtagcctctgggaaaacacaaccatgttacagtgcctcttgtagattctcgttctatatctcatcacagcgccagccctgtttttagccggaaaggattcaggataaacattattatgcattctgaattggatgcatattcctaactactgtatttgttaccaaaagtggttctacaaatgctactgaaacaaatctggaaattcctaatgtcctgagtattaataataaagtttaaaaaagcctttata

SEQ ID NO: 723333 - DNA, 368 bp, Homo sapiens
  misc_feature (5)..(5): n is a, c, g, or t
cgctncggggagaaggtggctgcggctgctggggccgctgcgccggcggcggttcccgatgtggaggtccgtcttgggtggggaggcacccaggtcgctggttcgatgcagaggaagaaaccacacctagcacgtaaagccctgaaaaaatagaggtgtacagtagagttttccagaggctacatgacatgcagtatcacaacggaagcaaatataagaacccacctgtctcctgttaaaatgcaaaatgtaaaacaataccactttgctaactgtttttgtttggggaaatatagttcataaaaatatttatgttaacatgtaatttaggttaaaataaattaataaatatttgtaaaaaaaaaaaa

SEQ ID NO: 723334 - DNA, 560 bp, Homo sapiens
tgaaaatctggaaggctttgtaagtaaaaaggatcactgatagtagaatattattctagtactatttcttagacatttctagaaaagaaatgtcagataatactatatataaaaataatttgagtgaaattatggtgcagttgtattttttcagctaataaggttcttttctaattaatactctattgctgaaagccacttaaatcccaacaaaatgaaatatataaagaaattatggtacttataccatgtcagaattaaaaatcaggttttggcctgggtgcggtagctcgtgtccgtaatcccagcattttaggaggccgaggaaggcagatcacttgaggccaggagttcgagaccggcctggccaacatggtgaaatccctcactactaaaaacacaaaaactatctgggcatggtggcacatgtctgtaatcccagatacttaggaggctgaggcatgagaatcacccgaacctgggaggcggaggctgcagtaagccaagattgtcccactgcactccagcctgggcgacaaagtgagactctgtttcaaaaa

SEQ ID NO: 723335 - DNA, 296 bp, Homo sapiens
cgcggctccgagtccgggtctggtggggcggtgcagagcgggattcccgaggcagggtcgtgggcactctatcgcgtgcgggcggttgaaggcgttacagtccttggaaaccgagctgctagccggttgctaggagcgtccagtgtctggagtgggaggaacaaaacgcctcacgtcacaaggcgcaggaatcgagcgccgagagagcgagtcggtgctactggcgccgggtcggtccgggtaggcgcagcgggactggacctgggtgccgagcggagccgctgccatgggcctgg

SEQ ID NO: 723336 - DNA, 546 bp, Homo sapiens
tgatgccaaaattagaggtcagtgaagatggtcataattaaggaagctagtattttttaattgatataacacgatcccccagtatacatttctagccatatctcctccacctcccccatgtgaatctttcacaactaccagattggtctgtttgctctctctgtaacatgccttataccctcctacctttaaaattatgccatccctctattttgcccttagtcttttttaatcagtggttctcagagtgcttctcgggggcccacaatgtcaatggtacgctcataataatactaagatgctatttgcctttttactctcattctgttacaggtgtacagtagagttttccagaggctacatgacatgcagtatcacaacggaagcaaatataagaacccacctgtctcctgttaaaatgcaaaatgtaaaacaataccactttgctaactgtttttgtttggggaaatatagttcataaaaatatttatgttaacatgtaatttaggttaaaataaattaataaatatttgtaaaaaaaaaaaa

SEQ ID NO: 723337 - DNA, 399 bp, Homo sapiens
tgaaaatctggaaggctttgtaagtaaaaaggatcactgatagtagaatattattctagtactatttcttagacatttctagaaaagaaatgtcagataatactatatataaaaataatttgagtgaaattatggtgcagttgtattttttcagctaataaggttcttttctaattaatactctattgctgaaagccacttaaatcccaacatggtgaaatccctcactactaaaaacacaaaaactatctgggcatggtggcacatgtctgtaatcccagatacttaggaggctgaggcatgagaatcacccgaacctgggaggcggaggctgcagtaagccaagattgtcccactgcactccagcctgggcgacaaagtgagactctgtttcaaaaa

SEQ ID NO: 723338 - DNA, 902 bp, Homo sapiens
  misc_feature (5)..(5): n is a, c, g, or t
cgctncggggagaaggtggctgcggctgctggggccgctgcgccggcggcggttcccgatgtggaggtccgtcttgggtggggaggcacccaggtcgctggttcgatgcagaggaagaaaccacacctagcacgtaaagccctgaaaaaatagagaatactaataaaaagacaagataaaaggtttgactgtttgtgagaagaatttctctcccgtgagttctctcttttagtggaaaaaggattgcacggcataagacttatataggccacggttaccaacaactaagattatttctccaaggaacattctttattacttttcacttacaggttttattgaacctacatttgtttccaaaattttattattgacatgactaggtacgtcactcattctgcaaagttagtttttttcccattacaacatttatgttgcttgagaattaattccatgcctgatacgttatacgtggctaaacgggtcattttaactactataatgggtggtcctattagtgttgaatatggcattatttatttacccatttctcatgtgctaggggacatttgatttttttctatagttttcctctatttacaaaccaattattttccgagaatttttccgtgcccagtgtatctctttctgcacgattgtgcttggaggtttctctaggtggcaatcactgagtttacaagggatagtatactcttaaatttcactgggctctaggccaaatatcgtggtaatttttacactattgcctattaatgaaatttgtgccccgggcacggacattgaacgtgtcaaatcaattttgtaccaggagcaatcatactttgctaatttctaagccttttctagaatttacaccggactacgaaaatctggccgaattc

SEQ ID NO: 723339 - DNA, 287 bp, Homo sapiens
gcaagcagttaatacagactcaccaagccacagacttgtcttccacaatgcacgttcttacctatagccacgatagtcccaaggccacaccggtactaaaagggttggacttcaacgatatgtccggggtataaaccaattcccagggggaccggttactttcaatacaggtgtcaaattcagcaacaggttctacaatccagtgctgatatcagatacaggcttcagggacaattcctttccggaggggctaatcccagttccgggaggctagcatgagttgttgt

SEQ ID NO: 723340 - DNA, 111 bp, Homo sapiens
gcgagaggctcatggccatccccacggtatccatagcgtttacggtgtcattcaatatattcattctgcggccgtcaccatgccacagcaatgacatatattgaattacac

SEQ ID NO: 723341 - DNA, 264 bp, Homo sapiens
ggaccaatttcccggcaggataaagaaatgccaggtgtatttatttttcgtattgtatttttagcaatttttttttttggtatagaatgagccaagggcatctagagcaaagaggtagttcccgtgccccgtctccatctccctgtctgcactgcctctcctgctccatctccccatctgcaccgtctctccctgccccgtctccatctccctgtctgcactgcctctccggctccatctccccatctgcaccgtctctccctg

SEQ ID NO: 723342 - DNA, 120 bp, Homo sapiens
  misc_feature (2)..(2): n is a, c, g, or t
  misc_feature (65)..(65): n is a, c, g, or t
cngctgtggtttaggaggtaaacaaagggccaacatagccctgtgatgcaacagcctctgggtgncttgggccgcatgtggctggggttctgttaaaagggcaggctcctccctcctagc

SEQ ID NO: 723343 - DNA, 219 bp, Homo sapiens
acaggcgctcgctcaatagcgacaaggtcatcatcggcggcggcatgtgctacaccttcctggccgcccaggacattaagcgtgcaacaatccctgctgcaagaagaacaaatcgacaagtgcaaggaattgctggaagaattcggcagcaaactcgtgctccccgtcgacctggtggcagcagccagcttcgccgccgacgccgacaacaagatcgtg

SEQ ID NO: 723344 - DNA, 169 bp, Homo sapiens
cgccctaggcaacttccaaagaaaagagatttagttggctcacaatttcacaggctgtacaggaaacatgatgctggccagctgcttggcctctggagaggcctcaggaaacttaggatcatggcagaaggcaaaggaggaatgaaggtctcacatgattggagcagga

SEQ ID NO: 723345 - DNA, 631 bp, Homo sapiens
atacgtacagattgacgctgtgcagcataaatagtaacaagctaggaacaggatgtggttctcttaactgggaaaggagctacagagtagaaaataaatatgtttgtcatgagtcaggggttgtgaaaattgtgcctttgggccatgtgttatttaggctacttggaaaaagaacaaaaaggacttggttcatcttcagaaaggggaagccaacccctcctgtgctgccagtcactgtaacccactagaactaataattaccaatcccctagatccccattggaaaaagggagaatgtgtaaccctggggatcgaagggacagggttaaacccccaagttgccattttagttcaaggggaggtccacaagcactctcccaaaccagtgtttcaaaccttttatgaggagttaaatctgccagcaccagaacttctgaaaaagataaaaaatttgtttctccaattagcagaaaatgtagctcattccctaatgttacttcttgttatatatgcgggggaaccactatcagagaccgatggccttgggaagcctgagagttggtgcccactgatccagctcctgatataatgggggctgtccaggatctcatcaggacggatggtctcgctg

SEQ ID NO: 723346 - DNA, 342 bp, Homo sapiens
gccacatctgcaactcactgattctcctctgtggtgaggttttatcttattccagagcctttctacctcctacagacaagtctttgtccacttccatccactttgagcactttttttttttttttggcttggaaacagagtctggcttgtgtggcccaggcgggggtgcggaaacacaatcatgtgtcattgcaactttgacctctggggcggaccgaatcctcccatctacagcctctcgagtagctggacccacaggctatgtaccacctatgctggctcatatgtgtattaaaagccgggtctccacctatgtggcctggggctcaagcaatcctctgc

SEQ ID NO: 723347 - DNA, 1082 bp, Homo sapiens
tggtttttctaccccaattacatactgggtttagtaccacatcactaaaggcccaacatcattgcacagatcacaaaaccgtacatgccaggctggttgtctggttagtccaatggctgatttgcttcaactgtctagtcatgtcatgtgcagcctgacaactggctcctttaacacaggcacacagccgggggctccagtccatcttgcacacccaaatgcacatagtcaacacagtcaacatcgcatcacattgttcttgcagcagaacggttaccatgttttatcaacaggtaaggcctttcaagctttcagactacaccacttcggtcaatatatagatcgacccctattacgtcaggtagcaccacacccatgggtacaccacttacagccttgaccacggggacactataaccccttaaccttggtatatacatattgggatcggggagggcaccggaacaacggcaaaaaacgcgcatggagtggttatggattgaccctttttctacttcccttacacttgggatctcatatacggggacacacggtgtttaacgagtgaccgaacaccgaaacacgcacacaaaaacacaccacgacgtggccacatgggcacttcgggctggcaaattacattctatgggctaaaggcacccaacaaggcatgtaaccgatatatcatcggcattgtccgtcgtttccctccgttattccaccgacaaaactgttttgaccacacgggacaactttataacgcccaattcaccccgtattagggggcggccattcgttcaggacaaggtggaaacaaggccattacaacaatatttggattgggcagggtaacacactttggacaggcaaattttgcccgagcgaaaatacaccattcagcgcaatagatcccccaattggggcctctgcttcgcaacacacacgtgtggtgccatcaacggtatgcacacacccttcccaaattcattcccccaggactggtctctcacccatcctaggtctgccgcgcattcacccccacacataccgcccttgtggcctctggccattggccccattag

SEQ ID NO: 723348 - DNA, 156 bp, Homo sapiens
gacagtgcataagacagaacatcttccaccaagttgttacagtggtgtgtgtgtgtgtgtgtgtgtgtgtgtgtgtgtgtgtgtgtgtgtgtgtgtgtgtggcgtgatatctctcgtgtgacactctgtagagaggtacatatcagacacaggtct

SEQ ID NO: 723349 - DNA, 1011 bp, Homo sapiens
gagtggggtgtgatgaggtttgtctcggcttctaggtgagattcgttcaacgctaatcactatgtcaacagacacaggtgtttcccttccttcatatgcaggaagatcagggatcaaaactcattcgaaaagctaaagaggcaccattcgtacccgttggaatatgcgggtttagcagcaatcgttgcatatggattatataaacctgatagagcagtgggaaatactacaatgtccattcatctgatccacatgcgtgtggcagcccaaggctttgtgtgtagggagcaatgactgtaggtcatgggctattccatgtatcgggaattctggggcaaaacctaagccttagaagaagagatgctgtctgggcctagtaggaggagcttgcttaagttcagatgtcttatgattaaagttacctattatcgtcggaaataaactaattggtatgggtacagatggtaacatggcatcttgaatattggcttcctttcttgcaggcttgatttgcttggtgaccgaattactagtgactagtttactaactaggtcattcaggacgtcacgttaacttaagacatgtcacctaaatgcacttgatggcgttcgagatgtccaccttcttaaatttcaacgatgacttagttctaaagacgataccggccaacctgaagttactcccgtttgctgcccaatggtccgaacttgggatgtggcataagagtccattggcccagttatacaactttggttgccgttggggcgggctgcccccttttaaaacactttcccacacaagggcgtggactctactcgtaaagttcccccactgacgcaatttactctctctttcaccccacacaacgcatcaacaaaccgccgcacactattattaaccaccgccgagacacaatagacgaactacatgccgacggaaactactatgcggcatcacacagtcatcgagaaaatataatccacacacatgacatggctgttccccacaca

SEQ ID NO: 723350 - DNA, 696 bp, Homo sapiens
gcgtcgaccaggccaaaatagttggcggccatcaacgcacccacccacaggctgtcgacgtgatctgccgccaagcgcaaggccaggtaagtactgagcaggccagagccgatcagcatcatcagggaagcaaaataaagggctcgaaaaggtttccagatctggcgcatcggcgttccgagcggctccttgcagtgggtgtcaggactaccggaatgatagtcccgggtcgtcgggtccggacagccaaaacacgcggttgccggggaatattttgctcatgccaattggctacgtgtcagacgctcgacagtgacctgcgaggtacacgatgcagacgaatacttgctccgccccacccatgcctcccgtgtgaacctcaaacgcgggcaaggttcggttggtgtttgaaaagactgccgcactcaaacgcccggccacaaaaaagccccgccagataaatctgatcggggcttgctgacgttccggccgcgggggcaggaacgattatgtggtgtcccagggccggttcgaacggccaaccttccccttaggagggggatgctctatccaattgagctactgggactaatgacagccaaccggcaaggagcacggcgacggacggcgtgcatgttaacggcgcaggtcaattttgtcatgtcgtccgtgggctttttgagtgtaggtcgacgc

SEQ ID NO: 723351 - DNA, 239 bp, Homo sapiens
gtgcgtaaagtggcacaaatgtcccttcaattctcttcctccacagttaaaccatatcgctcctcccttctccttgactgagcctgacaacttctcctttgttcttggtcatcatccagccggggagacacatcaggagtaagaaaataatactccatctacttcttccttctatcagtctctcaaaagcaagacacacacacagttctacaccagagacatgccagagtcttcggctg

SEQ ID NO: 723352 - DNA, 349 bp, Homo sapiens
ggcctgcgtacaggctgtaacacctagtccataaaactatgtcctttctggttccattgtaatgtaagtggactgcgcattatacattaccgtcaaggattacattggcctcaaaacccacaaggacagtttaaaaggttcgtcgatagaactaagctgacttggcagtgtgcatctttgagccaaacggttcacaaatgtcattaattgcctagatatcaccttctcagctagagcgttcttacaacttgtgaatgtgcactgcttacctgtacattagctaatgtaacatacgtacttgcggaaggagttagactgacatgatatttttagggtacaccgcttgtcg

SEQ ID NO: 723353 - DNA, 193 bp, Homo sapiens
cgagtctgggacttcatcattaactactcgctgccccagtcatgtgttcaaccatggcatccctcccccaagtgagttccctgtcatcctacgtcaacttctctgtaagtgcctggcaagcttgcccttgcttaagaactcaaaacatagctgtgctctatttttttgttgttgttgtcatcagacaatgtat

SEQ ID NO: 723354 - DNA, 127 bp, Homo sapiens
ccgaatccaagcgcggcggcagcgaccaggccaatggcggcgccggtgtagaggcgagttttatcggtcattgcactgcttctccggtgatggtgaggaactgcagacgggcgagattggcgcgggc

SEQ ID NO: 723355 - DNA, 422 bp, Homo sapiens
  misc_feature (88)..(88): n is a, c, g, or t
  misc_feature (347)..(347): n is a, c, g, or t
acctagaggatccccaccacctgagctttgaaattatgaagatttcacagttggaagtcctttttggggtttcccttcacaaagatgnatgacatagatatgattataatttggaagatttatccatcctctcccttcagtgaagtattaaaaggatgaaaaggccattaaaaaagagctactgtttgttatatctaaggaaattattcctagaaatcacttgaattgctctgaaaacgtacagtttttataattagtacacaaaagttcttgagaactgactttgcatttctattctctgagaagagctgtcctggacagtggtgaaagaagtgtctccgtggcanagggggaggtgctttgtgagaacaggacatcactgataatctgtatctctttcagtttggtgactcaggtggtgt

SEQ ID NO: 723356 - DNA, 136 bp, Homo sapiens
ctttgggttgaggtgatgatgaagtcgagatttggctgctgtgaacattgttttacggtcatatgcttttctagctcgtgttaggtctagcgataagtagggcgcaggttttggctcgctaagaaggcctagaatc

SEQ ID NO: 723357 - DNA, 363 bp, Homo sapiens
agtatatgcaggcagtctcatgtctgtccagatgggaccatataagcttctctcaagcgttcagcttgcacaggcgcgcctaagatgtcgggatgacaggcatgcttccagtgaacgggcaggtagttccaatgctaaagcagactgtgcacatacagtgtccctcgcagccgtccagagtgatcgcatgatagtggcagcaagtgatttggtcgcctcagcctacccagttcctcggatcatcttgggcacgggccacagcgtcaggtgctggtgtgcctgtcccagacacgtgtgtctcttagtcagcatgacacatacagccccctgtgatctctggagagcacagtgactaatgttagg

SEQ ID NO: 723358 - DNA, 106 bp, Homo sapiens
agtttgagtttgctaggcacgacatagtaatagatgtaagtccgtgggcgattatgagaatgactgcgccggtgaagcttcagtggggtttggacacgaatgttca

SEQ ID NO: 723359 - DNA, 264 bp, Homo sapiens
gcgtcgacttccactcgagatgattccattccattctattccattccattgcattccattccactcgtgtttattccagtccattccattccattccattccactctggttgattccattccattccattgcattcctttccactccattcaattcctttccattctactcgggttgattccattccattccattccattccattccattccattccattccattccattgcattccactcgggttgatttcactcgtcgacgc

SEQ ID NO: 723360 - DNA, 104 bp, Homo sapiens
gtttgcatcaaactatgaattgaatgctgtacttctctctggggattctactccgggctttagattccccagagagaagtacagcttctattctagttttgatg

SEQ ID NO: 723361 - DNA, 975 bp, Homo sapiens
atgataacaagaggcttctaactaatagttcacgtggccagatgacatagcctaccatagattgttgtgtattggtgtatgggatgataagaagtttagagaattggtcttgactagcctaagtacctctactaagtaatagctaagtataaaatctttagttcacagacaacggcttgtgagcaattcaagaatcctatttcacgattgtttcttgacagaatgggagaaaaaatatggcaagatacgaaaacatgtcaaataagggcaatgacgaagtgacgtctaactgccagtatagagatataattaacaagagatactttgtggtacctcgttatctctcaggatctcctccctaccctagcaaggcaaacaacttggagtacttccttttcgaaagaagttctagaaattaaattgaggtaggagacggattgacagtgcctaactaaagatgagtaacaacagacctctttaatgatagactcactattggacactgcttctactattgtaattaaaaatcaggaagtcttgatgtatgcgttgctgtaagaaactctgctcattgcaaatctatttgtgggcttaggtattattctgggcacagtactttggttgatgactttcaatgggcgtgcttatctgcctgacctttggagttactgttggtattgccattgctggctctaatgtatgcgtaaccatcgatagaccggttatatactggtaaaggcgaagccacttaggaagaagcttgtcaccaaaacaagtgagagtcatcgccgcaatgatgatagtttggccctatccatgtaagaggaacggccatttctagaacactcggtccgagcaatcggttgcccgaggcaacgcggaaccgaggtaaacagaacacgggagcaacaacgtcacggcaccaataatccggcacaagcggagacacacgaagaaactaaacaatgaaaggtc

SEQ ID NO: 723362 - DNA, 371 bp, Homo sapiens
  misc_feature (5)..(5): n is a, c, g, or t
tctcnttggggcctggaaacaggaagccctttctagcacaggcctttagatccaggaccctatgtaacttcccacctcaagcctgtgcctccagcatccagatgtggccatccagcaaggtgggctggcccacaagaccacaaggcacctaggagtgcacaacacattacccaaggcccaccccatcgtgcaggacaaatgttcagaaaccaagcagtgcctgtatcaggccatcatgaagaggagaaacttggtctcccagtctcaaggaagcctggctcacacagcaccagaggcagagcctgccgcccgcaccgtccgacggcctcagtcacaaatcactgctgtgtttggttctttttctataaatg

SEQ ID NO: 723363 - DNA, 189 bp, Homo sapiens
cctgggaggcatttattgccttattagggaatgttaattgaagccacccctatgctaatgggttttgtttgtttgtttgtttgtttgtttttgaaagagtctccctctgtcgcccaggctggagcttgcagtgagccgagattgcgccactgcactccagcctgggggacacagcaagactctgtctca

SEQ ID NO: 723364 - DNA, 192 bp, Homo sapiens
  misc_feature (5)..(5): n is a, c, g, or t
  misc_feature (79)..(79): n is a, c, g, or t
  misc_feature (108)..(108): n is a, c, g, or t
  misc_feature (125)..(125): n is a, c, g, or t
  misc_feature (147)..(147): n is a, c, g, or t
tcacngcaatcctgatgtggatgacaggttcgaagcatcagagtcttcctttattactggagacataaacagttcagcntcactcaacagagaggggcttctgaacantgccagggatacaagtntcatggatactctaccactgantggtaccatggcaatagttacagcattgccacgcgaatacctgag

SEQ ID NO: 723365 - DNA, 981 bp, Homo sapiens
atcacatgataaatacgagtcccccatctcaactcatagtatccatgattctctctcgctctactaatgcgtaatgtcgttgctcctcacatctctcaatcttatccatacatacccaggcactggaggtggattacagcatgggcctaggcgtaggactaaatcgtgagtcagtactcctgcgaatggtgacccacgatagggatggagataactagctagtttctacacgtaacgaagcgctagagaataagcctattcttacactttgaacattatttatatttatcgctaactacttagcgtcattcctagctactcaagcttaaagctctagtgagctgcgaaatctgcttactatctcgtcagctggaaaatagcttaacatggcactatatccacccttgatagttccatttcctaacaccggtcacttcgtctccctcagagaggtactggacgcgcgggtaagcgcggacttatttgtccacagagatggggccattgagtcgatgaattcagaataagccattagtctacaattattgccatcatcatagacagctattatcctctcttaaatctctagttctaccctaggcctaatcctagctctgtctcgatcacattaatctcacatattaacaagtaaccttatgtgtgacagttgtgaacctgacgaactgcattctcgttcatccgcggcctcagtcaatcgttatcatgctaatctactgtcttccctttttcttacattgttttgcatctcgctccgaaagttggcacctggcgccttaggcgttcatacgcctcgagggcgcgggccggaggttctgtgtgattgcccttgttcccagcttgtcgtgactcgttgttctccctgaagaccgggggcgaggtttattcccagggtggggcctgggcacccagagcggcgtcccccccggcgggggggtgcaagccgcggggtaccgggggaaa

SEQ ID NO: 723366 - DNA, 210 bp, Homo sapiens
agactagctggcgcacaggaatttgagaccaggctggacaacatggagagaccctcatctcttaaaaaaaataaaatagagggattcaggctggctgcagtggcttatgtctgtaaccccagcactttgggaagtcaaggcgggaggatcactcaagcctaggagtttaagaccagcctggacaacatagtgaaacctcacctccacttt

SEQ ID NO: 723367 - DNA, 155 bp, Homo sapiens
gttagatagtacctccacgggcacgtctcgaacgcccgtaatgacgagtacgaccaggcgaacttggtatcgttagccatcgcgcgctccacgaacgagctcagaaacttgttcgaagaattccggtttcgtaagactcatcgtgagcgcactag

SEQ ID NO: 723368 - DNA, 745 bp, Homo sapiens
  misc_feature (282)..(282): n is a, c, g, or t
cgcccccccccggaagagaagggttcacggaagagaaccagagccccagctgacggaaggaggagaaaaaggcgtctgccccgctcctgaggaggagatggatgaaagtgaccggcgctggctgctgagccccaggcccaggaccccgtcgcgtcacctgccccagagtgacccttgtgttggatgaaattaagcgccagtactcccactgaggaccaaccacctctctgtggccctgccactattttctgggagacacctttgataaggacggcgctggtnccctcgtggtactccacgagtatcggctttccctgaagaactcacctcacgaccttcactgagctgccattctcactacacactggaatgtttcccgcgactggacccagctgaggaagaatgccttcgcccgtgtcactcctcttttggagaccccacccatagcacgctcccttttctggagtctgggtcttccgaggccacggagcttgcctttcccctgagtcccgattggcacggtggaactacgagtcatacaccactggcggaaactggatcctggcagcgaggagaccccgacgcctggtttcgagagtacttttcctgggagggggccttccagcaagtgggccaagaccttcaatcagggccagatttttaagtgaacatcttttgccatcacctagctgcctgcacctgcccttcagggagatgggggtcattaaaggaaactgaaccttga

SEQ ID NO: 723369 - DNA, 176 bp, Homo sapiens
agactggcttccgttgcgtgccggagaggtggagaaaaccctggtgccagcatgagcgagaacacattctacggggcagctggggtgctgacagacccacagctgacccatatcctaccgggtgcttagttacgtatcctagaggtgcgcatgcgcacgggcactacgcgcccacc

SEQ ID NO: 723370 - DNA, 203 bp, Homo sapiens
agcatcaaatgccttgtcgtttccaggtcgctatggtagtgactcaggacgtccttaagtatgttctcgtgaacaccaggttatgtggatggcacctaatactatttcaaagctctttcaatctgaccctcataatgttctaggcatcgtagcttataccccttcctatgaaccgtcgaccgtttagcaccttcaaggaactt

SEQ ID NO: 723371 - DNA, 413 bp, Homo sapiens
ccagatgattggattaaaaagtggtacatacatacatcatggaatacaactcagccataaaaaagaatgcaatattgtcttttgcagcaacatggatagaactgggggccattatccttagtgaaatggcccagaaacagaaaatccaaaacttcactttcttacttatatgtaggtacccccagacatacagagggaactaatagacactggagactccaaatggtgggcaggtgggaggggtgagggatcacctcttgggttcattgtacactatttgggtaatgagcatactgaaagccccgatttcaccactgtgcaatatattcatgtaaaacaactgcatttgtacccctaaatccataaaaataaaacatttaataaaactaaaaaagactttgaaaaaaataaaa

SEQ ID NO: 723372 - DNA, 134 bp, Homo sapiens
gccccccccccttttttgggggggggggcccccccccctttccccccccggggccccggggggtttttttttcccctttttttgtttgggggggggggggggggggcccttttttttttttttcccccccccca

SEQ ID NO: 723373 - DNA, 419 bp, Homo sapiens
aagtgctttagtgaatagacgatgttcatatgcatgttgtgcatgatatacataggtcatttgttttaccattttttctatttgagaccgagtctcactctgtctcccaagcgggagttggatgtgcagtggcgcaatctcggttcactgcaacctccatctcccgggtttaagcagtgctcctgccttagtctctcgagtagctcagattacaggcatgcgccactggaaatttttcctttgcttaatcctaaacctctgctctgtatttccccttctcaggatcacaatatacgtagtggctctgctacatatttactgtttgaatagctgataaaaggtccttggtccttaaaccatcttcagataacaactttgatttccttccatgacatcttaatctggggcccaagcctgct

SEQ ID NO: 723374 - DNA, 489 bp, Homo sapiens
  misc_feature (441)..(441): n is a, c, g, or t
ctcttaagtacagactgtgcagagttatgtgctgtgtgagtcagtgactggatcatacttgatgcagaagatagaagcctgtgagtcagtgtctgggcagatagagtgggctagggctactgtgctcagtgtgccccggtgcgccgttgtgattggtttgtttggtcttagtctatatgcgcagccgtggcatatttctacagcaaactaccttctccttcactggcaactcctggtcatggtgatactttgggtttttgggaacaatttctttcttcactgtggaatgggaagctgccgcctttgtagcccgcggctctgactaccgaagtatctgatctggtgtccgtgaggggacacgtatgacctcagaaacacagctggacacagagcttggtggaagaagtcgcctttgatcttcactatatattgggtgatgtncagtatggaaaatcaagggattacgactgttaaatcagccatagtggg

SEQ ID NO: 723375 - DNA, 145 bp, Homo sapiens
acttactcaccaaggctggagtgcagtggtgtgctccgggttaactgaaacctctggcttcccaggtcaaagtgattctcccgcttccagcctcctgagtagctgggagtacaggtgcctgacagtgcactcagcaaattttgtc

SEQ ID NO: 723376 - DNA, 151 bp, Homo sapiens
aaaacgtacacaaaataaacacacttcccagtcacggtagatagatctataccagcagttctcaccaaaggcaattctatccctcacaggggatatataataggtaatagccaggaaggcattatttggtatgtcacacactgaggagtag

SEQ ID NO: 723377 - DNA, 277 bp, Homo sapiens
gagtatataaaattagccaggcgtgatggcgcatgccgtgtaatcccatgctactcgtggaggactgaggcaggcagaatcgcattgaacccggggagccgtgagggtgccagtgagccaatgatcacaccagtggcactccatgcctgggcagcaatgagcgaagaattcatcgtcaagaaaacaaagattagataggaccgtggtgatgatgcaccgtgtagtcccatgctactgtgggagacctgagccagtgagtgatctcttgacgcccaga

SEQ ID NO: 723378 - DNA, 273 bp, Homo sapiens
ttggggctccatccagggttggatgtggctgaacagcaaagtaggagacaggaaaggtaaagagaggaaggctgaagccagatggagactaaaaggttatgtcaaagagttgggactatatcaggaagtaccgaagagtttaaggggaaagacacattagtggtgtagcagaggggtctgagatggatggaccgatggagatagggtctggctcggtcacccaggctgcagtgcagtggcgctatcccagtggactgcagactcagactctta

SEQ ID NO: 723379 - DNA, 593 bp, Homo sapiens
gtcaaattaatctaaggatcattctaatgcctttaagtatagtaattgattcatagttcattactaatcccctccatctataatctgaatacctttcccatcaatcttgccttctccaaaactttcttattctcctttattctctttctctttttaaaatttttaaatttgctttctgttttaaatatatgtgggaacgtagtaggtgtatatttttatggggaacatgagatgtttgatacaggcatgaaatgtgaaataaggacatgttggagaatggggtatccatccacctcaaggatttattcttctgagttactacccttatctttctcttaatctaagtgtttcccttctgtactaccttctttatttaatattcttctaaccctgggaagcagaaggagaaataataagcacaaaaacaaaatcagaaatccctggacatattaatttatgtgtgaccatttcttcatttatgtattataatccttttaaaccaagggagtatctgtatctgttcattcattaaataatttatttaaaaagcttgtagtgataattatcttctggatgtgtaggaatattaataa

SEQ ID NO: 723380 - DNA, 363 bp, Homo sapiens
acgtcaaaatgtggccacaaccgtaaagtcaatgtgttctataagtaaatttggaggtactgggtttctgttactctccttaagaaatggtgtccatgcttttcttcttaacttcactctcttaagccaagagctatattggagataataggtgaatcctgaaaaaccaggatttcctcatttctctttagggaaaaggcttcagcacttcaaagcttgcctagtgacagactgctcatgaggaagacctaccttttagccccaggacaggctggagtgcagtggcgccatcttggctcactgcagcctccatctcccaggagaatggcatgaacccaggaggcggagcttgcagtgagcaga

SEQ ID NO: 723381 - DNA, 313 bp, Homo sapiens
  misc_feature (28)..(28): n is a, c, g, or t
gggccccccccccccccttttttaaaantgggggggggggaactttttccccaaaaggggggggtggggccccctaaaaaaaaaggggcccggggttttttccttttttttctttgcctttacccaaaacccctttggggggccccccccctttttttggggggtccccccccgggggggggcccgggggtgggggggggttaaacccccttttggggggccccggggcttggttttttttaggccaggggtggggcccgggccccttttttttttttttggcccccggccccaataaaaaattggggggtta

SEQ ID NO: 723382 - DNA, 577 bp, Homo sapiens
gccccatttcgtgcgccctcagggctaaccttgcactaacgtctttacgtgggtacttgcgcttactttgtagccttcatcagggttgctgacagatggcggtatataggctgcgcaagaggtggtgcggttgatcggggtttatcgattacagacaccaggctcctctcagagggcatatgcaagcaccgccaggtcctttgagttttaagctgtggctcgtcatgttctggcgcacagttttgttgcatttcacactgttgaggtttcagggctcacgcatcagtggggtcatctcaatcccagttagggtcttcagctattgtgtgtacagctatgttaaagccactttcgtagtctctttagtgtcaactggcagttttttaacaactcaggtgcagttttagctttcattggggagggggtgcatctcaaaaacccttaacgccggctttctatagactatgggttaatcgtgtgcacgcggtggaaggcacgcaaatagacaaccctggggttagtatagcttagttcaacatcgtgaaatagctaaaggtacatactgggggatcctcta

SEQ ID NO: 723383 - DNA, 291 bp, Homo sapiens
gcccgtgctgatacacgacgggcggcctatcctacccccatgctgtctatcaggctctctgggggacttttcaacctgctcattttctttggccccagtcaggaagcaccagctgtaatgtgagcttttgcctgacaggagtgtactcttcttgacgactattgaagcagcaaaaatgcagagtcactgtaggcaggcagcaagttaatagctgcatctgatttctagtatcatagttcaatataatataaaaaataaaacatcactccattaaaaaatcatcaaaatgaa

SEQ ID NO: 723384 - DNA, 148 bp, Homo sapiens
  misc_feature (42)..(42): n is a, c, g, or t
actctcacgccaacggtgacacacttggcccctggatttgcngcgtatccatcactccctaacgggacacatgggtgccgatttctccgcaccctcaccccaacgtgcacactattggccccgcatttctcctgcacagctcacccca

SEQ ID NO: 723385 - DNA, 367 bp, Homo sapiens
  misc_feature (15)..(15): n is a, c, g, or t
ctagaggataccggngcttatcgatgccaccacacacagctaacttttgtatttttagtagagacagggtttcaacatgttggttaggctggtctcgagctcctgacctcaggtgattcatctgcctcggcctcccaatgtgctgggattacaggcgtgagccactgtgtccggccaagatgtctttttaagattgccttctaaagcatttctgtttgtggacacaaggtgacgatcagttcgtgccgtcagagcctcatgccatctgttgagcaaatggatggtgcatgaccaccgtgttcttccagctaagcccccaaggcatacagagccgggtcagctctgctcccagtggcatcgataaaca

SEQ ID NO: 723386 - DNA, 275 bp, Homo sapiens
cacgaggtaaaaaatggagaatgttttcgtgctgatcatctattaaaagctcattttcataaattgatgtctgataacaagtgttctgtccaaaagaaatcacaaatgggaagtgttttggcccatcttgataactatggatagcaagaacttgcggatctttttgtgaactataatgttaaacctcccattactggaaattatctatcccccccagtgtcttttaacttaatgttcaaaactttcattgggcctggaggaaaaatgcctgggta

SEQ ID NO: 723387 - DNA, 179 bp, Homo sapiens
tccagcacttcagtcacctcctccacgtgctgctctcatagtgcgcccagatctctcgctgcatcaccatttcctttgtgaaatttttatctcaacgctgaagggctctccttcctgcaccaagcctgggatgtttcgggctcctctggggcattcaatgcctgcaatcaagcctggaa

SEQ ID NO: 723388 - DNA, 142 bp, Homo sapiens
cgttacgagcaggattaccatggcaacaacacatcatcagtagggtaaaactaacctgtcgttactatggtctactcgaagtctcactgttcccttattaatgggtgaacaatccaacgcttggtgaattctgcttcacaat

SEQ ID NO: 723389 - DNA, 126 bp, Homo sapiens
aaaaaatgtgtagcaggaataaatcatgcaaatagagaagtaaggctaaggcagcaggtgagaaattagcagcaggtatggaaacagaagataagagagctgaggcttaagtctgggctacctgag

SEQ ID NO: 723390 - DNA, 448 bp, Homo sapiens
tctagagatcccgccggtctgcaagagcggatgggcggatattaccgctcgatctcattatgtctttctatgagtataaaatccttctgtctgcgctctcatctggtgtcaggacattcatatggttaatagacaggtttgactatgtagtatagctgtcacagtaagcaggtcattgtataggaaaatgcctggagtcataatttgctattattagtcacgagcaatttattaacaggcagggcctatccttgcctgtagttctcaggcactggatgcacacaatcactgtgtaacattggctcacttggtgagcatagggttgactgatagaatgtttaattcccttgctagcttgtgagaagaatgatttgatcacatgctccataccagtggctagatggagtattaaggtggagcaaaagcgaagtgagaacatgttgattcc

SEQ ID NO: 723391 - DNA, 250 bp, Homo sapiens
tcaaccttcctctttctttctttctttctttctttccttctttctttcctctttcttctctctctctctctctctctctctctctctctgacagggtcttgctctgtcacccagagtgagtgcagtggcacaaacacggctcactgtagcttcaaattcccaggctcaagcaatcctcccacctcagccttctgagtagctgggactgtaggcatgcaccaccatgcctggctaactttttaaatttttc

SEQ ID NO: 723392 - DNA, 281 bp, Homo sapiens
ccagaaaaatagacattaaaaacaaaacaaaaaaaaagcaaaaaaaaacaaacgtaaataaaaaccacaacctgatgaaccagttgctgggttgtatggtagttgcatatatggttttcaaagaaatttccaaactgtgctggagtagttatcccatttatatagtcccatctgcaatgtatgagtgatcccgttatttggtatccaagccaggaattcggtgtaataaactgtatataattacagccattctgatcggtgtatagtggcatcgataaaca

SEQ ID NO: 723393 - DNA, 324 bp, Homo sapiens
tcgaccagacccacagctaacatcatactcaatggtgaaagactgaaagctttccctttaagattaagaacaagacaaggatgtctgttcttgccacttctattcatcattgtccaggatgtactagccagggcagttaggcaagaaaaagaaataaaaaagccattcagattagaaaggaagtaaaactatctctgtttgcaaatggcatggtgttgtatgtagatcatcctaaagaatccacaagaaaactaacagagctaataaataagttcaacatcaattgtatttctatacactggtaatgaagtcgacgcggccggc

SEQ ID NO: 723394 - DNA, 429 bp, Homo sapiens
catctcccatcctgtagctacaattggcatacaactactataaacctcccttcaccaccactgtcaggtcctcttccagtcattccagtcattagctgtcctgaccaaacattaaaaaaaaaattcagctaaatacagaagaagatggtatgtctggctagtgggagtgattataactaaaaactttgctccttttgtgctgtccatgcagtatgtcttcttcctttctatcactttacaatgaaaaattgcctcagagctcaataagaagtctagagcctttttccagggctaagaaagaaagaaaaagaaaagaagaaagaaagaaagaaaaagacagggagagagagaaagaaagaaagaaagaaagaaagaaagaaagaaagaaagaaagaaagaaagaaagaaaaagaaaagaagaaaaaaaaa

SEQ ID NO: 723395 - DNA, 300 bp, Homo sapiens
acaaaggcttagagaacatgagtacacacagtacttattccatctacgaagggatgatgatgtgtggagaaattacgaaggaaaagctcatggcttcatggtctcttgggtatgatcaagtgtaggaaaaagtctacagagagtgactagaaatgtgaaaatggaagccattaaaactgaagaagggaaatgaaacagaactattttaaaacgatgacaaattgaccaaggatttaatatttttgtctttactgtagagaagttatgcaaatacctcagaaggtgttggggataacatca

SEQ ID NO: 723396 - DNA, 1752 bp, Homo sapiens
tcgccggcctcggcgcgggggccaaattcgacacgagacgcttctcggccagcacgccagctcgcattcccagcatcaggcaacaacaggcacacatcatgcactttgcattcttcggcaggtgcttccagggcactggcacttttattggcaaaccaagcaagtcatgtccccaggtgtgtagtggcagccatccaccacacaccagcatccagcacagcccaccaacacataggcagcagcacacaacacagcacagcagcagcctcaacatgcacaagggcaagcagggcagccagcagccacagcacacaaccacaggcacagcacgcattgcaattccagcacacatgtgcaaatacccccacagcacagcacaggtctgctcacatcatcacacagtcggcattgtcacaatcaatggtcaaggcacagccacaacgcattatgccacagcactgcaacacacacagtatcccagccagcacgaacacagttccaacagtcaaactttccaggccacaccagttaggcacgaacatcgtgaccagcacacaccagacaaaacacagcaattccacacgtatcctatgacagcggcacattcacaaacccacgaccacacatttcccaccgttccgcacagtggcacaaaccggcaatcctatcccaatggtcacacccaaaattgtaggcgttaaccattatatccacgcacacaacgattgcaccccaggggacacattacatcagagacacttcgagcatctatccaattcacggaaaagtaacgcattatcccaggaccaacgcaagtatccatcacacgcactcggcccaagggataatcccacacacaattggcccataaaaggccacaaaaatttccacacaaactggacaaaaggaccatagtacaccaacggattctaacattgcgctggacccacttggggtcaggcggatcaccgtgtacgatgggcgaatattcacgttggcattcacaaaaacattgagaagtacttgagacacaaacaagcccaatatcagcacaattatcaaagaaccacatcacacctatcaattactacaccgttcgccacaggacttggaacaaccgacaccccgcgggacacgactattatcacaacagaggcactatcacacgaaacagacgacccctggatacaattaacatcaatctaacgacaaaaagcaatggctgacaacacgttatgggacgcaaacaaccgagacaaacttcccacaggccaacacacgttacacataacaccacacattatacgtgacgaggggcacaaacaagggacacattaccaacaatatctacacacacatgctaatgcaccaccgaacagagcatgcacaatgagggacagcgcacacatagacaacacatttaggcacactatcaaaatctcaatatttaagaaacagatcatggcaataatcatatgatgacaacatatacctacatatacacaaccacaacaccacatatatgactcaccatacataatacaccaccactgacgaataagtagataataaacgcgtatcgaaaaatctatcactaaacactacacatgcaacaaccatctatcatacatcaccacacacattaacactactacactatcacactacctaatcacatgtacatcaacaagccactactatactcaccaacacctaacgtatcacatctacacccagtcagcctaaacgaaa

SEQ ID NO: 723397 - DNA, 351 bp, Homo sapiens
tataatggcatacgaccgtgggagatctggtacgcctatgccgcatgactagtcttcgtagacgtgaaggtagcctacatttggggccgagtatgctctcgatcatgaatgccctacttttccacggatgtcccttcactatgacctggagggctcagcaggaagattctgtcggagcccagagaattttggctgctcttccacagcgtatagaaggggatgtccgatggcctgtatgggccctgtggagaaacgcctaggttgcactggccgtaggaagcctctccgtcaagtaaggccactggcgcgggtaggaggaccaagcctcgccaggtggcgtctccgtatccc

SEQ ID NO: 723398 - DNA, 346 bp, Homo sapiens
ccccccacttattcgaccggacaaggaagagctctgaaattaccaaatcctgatgcacattgcatgcacagcgttgccgcatggaatggcttacactcgagcgcatcagttatactccactagacgatctgcgatcagcaaatcattctactgtggaatggactcatacgcctgcgagttgctgacttcggattggcccgattgatagaagacaatgagtacacagcaagacaaggtgcaaagttccccatcaagtggacggcccccgaggcagccctgtacgggaggttcacaatcaagtctgacgtgtggtcttttggaatcttactcacagagctggtcacca

SEQ ID NO: 723399 - DNA, 127 bp, Homo sapiens
cacatgtggggagataagtcagctgaacagaaggtggtataaggagtaggggaaagacatgggatgggtggacaaagcctgcatgtgaaaggtactaaactttctcctgccacccaaagagccattc

SEQ ID NO: 723400 - DNA, 165 bp, Homo sapiens
gtcacatcagaagatggtgttttgtcgcactgatgtgaggatctgcggcatgtaacgagcacggtttacattctccttcgtggttgattttaactttcacattcaattcttcctgttacagaaccaaagccacacaaacttcacccatgtcactgctcacaactg

SEQ ID NO: 723401 - DNA, 155 bp, Homo sapiens
cagatctgctggtgataactcaggtattcctcgatcagcgccggtgaatcgaccaagtcgagcgcctggcaaaagcgctgccccgccccgccgttcatgtgatcgcccgatcaagatgcaggtaaccgccgtccaccgacagccattgtcgacgc

SEQ ID NO: 723402 - DNA, 770 bp, Homo sapiens
  misc_feature (571)..(571): n is a, c, g, or t
gctacagtcatggttgccgtcgtacgctgctgccgtgtgcagggttagccccgagtccccggactgaattgctcccgaaaggcgacgcgatacaacgtcgctgaggaggagctggaggaggacgacgatgaggagctagatgataccctgtcggagagactatggggcctgacggagatgtttccggagagggtccggatccgcggacggagccacttttgatcttcttcaccgtcttgtgtggactcagaacaatgtacgagggttgttccagggctagggccttgtgcgagtcgtgaccagatgtccgtttatgagtcgctggtgtcgttcccgttgtcgtttgagatggagatagttgtcaatactggacgcaacgagcacgcatagtcgtgcatgcgacgtcggtcacgataccttctagtgagccctaatgacatggtgtctctcagggacgggacactgccacggtgtgctctatctcctcgacttcctggaccagatctacgactggttattgcatgtattgagctgtactcaagttgggataaggttctcgaaacaatttcanacgtgtaagttggacttaagcatggatataagttcaggaatgttccttcttccaatcatgttgacttgtctgggcgcacattgtgatgccattttgatactcgtgagagaggcgcgaagaagatggggctcggaggttttggggttcatactgcaggaggaattgtaaagtttgcgtggagagtgcctggcggcttaag

SEQ ID NO: 723403 - DNA, 331 bp, Homo sapiens
ccgcaggctcatttccgtcggcaatctcgtcaatgccaacaacaccatcctgacgaccatcgtttcgcttgatccgatcgatttctatttcgacgtggatgagcgcaaccttttgtcctatgccaagaccgcccgcgaaaacggcagcaatctgcaggaaggcggcggcggcctcgaagtgacggtgcggctgaccgattccaaccagccgccgttcaagggcaagctcgatttcgccgagaaccggctcgatgatgccaccggaacgatgcgggtgcgtgcccgcttcaacaatccggatttcgtgctgcagcccggactgttcggccgg

SEQ ID NO: 723404 - DNA, 175 bp, Homo sapiens
cctcagccatctgagtagctggaactacaagcccgtgtcactgcacccagctcaaaaaaaataattaaatcttattaaatatattttataaaaacaaaactactttgcagtcttagtgttcactgtccacttagttgccaaagtaaagaattagtatcactctttgtttaggtta

SEQ ID NO: 723405 - DNA, 374 bp, Homo sapiens
cacggcgtgtagaggtgcgggtgttcaaggtggaatcggccaactgcagcgacgcgatccgttagcgggtcacaccacccagatgtgcgagcaccgctgggcccacccaggtctcggtgatgttgtgggctgggcaacagccccatgggccgcttcaacggcgcagagttgaatgggcaacgcacagcggtgtgccaggtcggcaacatcagtgaggcgtgcaacggcgtggttttcttgctgggctacatctatgtgttcgacctgaacgtccaggcccagggctgcttcgaatacaccaatacctcgatcaacccgccgcaaaacaccctgaaagcccagctcaatatccgctgatcaatcatcttgaacgc

SEQ ID NO: 723406 - DNA, 343 bp, Homo sapiens
cattgtgcagatacgatgatctccatgtcctctacagtttcatcatctgatttgaactacttgaacatacaccgggtacgtggactccaaacgcatttcaattctcggatcacatccatatgcaaaaaattcgtaactatggccagctcttacccttatgcaatctgtcaggatcagctactactaggtcagttgcaacctgtatgagttggtttccgttttccacatcacatatcttgcgcgattttattaaaagtcgcagttaacacatacgttaatcgagctacggagttcacggtaggatgcgttacgtagctctacacagaataaagctcgaaccaag

SEQ ID NO: 723407 - DNA, 211 bp, Homo sapiens
aaaaaaggggcccccccccccggggggggggcccccccccgggggggggccccttttttgggccccaaaaattttttttgggggggggggggggggccccccccccccgggggttttttgcccccccccccccccccctttatgggggggggttttttttttaaaaaaaaaaaaaaaaaaaaaaccaaaaggaaaatgaacccccaaccca

SEQ ID NO: 723408 - DNA, 131 bp, Homo sapiens
aggagaccccatatctataccaacacctattctgatttaatcggtcaccctgaagtatatattcttatacctaccaggctatcgtaataatctccccggatacagccccccgtatcctccccgggatacag

SEQ ID NO: 723409 - DNA, 621 bp, Homo sapiens
  misc_feature (30)..(30): n is a, c, g, or t
  misc_feature (73)..(73): n is a, c, g, or t
  misc_feature (78)..(78): n is a, c, g, or t
  misc_feature (460)..(460): n is a, c, g, or t
  misc_feature (474)..(475): n is a, c, g, or t
  misc_feature (483)..(483): n is a, c, g, or t
  misc_feature (487)..(487): n is a, c, g, or t
  misc_feature (491)..(491): n is a, c, g, or t
  misc_feature (494)..(495): n is a, c, g, or t
  misc_feature (499)..(499): n is a, c, g, or t
  misc_feature (509)..(509): n is a, c, g, or t
  misc_feature (517)..(517): n is a, c, g, or t
  misc_feature (528)..(528): n is a, c, g, or t
  misc_feature (552)..(552): n is a, c, g, or t
  misc_feature (555)..(555): n is a, c, g, or t
  misc_feature (557)..(557): n is a, c, g, or t
  misc_feature (567)..(567): n is a, c, g, or t
  misc_feature (577)..(577): n is a, c, g, or t
  misc_feature (588)..(588): n is a, c, g, or t
  misc_feature (590)..(590): n is a, c, g, or t
  misc_feature (592)..(592): n is a, c, g, or t
gtttcaattttaattaattgtgcttaaggntttaattaaattggggggttcccttcttagagcagctcgtacngacgnaggtgcatgcgctgaatgatgtcacggcagtcgttgaacacacggcggatgttctcagtgtccacagcgcaggtgaaatgagggtagcagtagtgacgcccatctccactggcagtgctgatcctcagaaactcatctcgaatgaagtacttggcccgggtcacgcgtgggtcctctccgggctcgggagtagcatcctcaggagtagtgtagcgagcaaattctggaaagtagtcctcaatcttcgatttcccagcaaggactttctcagcgagcagatcttgcttgttgaggaacaggatcacagagatggtgcgcagccatctgttgttccagatgctcttgaagaggttcagagcctcctgcaggcggtatggtctgnttgtcctcccggannaccatgtngtanctgntgnntggncaccacgaanatgatggnagtcacatcgntgaagcactggatccacttgcggngtncntcgcgctggncacccacgtnaaacatgtggnantngactttgtccacttggaacttggtcccaa

SEQ ID NO: 723410 - DNA, 730 bp, Homo sapiens
agtcagtttactcaatggagtactattcagccataaaaaaagagagatcctgccatttgcaacaacatggatgaaactggagaacactgtgttaggtgaaataagccaggaacagaaagacgaacttcacacgatctcactcatttgtggaagctaaaaattaaaacaattgaactcatggaaatagagagtaaaggatagttgccagatgctgggtagggtagtgaggtggtgggggagaaatagggatggttaatgggtacaaaaaaaccagaatgaatagtcgggtgcagtggctcacacctgtaatcccacacttggggagactgacagggggatcatttgagaccaggagtttgtgaccagcctggggaacatagcaagacatcatctctacagaaaagtttaaaaaattaaccagacttgatagtacatccctgtagtcctagctactcaagaggctgaggcaggaggatcacttgagcccaggagttcaaggctgtagtgaggtatgatagtagctatgtagtaatgccactgtactccagcttgggcagcagagcaagactctgtctcttaaacaaacaaaaaaaccttccttggttcttccttccctacctgtgaaataaaacccaaatctagatttcatccatatctggtgcagctatttctagcttctttcatgtcgttctctctacattaagtccgtatctaatagtactataggtga

SEQ ID NO: 723411 - DNA, 329 bp, Homo sapiens
  misc_feature (30)..(30): n is a, c, g, or t
  misc_feature (73)..(73): n is a, c, g, or t
  misc_feature (78)..(78): n is a, c, g, or t
gtttcaattttaattaattgtgcttaaggntttaattaaattggggggttcccttcttagagcagctcgtacngacgnaggtgcatgcgctgaatgatgtcacggcagtcgttgaacacacggcggatgttctcagtgtccacagcgcaggtgaaatgagggtagcagtagtgacgcccatctccactggcagtgctgatcctcagaaactcatctcgaatgaagtacttggcccgggtcttcacgaaactcttcagcgcccacttccggcgcatgaacggccccagtcctgctcaagcctggcttcggtgccatgccattgacagaac

SEQ ID NO: 723412 - DNA, 350 bp, Homo sapiens
  misc_feature (14)..(14): n is a, c, g, or t
  misc_feature (22)..(22): n is a, c, g, or t
  misc_feature (27)..(27): n is a, c, g, or t
  misc_feature (65)..(65): n is a, c, g, or t
  misc_feature (87)..(87): n is a, c, g, or t
  misc_feature (215)..(215): n is a, c, g, or t
  misc_feature (220)..(220): n is a, c, g, or t
  misc_feature (242)..(242): n is a, c, g, or t
  misc_feature (257)..(257): n is a, c, g, or t
  misc_feature (301)..(301): n is a, c, g, or t
  misc_feature (317)..(317): n is a, c, g, or t
gggcaatgccagtnctacacgnatgantttttttaattttttgtattatagagacagggtctctnttgcccaggctggagtgcagtnacacaattgtagctctctgcagcctgcaattcctgggttcaagagaccctcccacctcagtctcccaagtagctgagactacaggcactcaccacctcatccagctaatattttagtttgtagagatngaggncttgctatgttgcccaggccgntctcaaactcctggnctcctgaagtactgggattacaggtgtgagccactgcactttgncctacaccgatgaatnttttttttttataggggacagaggtttgctctt

SEQ ID NO: 723413 - DNA, 208 bp, Homo sapiens
atcgacggtgttgacaatggttgccaaaatatgaatgtacttaaggccacaaagttgtacagttaaaaatggttcaaacaggagttcctgtcatggcgcagtggttaatgaatccaactaggagccatgaggttgcgggttcaatccctggccttgctccagtgggttgaggatccggcgttgcggtgagacggtaacaccacagtac

SEQ ID NO: 723414 - DNA, 719 bp, Homo sapiens
agcggtggctcacgcctgtaatcccagcacttgggaggctgaggcaggtggatcacgaggtcaggagatggagaccatcctggctaacatggtgaaaccccgcctctactaaaaaaattcaaaaaattagccgggcgtggtggcacgcgcctgcagtcccagctactcaggaggctgaggcaggagaatggcatgaacccaggaggcggagcttgcagtgatccgagatcgcgccactgcactccagcctgggcaacagagcgaggctccatctcaaaaaaaaaaacaaaattaatattatgtacttaaattaaaattttggccagggcacaggggcctcaggctggtaattcccggcactttggggagcggctgaggcggggcagaccatagggtcccggagttggagaccagcctgggccaatatgggtgaaaccccgccttctgttagaattacaagaatttagccaggggtggggggggtgccggtaatcccagactacatggggaggctgaggcaggaaaatcattgaccccgggaggcagacggttgcgtggacccaagatggtgccatcgacttgccagcctggtaccaagagcaaaactctgtctcaaaaacattaattcccttcacttcaaatacttataatttatccaaagcggggacagggctcccatttgtactccagaacttggggagtctgaggcagacggttgt

SEQ ID NO: 723415 - DNA, 88 bp, Homo sapiens
gatctattctgagtattttttagagagttaatatttatattttagtaattttctggtagaggaaattgcacataaaatgatttggttg

SEQ ID NO: 723416 - DNA, 146 bp, Homo sapiens
gctactgtcttggtgggcgctactggccttggtgggggtatggccttggatgggcgccatggccttggtgggcgcactggccttggtgggagctatggccttggtgggcagcactggccttaggtgggcgctacttgccttaggtg

SEQ ID NO: 723417 - DNA, 397 bp, Homo sapiens
ggatttttttaaaaaaagttttagggtttttccttttttcaacttcacatacttcgtggctttgcaaaaaaaaaaaaaaaaaaaaaaagcagtaaaccgtatttaccaaaaaaaaaaaaaaaagttttgtttggtatcaaagtatagctgcaagctgagccggctggctgcacgggtcccagagcgcgtggggaccgcacgggtctcctgggccgctcgcctgcgacccgcgcgggtcagctgggccgcacccccgagaagccgcggagaggcaccgacaggcaggcgcggcccgacgtgtttaccgtccgcgtcgaccccggggagccgctccctcgcgcccgcagcacttgttcacggcgcggactccacggcggggactccacaccgcggccgc

SEQ ID NO: 723418 - DNA, 170 bp, Homo sapiens
tctcaggcattgtgagtgaggattaaatgatatgcttacacggctgtgtgccagagaggtggaaacgggtgtaactgtccagtaattgattagctgtggaatcattattagacatgtcgaaggttcaaaaaaattatggagccatgaaggatgcaaactagccagggggt

SEQ ID NO: 723419 - DNA, 630 bp, Homo sapiens
ggagccagggcgacggcctgcgtgatgattgcggggctccggtccgctggatcgtacgcctgtcttgcgacctgtacagctgggctgcctgggtgttccgtaccggctcggccacaggcatcgccgccagccagcgaaggttccgcggagtccatgggacctgattcaagagccagaccctgacggccgcctgcccaccccctctgcccctgctccactcgttgagcactggatacagccaggcccagagcaagagccctgagagacccccaagccacggccgtgagaagcctctttgtggctgaaaggtccctgtgacattttctgccacccagaacggaggcagcatgacacatgttcccgctcctctatcggccccgtgcctatcccacggagtacaccccaactagcacccaactccagactcgggagtgcccccaacagcaccctctccgagatgagcagtacaccccaacagctaccctctccagatgagagtacaccccaacagcaccctctccacatgagagtacaccccaacccgcaccctctccagatgcagccccatctcctcagcaccccaggacctgagtatccccagctcaggttatcgtcctgggtccagcctga

SEQ ID NO: 723420 - DNA, 363 bp, Homo sapiens
tatactgtgtgggttggcttcaatccttatgaatttttagttaacttttttgacatccttgcaggggaattttattttttggattttgacccattgcaggatcccaatgtttataatgtttcccaaggtggagatcttttccagttgttgatgccttgagttttgccaaccttgggtggcaaatgtgttgtgttcccttccagttgttgggagggggagttagagctggtcgttttttgattacccattattttggaagcaccctgagggctagttaatccaaacatgcatcaacaatttggcctgggaatatgtaacagccaaacctttttgtttagtgtttattaaaatttttaattggta

SEQ ID NO: 723421 - DNA, 238 bp, Homo sapiens
gagcagcaggctccagataacgatatgcggggggcagcacggtgctcacgtgtcgacggaacttgtgcagggaggcatgcaccgcagtggtgaatacacgtcgaccaggctccatgtatgcgttattgggtcgtgagcgcggagctcatgtatcgaaggaacttgtataggaaggtatgcaccgcagtggtgaatacacgtcgagcaggaggcatgcatgcatgctcgggtcctggac

SEQ ID NO: 723422 - DNA, 788 bp, Homo sapiens
ctggccggcatggcgatgacctccgcaacaccaagaccatgagatctctgagatgaaccggatgatccagaggctgggagccgatgattgacaatgtcaagaaacagtgcgccatactctgcagaacgccacttgcggatgccgagcagcgtggggagctggccctcaaggatgccaggaacaagctgggcgagctggaggagggcctgagaacggcaagtcacgtgacatggcccggctgtgttgcgtggagtaccatgagctcatgaacaccaagctgtccctgggacgtggagatcggcagtttaccgcaagctgctggagggcgaggaatgcacgcaactcagtgtgagaagagaacttggaccagtcaagatctctgtagtcacaagcagtgtttcctctggatatggcagtggtggtggctatggcagtggcctcgtgtgggaggtcttgagccggcggcctcgggtggaagcgctctatgccggcagagttagctagctggaaatgctaacaactccattcagcaaggtagagcgagtgctgtcgcgccctaggatgatgggactcagtagtggggggctctgaccttttagttgcaaagcacgtggccgagcgagctggcggggataggcgctatgtgcaaggtgcgcgggagtagcatgggatccaggctgtcaaagattggtcctccaccaactccttcacgtcccggaaaggacgcttacacagaagccttaagaaaccctgtcttgcaaagttcactggcctttcccaaggtgcag

SEQ ID NO: 723423 - DNA, 183 bp, Homo sapiens
gatgttcaccgcacagcctttcagcatgacttagtcattggtcacttcaccatagtggacaaagccacccggagggttgatgctcttgtctagattggtctatagcttttgcctggtttaaacttgatcagcttgccgtccttgataaggtagccctggccaatcttataaatcttcttgttg

SEQ ID NO: 723424 - DNA, 119 bp, Homo sapiens
gcaactaatatttcactttacatccaaacatcacttgtggcttcgaagccgcgctgatactggcattggtagatgtggttgactatttctgtatgtctccatctatggatgagggtctc

SEQ ID NO: 723425 - DNA, 300 bp, Homo sapiens
  misc_feature (133)..(133): n is a, c, g, or t
ttccctttgtctgttttactactgagtattattttattttatagacacacctcagttgtttatccattcaccagaaggaccgttgggttgcttccagttgtggggctactataaacattatgtatgagttttngtgtaacagaaaagtattacatttctcttggagaaatacctaggagtggaattgatggatcataggttaagtgtatgtttaactttataagaaaccaccaaaccccattctaaagtaactgttccatttggcctcctcactagcagtgcatgagacaaagggaaaca

SEQ ID NO: 723426 - DNA, 425 bp, Homo sapiens
aggaggttttttaggttggcccggggttccttttcaagggcggccagcttttccaggaccattccccccctgggtttggcctttttggccagggcctcaaccctttgggtggctttgtccccttttgtgaagtggcccatggctttttccttcttaaaggcttttttgttggaacccagaagcgggttctccccccccgcaagtccttttttgttccgacggagcggcgggcttttggggaggttggccctaagttccttggccccccccccaagttttgcccttgccggttcccggcccttgggggggaggaagccttctttgggccccttgaggaaggccggatttccaagggaggaggggctttattcccgggaccggtttttccgtttgtggggtttccattaaagtttttttcccctgga

SEQ ID NO: 723427 - DNA, 144 bp, Homo sapiens
ttacgccgccgcagacctcttctctgcacgccatttccgtccgcacccttcatggccacagttcagcatctgtaaggcagatggcgcctggtggacagcaaaggctttgatgaatacgtgaaggagctaggtgaggcacccggc

SEQ ID NO: 723428 - DNA, 145 bp, Homo sapiens
tcactgcttgccttgactccaggcccaagcgatcctcctactgcagcctcccgagtagttggagccacaggtgtgtgtccccacgctggcttttttttaaatttttatagggtctcctcattacccacagctaatcttaaactcc

SEQ ID NO: 723429 - DNA, 164 bp, Homo sapiens
gtacccgtgaagtccgtggaagcctgtgttactatgttactctgaaacgtagatccgtcggaaatggtgaagggagactcgaagtactctgaggcttgtaggagggtaaaatagagacccagtaaaattgtaatgagcagtgcttgaatttggcccttatcgag

SEQ ID NO: 723430 - DNA, 89 bp, Homo sapiens
tgagacaaggtctcactctggtgcccatactgaagtacagcggtgcgatcttggtgcgctgcatactacaccttctatgccaggcttgt

SEQ ID NO: 723431 - DNA, 107 bp, Homo sapiens
cgggattttttttggggggttcccccctcccgggccccccccctttggttttggggggggttccctttttttccgggtcccccttttttttttttgggcgcccccca

SEQ ID NO: 723432 - DNA, 832 bp, Homo sapiens
ggagagagagaactagtttcgagttttatttttttttttattaaggttggaggggaaatgcgggaaatggtacggggtatggaaacttatcatataagtaaggccagggtgagtggtaggaagttttccaaaggagaggtgttatcggaagctgggtcgtaacgcggaaatgccgggggtatgcctgtacgaatatcctataagaaccagggcaggttcaaaagtagggacctgagggtgaccacaaatatgctcgtcgtacagctccagcggaacactgccgtcatcatgttgtccctagcgaagcattgccatgcggcacacgggctgtaccaacctcccccaactacccgcgctacgcgcagtactcaccacagccacatcaacacgaccacacgcggccaaccacgcgccgcccccaaccacagcacaaccccaacacctctcccacgcccggcgacacacacacacaccagaaccaccccccctcgccacacaacacacccaaccagacggcaaaccacacacaggccaccacacgcgaccccacagccgcccgcccccccacataaacccaacaacccacacacagtgccccaccaaccagcccccacagacaacccgcgcgcccggcagccacacccacaccacaacagacacaccacccccacacagcacaccccacacccaccagcgccagcagccacaaccgaccccccaccagccacccccacccactaccccaccacaccacacccaccaccccacccgccgcccacccaccacccaccccccccgccccccccccccacccccaccccccccacccccc

SEQ ID NO: 723433 - DNA, 172 bp, Homo sapiens
aacccaacgtggctaggaagcacaactgtgacacatggacagctggatgggtctcggcaccacgctcacagaaaatgtccacctcgaaatgccacgacatacgagtcgatcatggcatatctagagggacagactgtggcagggttccagagtgagattcaagggcagggct

SEQ ID NO: 723434 - DNA, 407 bp, Homo sapiens
ttttttttttttgctaataaaatattatttgaagtaaatttccttcttccctgtatctgaacctacccaatgtttagttcctgtattttttgaccaaaatattagtcattgcccttatcatcatggccaggcacggtggctcatgcctgtaatcccaactttgggaggccgaggctggtggatcatctgaggtcaggagttctagaccagcctggccaacgtgatgaaaccccgtcgctactaaaaatacaaaaaattagctgggcgtggtgacaggtgcctgtaatcccagctactcgggaggctgaagcaggagaattggttgaacccaggaggcggaggttgcagtagctgagattgcgccgctatactccaacctggcgacaaaacaagactccatttggggg

SEQ ID NO: 723435 - DNA, 1995 bp, Homo sapiens
  misc_feature (1635)..(1640): n is a, c, g, or t
gaattccgagctttttattcctaagaggagaaaatcagtaacgggagaagcaggaggatgtccagaagaaatttcatcccttgctctcgcccctactctttctggtgttagatcgagcaaccctctaaaagcagtttagagtggtaaaaaaaaaaaaaaacacaccaaacgctcgcagccacaaaagggatgaaatttcttctggacatcctcctgcttctcccgttactgatcgtctgctccctagagtccttcgtgaagctttttattcctaagaggagaaaatcagtcaccggcgaaatcgtgctgattacaggagctgggcatggaattgggagactgactgcctatgaatttgctaaacttaaaagcaagctggttctctgggatataaataagcatggactggaggaaacagctgccaaatgcaagggactgggtgccaaggttcatacctttgtggtagactgcagcaaccgagaagatatttacagctctgcaaagaagactacaaaggcatttcttcctgcaatgacgaagaataaccatggccatattgtcactgtggcttcggcagctggacatgtctcggtccccttcttactggcttactgttcaagcaagtttgctgctgttggatttcataaaactttgacagatgaactggctgccttacaaataactggagtcaaaacaacatgtctgtgtcctaatttcgtaaacactggcttcatcaaaaatccaagtacaagtttgggacccactctggaacctgaggaagtggtaaacaggctgatgcatgggattctgactgagcagaagatgatttttattccatcttctatagcttttttaacaacattggaaaggatccttcctgagcgtttcctggcagttttaaaacgaaaaatcagtgttaagtttgatgcagttattggatataaaatgaaagcgcaataagcacctagttttctgaaaactgatttaccaggtttaggttgatgtcatctaatagtgccagaattttaatgtttgaacttctgttttttctaattatccccatttcttcaatatcatttttgaggctttggcagtcttcatttactaccacttgttctttagccaaaagctgattacatatgatataaacagagaaatacctttagaggtgactttaaggaaaatgaagaaaaagaaccaaaatgactttattaaaataatttccaagattatttgtggctcacctgaaggctttgcaaaatttgtaccataaccgtttatttaacatatatttttatttttgattgcacttaaattttgtataatttgtgtttctttttctgttctacataaaatcagaaacttcaagctctctaaataaaatgaaggactatatctagtggtatttcacaatgaatatcatgaactctcaatgggtaggtttcatcctacccattgccactctgtttcctgagagatacctcacattccaatgccaaacatttctgcacagggaagctagaggtggatacacgtgttgcaagtataaaagcatcactgggatttaaggagaattgagagaatgtacccacaaatggcagcaataataaatggatcacacttaaaaaaaaaacnnnnnnaaacaaaaaaaaaaaaaaaaaagggggggccctcacaaaagtatacccctacgagggggcccaaaggtaaacgaggaccccagtcttctcgtggcaccaacgggggccccacaatagggactcgcgattaaacagacaaggacacgggccggagctgtcataaacacggtcgtctgaccggggaaaaaccgggtaacccttgcgagacaccctcggagaaaagaggacccccataaacaaagccagagggggggcaccacacatggggggcaccaaagcgcagccccacacaagaaactcttaaaggcccccaaggggggaccatacagacaacttccacgaacgcgccctaata

SEQ ID NO: 723436 - DNA, 1447 bp, Homo sapiens
  misc_feature (1087)..(1092): n is a, c, g, or t
cctgtaatcccagctacctgggaggctgagacagaagaatgcttgaacccgggaagcagaggtgcgttcaagcaagtttgctgctgttggatttcataaaactttgacagatgaactggctgccttacaaataactggagtcaaaacaacatgtctgtgtcctaatttcgtaaacactggcttcatcaaaaatccaagtacaagtttgggacccactctggaacctgaggaagtggtaaacaggctgatgcatgggattctgactgagcagaagatgatttttattccatcttctatagcttttttaacaacattggaaaggatccttcctgagcgtttcctggcagttttaaaacgaaaaatcagtgttaagtttgatgcagttattggatataaaatgaaagcgcaataagcacctagttttctgaaaactgatttaccaggtttaggttgatgtcatctaatagtgccagaattttaatgtttgaacttctgttttttctaattatccccatttcttcaatatcatttttgaggctttggcagtcttcatttactaccacttgttctttagccaaaagctgattacatatgatataaacagagaaatacctttagaggtgactttaaggaaaatgaagaaaaagaaccaaaatgactttattaaaataatttccaagattatttgtggctcacctgaaggctttgcaaaatttgtaccataaccgtttatttaacatatatttttatttttgattgcacttaaattttgtataatttgtgtttctttttctgttctacataaaatcagaaacttcaagctctctaaataaaatgaaggactatatctagtggtatttcacaatgaatatcatgaactctcaatgggtaggtttcatcctacccattgccactctgtttcctgagagatacctcacattccaatgccaaacatttctgcacagggaagctagaggtggatacacgtgttgcaagtataaaagcatcactgggatttaaggagaattgagagaatgtacccacaaatggcagcaataataaatggatcacacttaaaaaaaaaacnnnnnnaaacaaaaaaaaaaaaaaaaaagggggggccctcacaaaagtatacccctacgagggggcccaaaggtaaacgaggaccccagtcttctcgtggcaccaacgggggccccacaatagggactcgcgattaaacagacaaggacacgggccggagctgtcataaacacggtcgtctgaccggggaaaaaccgggtaacccttgcgagacaccctcggagaaaagaggacccccataaacaaagccagagggggggcaccacacatggggggcaccaaagcgcagccccacacaagaaactcttaaaggcccccaaggggggaccatacagacaacttccacgaacgcgccctaata

SEQ ID NO: 723437 - DNA, 1136 bp, Homo sapiens
  misc_feature (1136)..(1136): n is a, c, g, or t
ggcagcaggacgtcaccaggagtgcgaagcgggcacgggcatgtgggccccgggacattgctgcatgcataggaggttggcaggggctcggcctgcgtggctgccggtcccacgaggctctgcggcccagtggtctaggtgctgtgatgcagggcccatcggttggtcttgtgtagatccgtcttgtattgccctcaccggctcatgcctccatggggcttggctatggcatgacaggtagcagcatccagggggacgtcaaaggagcaatggaggcagagaccaagacgtagagcgatggcagggcaggggccgtgaagtgaagtgagactcgtcagggacgtggatggcatggtgcacggcaagggcgctgatggatgcagcagcagggacggacgagctgggatggcacgtgagcctctcagtagccccgtggcccaagggcgggcctcgctggtgcggcgaccggacgccgggactcggtagccatcagcagttacagtggctgagatgacgcaggccacggtcttccaagcttgggagtggaccgtgcgccaccaagctggccgacaggccaaagacgccagggtccgagtggagcgtgacaaagcaggacatgacatggatccggatgtgacgagcgaggacatgaggaggcgcgtccggccttcctgaacaccttaggctggtggggctgcggccagaagcgggtctgtagctttacttcctccacggagtcggcacactatggctgccctctgggatccagaaccacaaaatgaacagcaatggtgctaccaggtcaagcctgggctttgaatccggaccaaatcctctagcttgcgaatgcatatgctgcactatacaaaccctggactactgactcaggaaatcgcgtccgcaacgtgaacgtagatgaaccccagactctataaggccaaagattatagaccccttctggaaaaagaagcgcgagagacaccaacccgcgaacacggagagcaaactaatagagaaaaccgttgtaggagaagatacacatgacaacatagttttcacagagtaagctcctccaggagagtagcctccgcacagcagatcatatacagacaggaaagagtaacaacaatcagatn

SEQ ID NO: 723438 - DNA, 173 bp, Homo sapiens
taccagaactttcacgttagggatctctgcagcagcagctttggggcggcgcctctatcgtcttggggtggacgatcattcccaattcccaattcaacgtggcggtctgcgcagcagtggcatcccttgttgcggttgccattgttgccgctgtctcacgccgccgtgaagat

SEQ ID NO: 723439 - DNA, 257 bp, Homo sapiens
  misc_feature (16)..(16): n is a, c, g, or t
  misc_feature (120)..(120): n is a, c, g, or t
  misc_feature (163)..(163): n is a, c, g, or t
  misc_feature (172)..(172): n is a, c, g, or t
  misc_feature (209)..(209): n is a, c, g, or t
  misc_feature (211)..(211): n is a, c, g, or t
ggagttctcggggccnagccacaggtggggagacgccttggcttaggtaataggaggataggagaggaggcctcacttctagctgctgtgctcagggtggggcacgcagaggccttgaanagtaggagcaggcagtattccaggatgactgcaggcccaccgngcacctggnagctgaaggacatggcgcacacagcagaagctccggnangcacatgccgcacgtggggagggcccagttcccatcactgttgggt

SEQ ID NO: 723440 - DNA, 179 bp, Homo sapiens
gtcgaaagatgtcagtgagatgagtcgtgacgggtgggtgccgggctttccccgtgtgtacaggcacaacctgtggctacttccctcgcacagtgacccgcggtgtcatccacgaattcacagcctgtttcccaggaggtgggctcgggagcgagtgtcctcccaggtgccgcccagta

SEQ ID NO: 723441 - DNA, 1522 bp, Homo sapiens
cttgtgagatgttctttgcctcagcggcggtgtgcttggttcgttttcgcctcgtttgtaaaatcttgtcttttttttgaccgtcgccgctctccaaggtgtttttgtttcttcttgagggtcccccgtagtgttttgtgtgccgcctccgttaccacgggggctcccccctggattgtccctcttctcggggggaaaccaccggcgacatattttttttgtggaggtttgtctactacggcgttttaaatattgtggggggcgccgccctcgtacctgtttttcttgcgggggccccccctctggatattatgggggggccccccacatatttggggagaaaaattggtgcctccatcgatagtataatatccttcgttgtgggagtatagtattgagtaaccacccctcgcgggtgccacatatctctgttgggcccctcgtaaggggggagatatagaaatatatgatatctcttgggtacgttctggccgtttttggggagaccacacaggagaaaatagggggggactaccacgagaggcgccctctaataatagataaaattattctctataatgtaagagcggccacaccagtttcctccacacgaagagctcttgatgaataacctcttgtggggtcctccacggttgagcatcctcaccaagatggttggcgcaccacatgtgggcggctgtgttttttttttctctcgtccccccacacgcaccacgcgccctggatagccctctcgtcgttttctcatcacaggagaattggttctactgcgtctcaaccccactactggtgtttacgatttggttttatggtggtcatcacgtgatcgcaccacgcgtgtgttttataagaggggtcctcgttgttgtcccacaggcgacgttttctcactatacccccccaatatgtgtctccacagcggtgcttctccacagagaggttataaagagtgagaggtcacactctctgtgactacacacctgagagagttctctcacatagagccgctcctgtggaaacacacccacacagtggtgggatactctctcacaatacacacacatagtcttgtctcctctcgcgggagaaaattttctctccacgcgcgagaccgcgcaccacacatgttatagagaatatattgcccacacacaacacacatctcgtcgtgagaaacgctgtgagacacctctccacgcagatgtctatattaaaagatgttttctctctcatattcccactgagaattctctaccacacaagtcacacatgtgagagactgtgtgaacttctatgagaattgttcttctatgagaaacacacaataggctttttatactgagaacttgagaccacacttgttaccacaccacagctccctcgggttttgttttggtatgacttataaatctatgaatagattgtaatgatctctgggaatgggggaggggaattaaaagttatagagcctttaaaattaagtgctcccatgtcccagggt

SEQ ID NO: 723442 - DNA, 237 bp, Homo sapiens
tctagaggatccgtgcaccgtactttctcggtgactgagatgtaagctatgcttttcccaccagaaatatggaagtttaacctgaagaacagactctggagctggactggtttgagccccacctcctaacttatctcctgtaagttattaaactttctgaactagtttcccatttatggaatgaaaagaataatactcactgcaaagggagaaagtacggtgcacgggatcctcgag

SEQ ID NO: 723443 - DNA, 711 bp, Homo sapiens
gcttcaaggatgtctgtttatgtctgtctaggatgttctagacaggtgttcacatttgtgaccaccttactcacaggtgcagtgatctcacagaggcagacatagattcatgcattttctggagagaacatttttgaagaagggaagctttggtatccttttggcttctatggagctttgctatctttttcttttcttttctttcctttttttttttttggagacagagcctcactctgttgcccaggctggagtgcaggtggtgctaccgtgggcccactgcaacctccgcctcccgggttcaagcgattctccgttgtctgagcctcctgagtacctgggatcacaggtgctcgccattacacccaactaattttggtatttttagtacagacggctaaaaatttcaccatgttagccaggatggtctcgatcaaggagtgaagtatttttctaattacttttccctggtttttatctcctaggtcttctgttccaagctcttagtgaattcggtattttccaggactggctctacaaatagtacagctttattttcaccctcattggttttctactaagactccgggagaaactgagttcaatggtttcatataaggattataccttgagttccattttccatacctttcaaaaggagcattactaactaaatttacaaacatttcttacaacaggacaacggccaga

SEQ ID NO: 723444 - DNA, 144 bp, Homo sapiens
tgatgtcgttgctcagcctcctgagaggctggtaaagacgtgcacaccatgcctgactaatttttgtatttttagtagagacaagttttcgctatgctggccaggctgacctcgaactcctagcctcctcatatgatccaccca

SEQ ID NO: 723445 - DNA, 222 bp, Homo sapiens
  misc_feature (29)..(29): n is a, c, g, or t
  misc_feature (80)..(80): n is a, c, g, or t
  misc_feature (144)..(144): n is a, c, g, or t
aagttttcaccatgttgtccaggatggtntcaatctctttacctcgtgatcctcctaccttggtctcccaaagtgctggnattacaggaggatccaccatgcctggcataaccctgtgtttctactccacattttctatgccangctggacttgagtgcgacaatctcagctcacttctgcctcttactctggcgtcaagtgatccgtcccgacgtcatcct

SEQ ID NO: 723446 - DNA, 192 bp, Homo sapiens
ctgtgggtacgtggctgggtttcaaaaatactcaactgtctggaaatgaaacacatacttctaaataatccatgagtttaaaaagacgtcgcaaagaatatggaaaaatactgtaaactgaatgattgtgagaacagaatatacaaaaatgtatgagctgctccccactagcaggggtgtgtccacacacct

SEQ ID NO: 723447 - DNA, 588 bp, Homo sapiens
  misc_feature (489)..(489): n is a, c, g, or t
gacagcatccctaaccaaaaaggagtgcattaaagaagttttccaagtgggcaccagtgttggggagtataaagaggtttagaaggctggctgtcaatacccacaacacttatgaaggcaagggaaacaggcccttgaaaagaaggtaatgtggagtgggtagcgtccgtatggattaagaaggggacggacttaccctccatggtaagagttacccaaagcatctgaggcttccaaggagatggggcagtgtgtcttcagctgctaagccaagaagatctgggaaggagtaagtcagagccttgggccagttggacagtccaatttccagtggcgtccctcacagatgggacacgacttaagaggaatcccaggctgtgggcattcctgggcctagtggccagatttccggcacttgaagcaagatcctgggggaggaagtcctgaaggaacgcctgaccgctgtggcttaggcgttttgaagttttngtgtgctggagatatggctggggttttctctcacagcagagtcaagtagttgcaactcttctctattactgtacaccttgaaggtgagggtaattaggt

SEQ ID NO: 723448 - DNA, 300 bp, Homo sapiens
gagggctagctacaacaaagctgttcctggccaaggcgctaacatccccgccgcgcagctacaccttcttcattgacatcctgctcgacactatcagggatgcagatcgctgggtgcatcgagcaaggcctacgcagaaaatccttttcactgcaggccacccgcgatcctctatcttcaactacacccataaacagatgacagcactacgccaacgaagcgacgggtgggtcctggtgcccctaccaacctactacacgttttgccagcacagcagcagtaagccggaacgacaccacc

SEQ ID NO: 723449 - DNA, 166 bp, Homo sapiens
ctagaggatactttcccgactagcccgacagactggcatgctgacagctactacaacaccacctacgtactgttgtgcctatgcatacggtccgttgtttgctctcagtcaccgtcttcaggttcgcagaccaagttcgacttcacctcctgtcgtgctagtcggg

SEQ ID NO: 723450 - DNA, 351 bp, Homo sapiens
gagcgtggggcccagcatcacatttaccgcctggtcagggactgaagggggaccccaaaactggctcaccccccagaacaccctcctcccagggagggtcctccagctcacctcatgcttcttatttggggagagggctgtgatgtaaaggggtagagcttagaggcctctacaactggggacggccccgccattataggggcccacaaaactaggttggacagctgcacaggacgggactgaagaaaggataaaccacgatgttgggacctcacactgggtgtggtgctgggcatatcaactcaggaatattaaggaattgtggggacgggaatgttacaacctccgcag

SEQ ID NO: 723451 - DNA, 206 bp, Homo sapiens
ttcaattgcgtccgtgcactatcggcgtgcgttgggacgggcgaacgtcttccagctggagcggatggatgagagtgatgacggtgacgccactaccggcaccgcgcagatcctcaaagcaaggacggcctttgaccccccgacctcgcactcggcgatggacaaaatgtggcgtaatggcaagcgggtacgacgggtcaagctgg

SEQ ID NO: 723452 - DNA, 1103 bp, Homo sapiens
ggaaccttgtacgcttgctcaaaaaaaaaaaaaaaaaaaaaaaaaaaaaaaaaaaaaaaaaacgggggggcccctccgccccccaggcccaattttgggtcaacattatttttcccacatataaaacccgtttttttgggcgacccaacttcgaggaaattcaaaggcggtggggggggcggccaaaaatgtggtaagaacggttaacagacggccatctttatcatattaaacattcagcgcgccctaaaagaaggagacaggcgcgtttaaaagaagcgacctaagttattatacaaaaagagggggcccccccatatttcttggtgtcccgacagataacagcgagttggcgaaaaaaaactacccttgtgtgagagtacaccacgaggggcgcttgtggttgtgtcgcggagtagaacacacggacctagggaacttgtgcgaaaagagaaccttgcggtctttgtgagcaaaagcggggaagacttcgggaggatatagggcggtgggcaacaacacagggggccccaccaatagggtaagcccaaaggagtggggttaaggaaaaaaagccccgcgaaagtgtagaagggggagcaccttagacacctcacaggagggatagttaaccggaccaacgggtgttccccgaggacaaaaccattgggggcacgcgggcaagcgggacggacggcagaaacgcacacaccacccccctgggggacgcccgtggggaacccacacaaggcgcagtttcccgtggaccgcattggcggggacaatttctggacacgcgaaagtgcgtagtcgcgacaaatgggaaaaaaccgtgtcaaacgggggaagtagccgggaagggggagtgggttgaccacccagagagcaacaagaacaggatttgcgaccgaatcccaggggggaagtacaccaccaacgtggacacggaagacaggtgcggcgcacacctcacacgagcactgcccagcgccacacaagcaacaagagggggttacccggacagggtcaagggtactgattgaacagcaagcgccccaaggggttaaacataagggggcgaacccacatagggttgtagcact

SEQ ID NO: 723453 - DNA, 1368 bp, Homo sapiens
  misc_feature (2)..(2): n is a, c, g, or t
  misc_feature (64)..(64): n is a, c, g, or t
  misc_feature (149)..(149): n is a, c, g, or t
  misc_feature (314)..(314): n is a, c, g, or t
  misc_feature (335)..(335): n is a, c, g, or t
  misc_feature (390)..(390): n is a, c, g, or t
  misc_feature (444)..(444): n is a, c, g, or t
  misc_feature (473)..(473): n is a, c, g, or t
  misc_feature (479)..(479): n is a, c, g, or t
  misc_feature (549)..(549): n is a, c, g, or t
  misc_feature (603)..(603): n is a, c, g, or t
  misc_feature (652)..(652): n is a, c, g, or t
  misc_feature (792)..(792): n is a, c, g, or t
  misc_feature (900)..(900): n is a, c, g, or t
  misc_feature (910)..(910): n is a, c, g, or t
  misc_feature (913)..(913): n is a, c, g, or t
  misc_feature (920)..(920): n is a, c, g, or t
  misc_feature (922)..(922): n is a, c, g, or t
  misc_feature (935)..(935): n is a, c, g, or t
  misc_feature (967)..(967): n is a, c, g, or t
  misc_feature (969)..(969): n is a, c, g, or t
  misc_feature (979)..(979): n is a, c, g, or t
  misc_feature (1046)..(1046): n is a, c, g, or t
  misc_feature (1094)..(1094): n is a, c, g, or t
  misc_feature (1168)..(1168): n is a, c, g, or t
  misc_feature (1191)..(1191): n is a, c, g, or t
  misc_feature (1367)..(1367): n is a, c, g, or t
ancagacgactatcacccccccccccccccggacaccgaggtcctcactggggtggtgactgcnacgctgatgctgagtggaagccaagcccctccagtcagagctgggccgatctcagacccaaatgctaccaccaccaagccctgtntcgcgacggcagccgctgcagtcaccagaaacaatccttcctgcctcgacacccgtgccagccccagccaccctgacggcgggctgtccacggaaatgccacggccaagagcccaggtccttcacgctggcctctcccctgccgggctgggctccccagtccctncagagtccgttgtgccgagcnctggagaccctgccggacaggtcctgcagaggcttctccaccgtgtagcccagcnccttggtccgcccctccagcagggcgtgcttctcgcggctgcggctcaaacgcncgccgtcgcccacactctctgcgtgcctnagcttntcgtgcgcaatctccagctgcttctggtagtggttgtgcttctcgattttggcttcgaagtgcttgagcncctcccggaacgcctccagctccttgtccgtgaggttggcggactgcgccaggncccacaggtcaatcaccctgggctcctcgaactcagcctcagtgctgtngccctggtggctgaccctgcgcaggcggtccaggccctggttgatgtgcgcacttctccttcagctccgtgtgcctgctgtgcaggacgctgcccttgatgtcgctcaggtccgaggggctaatgacgttctcgtggatntcttcggtcctgctcagggtctccagcaggacgttgtactcgtgaactttctctttgtgatgcaggaaccccgccagagcttgtccagttcttcgccggagaattccnagaggtcttngcnttgtgcnanagcttttccagcntggggttatccagcccgttttcctgggtgcantnagggagttgnggtcactgccgagcgtcttttttttcgtccagaccatatttggctaagatgacattgaggttgcgtntgagttttgttttcttctccccatcttcgtccaagccgtcaagttttngttttttccaggcgagttcgtccttttcttgtatttttagatcagcgtggagttcggccagccttacgggaggnagatgcagttgttgggctttttnctacagttggtttaatttctccatgcggtattcctctccagattcgcgttttggggacggtttgggttggtttttttcccgcgagtacttgccgccgtggctcgcagcgggccagggcccgaggaagagcagcagcagtagcagcgccgggagcccgggcagaaacgacctgaccnt

SEQ ID NO: 723454 - DNA, 346 bp, Homo sapiens
ttcacctcagattcagaatctctgattcagaagttctgtagtgggcccctggcattaatgtgatcttgatccaacctatatatactcacagaatctatgacaccctgtgcatacattgcttgagttacttgaaaccagtatcttagtaaatgtttaaggttaatatgacctttactacttgaccaataccatatgttatgattcacataaaactctaacgtgctcaaaagttgtgtactaaagggagtttgtacctgttgaaattacaccacattccaatggtgcatttctgaaattacctcaataagggaaagactcatttaataaatatgtggctcatcctaac

SEQ ID NO: 723455 - DNA, 923 bp, Homo sapiens
tcgatctttatctatttatggaaaaaaccaatccgtgggaaaaacaaaaagggagaaagtgaggttagggagacaaagggtgcggggggtgtgccaaaaaagccccagcccctggagtgtgggggtggcgggagggaacggagaagggctcagcttggtaaaacctcagtgcctccggcctcgctccttctcttgggatgaacagggctcgtgggtagagtgccttctctctcagaaaagctcctgtgggcccagaggcacccagaggtaacggggtattctcacacggcgcacagagcccaaacatattcccacacctcctcggcgggacgagaagtgggagctacaaactatcagagcctcacgggaacaaatcttttatcggtgcgcccgggggcacaacagagtaagcccgtctccaaagagggtaaacacccctcccacaagagagagagggatacccaaacggggcccagagagggaataggggggcaacaaaaagccaaaacgccccactaccgtgggcgccgaggagagcacaaacgagaacgtgcgagaacataccacaactctcaaacggggagcccaacgcgcaggaccctgggcgccaggaaaccacagcggcccgggagacaccccagggggctgagcactgagacccctagggtctgggctgggcccagggcaaacaccccatggggacaatttgagcaccacatccaccggcgatccacaacaatccccacaccacaacacagcagaagaaaacaaacaagcaaagccacacaccaaaggcaacagagcccatcaagagagaagaagacccccccaccgacgaaggcccagagccccccctggggactagcggaacaaaccacacacaaaaaagacaaacaaaggaaatagagaccaaccgcgggcac

SEQ ID NO: 723456 - DNA, 483 bp, Homo sapiens
  misc_feature (424)..(424): n is a, c, g, or t
tcgagctccgtaccggcatgtgctgtaggccagcgcacaaactcatcgtaatgctcacctacgacgacttaaacgaacgctgcaagagacagccgcaacgcccggcgggtaggcgcgttcaccgcccgccgggaggtggatcaattgcctttttcagccgccaaaaagtacgcaaccaacgcattggcgtgaccatggcccatgccgtgttcagtcttgagcaaggccacaagctccatatgcttcctggaactggcggccttgagcagatccagccagtggctaatgggctgcccatagtttttttcgatggaggggaagtacgacgctggcccttttgtttttgtatcgtcggtcatgatgcaaactccctttttgctgaggtgataatgcccggataacgttaccgcctggactcaccggntccaccgtacgcccgtcactacacgcctccgctgcctacagcacatgccggtaccgaga

SEQ ID NO: 723457 - DNA, 758 bp, Homo sapiens
gatgaagctgatgggcttctttctcaaggttattctgattttataaataggatgcacaatcagattcctcaggtgacctctgatggaaaaagacttcaggtgattgttgctctgtccacatttgcattacttatgcgatgtagaagaaagctgtccgagaagataagtgcattttcactacagtgggtggacttaaaaggagaagacgtctgttccgagatactgtacaaccatgtcgtggtcccagtaaatcccaaaattgacagacctctgggaaaggcttggaaagaggcaacattagacatgatgatgtacatgtaagaagataacacaagatcgtggtgctaaatagtccagagatgtggtctgaagctattaagaatcctgaaaggggaggtatgctgtccgggcaatcaaggaaccatgagatggatcaagcaattatcttctgtaagaaccaagaatttgatgtggataacttggagcagtacttttatacaaaaggaggaggacctggattaaataaaggacaccaagtttctcaatagtgtgtggtctatcaggggtgaaagtaaaggctccatgaggaggaaagggacaaagctttggaaagatttaacgaaggggagggtgtaccgatttctggttgggacaggatggtagtgttagaggacttggttcccgggggggcttatgtgtaaatggtcctttggcgtggaaagagataagttcatgatggcgattgaaaattgagatgg

SEQ ID NO: 723458 - DNA, 323 bp, Homo sapiens
tggggagtccaggcatgtgctcatcgtcctactaaggggtacagaaacagcccagcgggcggtgtcgatgggcagaatgaagcctgtagggacaccttttcgctctgggttgtgagacaaacgacaacgtgtgttcttagccactgccgatggggagatccccaaacgccctgcttcgcgttcaccttcagctcttcgtgtgaggctccgggaacgctaaattcaatgtcattctgcctccatagatctttctgtgccaatgactcctgaattttatcactcaacctgggagcctcgacggttcctcaaacggagctggaaac

SEQ ID NO: 723459 - DNA, 137 bp, Homo sapiens
  misc_feature (21)..(21): n is a, c, g, or t
  misc_feature (72)..(72): n is a, c, g, or t
ttggaattggagcctatcccncaacccgaagctaacagcatcatgtggttactaactgttcctcattcaccngttgatgcctcccagaaaaaaacgccgccagccttcccagaaaggcccgctgctgttccaccaac

SEQ ID NO: 723460 - DNA, 569 bp, Homo sapiens
tggtccggtcccatgcacagttgctaaaagagactttaagaatcggccagcacggtggctcatgctgtaatcccagcactttgggaggcagaggtgggaggatcacaaggtcaagagattgagatcatcctggccaatatggtaaaaccctgtctctactgaaaatacaaaaaaaattagctgggtgtggtggtgttcccctatagtcccagctactcgggaggctgaggcaggagaatggcatgaacccgggaggcagagcttgcagtgagccgagatcacgccactgcactccagcctgggcgacacagcgagactccgtcttaaaaaaacaaaaaaaccccacaaattttagatgtgcgacatgctgcccaccctgggggggatactgctcattgtctcactggtagccaccctctaagcttcctgggatccatattttgtggtacactaagttgagatttattctctcataaccatgaccatattacctattttaaccaatgaatacaccgagagtataaacacaaacgaaaacaaaaaaaccctcaagttttaattagaagtca

SEQ ID NO: 723461 - DNA, 162 bp, Homo sapiens
  misc_feature (9)..(9): n is a, c, g, or t
  misc_feature (153)..(153): n is a, c, g, or t
cggctcagnctgttggcgcgaagagagtctaacccaaaattgcaaaactcccgttgatttccaggccctaccacacggcgatgtcaacttgtcctccagacatggacgactaccaaagatcccagctacgaagcatggccttgcttagaaacntttttagat

SEQ ID NO: 723462 - DNA, 371 bp, Homo sapiens
tgagacggagtctcgctctgtcgcccaggctggagtgcagtggcgcgatcttggttcactgcaacctccgcctcccgcgttcaagcaattctcctgcttcagcctcccgagtagctgggattacaggcgcccaccaccacacccggctaatttttgtatttttagtagagacagggtttcaccatgttggtcaggctggtctcgaacccctgacctcgtgatccacctgcctctgcctcccaaagtgctgggattacaggtgtgagccaccatgcctggccatttttttttgggggggggggcgcggtggttattttattcttttttgccctggctgtggtgccgtggtgcgcattttggttgcagtcatc

SEQ ID NO: 723463 - DNA, 312 bp, Homo sapiens
gatgctggtggcaggtgaaaaagggtaacctcaagctaaaaagcccagaaggggaagccccttgcgccgaaccctgtccttgtcagaggaattggcggtattcccgatctaccatgtattcagaaaggccatgtacagggggaaggtaccccgccgttaaatcccaggttgaaaagaaaaaggaggagaaggttctcgcaactgttacaaacccgttggtggtaacaagaacggcgtcccgggtgttaactttcgcaattgcctagttttttcccctgaggtgtccctcgaagctgttggcccggaaaaccg

SEQ ID NO: 723464 - DNA, 292 bp, Homo sapiens
  misc_feature (42)..(42): n is a, c, g, or t
accctttttaaattttgccccccccgggctttggggtgtggntgggggccccaactcagcccattagtttcccccagctcttgtggggaaagggatgctattttttccgttttgggccggagggaaaggagggaaagtattttttccctctattcccccaaccggggggctgttccaacaggatttcagggggcccaaggaaaccctgccccgcccccgcctgggtgcccctttccccccggtggtgcccccccttcctgcccgtccttttaataaacagggttttttttta

SEQ ID NO: 723465 - DNA, 139 bp, Homo sapiens
gagcaaagagcagtgcccagcccagctcagagggcaaatgggacagatcccagaggccctgaggaggtctctgctgctgatgatgtttgaccaaacgcacccaacccttggcagccatcttgtccctgcagtcatagcc

SEQ ID NO: 723466 - DNA, 203 bp, Homo sapiens
gcgacactgccagtgttcatctcatccatcatcctgcgcaggccgttgatgttatcctccacgctacatgcgcattagacctgtatccgtctcaaacttggttcggaagtcatctgcagccagacgggcgttgtccatctgcaggacaatcctggagttctccactggtggcaccaagaatcttgtcccgcaggtcctggagt

SEQ ID NO: 723467 - DNA, 232 bp, Homo sapiens
catgatatgaatctgagctctgtacctggccgccgcgctgggggcgactgcaattcctcagtcctgcgcggaggtcgaagagtacctgcaggcgatgctggccgcagctgatctgcgatgaacgcacgcaagaggtggctgcgcattctgctgaaggcgccggcaccgagcgcattggtgcgcccgcttggcggggtggtgatgcaggcgggcatcgatcttgttgcccgat

SEQ ID NO: 723468 - DNA, 190 bp, Homo sapiens
cacgagaatcacttccattttccactaacaaaataatttatgatcaagaagtctgactcagtgtctccacaggaacctgttcctcaccattctggatgtcattgattctgacatcacaccatcctacacaggtatttctggaaaaggatctggcaagaggatgaatttggctctaaacaaatgcccatgg

SEQ ID NO: 723469 - DNA, 250 bp, Homo sapiens
atgcgtgttggtcgtctctgaggatccccctttgatgcccttgatgcttactgtgactgtggatacgggggttccctttccccattcagtgatatgtcctctctgcttggtgtaaactattcttggtgaggacacttttgccaagtgatactctttccccagtctgattcgttgtctaagtgaatgattccattatctgttgcccgttttcctctgactatatatcactgcctcgtgaaggatcagcatg

SEQ ID NO: 723470 - DNA, 954 bp, Homo sapiens
  misc_feature (91)..(91): n is a, c, g, or t
  misc_feature (393)..(393): n is a, c, g, or t
  misc_feature (482)..(482): n is a, c, g, or t
  misc_feature (750)..(750): n is a, c, g, or t
cgtgcatgtgacacggctctggcttctgactcggcaggggactatctgggaacgtgttacgacacacgggaataattatatctatcttttntgccgtttatatttaggggttttgttgataaaatcaagtcttggtgtggctgctgaattaaatatttatgagtggtgcatttttaagtatagtgaacaagacaccatattaagtacagtgataaagcatctatattctgtaaaaaaaaaaaaaaatctgcctatgcatgttttttaagaaaaaaaaaagggctgtatcggcctgtatgggactggtaatgcgcttagtgggtctgacatatactgggaaatgtatgtatactgggcgtactttatattctctaaaatggcttaatggccttngaaatttggtaatcaaaaaaaagcttggaaaaaatctaaagggggagagtatccttaaaagtttttaacataagctggtcaatggcccntgtagatggttagcatgtttagcaaacctggtgaactcataataagttggtagttacatgtgaaacctctaaatggcttgggcaactggttaatggtcataaccagtttagtaatttggtcctggtcctggtcatgtgccacaaaatattgtactttttccactttttccccttggtatatcagttacgggttacacactgggtccattctggaaaacaacaacaacaaaagtccattcatatttttaccaatggtataagtgcccangtaatccactacagcctaaagcctcgcctttgtaattcgccttctgaccatgtcggcacttcaagagcctatgcccttggttcacccatggaacacagaacacgctttttatattcacctacttccaataacagtgtggcttgaactttacagaattctcatccttccaatgaggtccgtgaagggattcactgttgcacaaca

SEQ ID NO: 723471 - DNA, 436 bp, Homo sapiens
gtagagatggcgtccaccatgttggtcaggctggtctcgaactcctgagctcaagtgacccgcccttgttggcctcccaaagtgctgggattaccggcatgagccactgtgcccagcctatatagtgtgaagcttttaggaaaatcagaacagggtacgacagctgttaaaaacaatgtttaaatggaataactgttgactgtttacaggctgtaagaactattgtatacacaaaatacatacacaaagtttgtactttgtgtacaaatacacctttgtactttgtgtacaaataatacaaaacgtttgtatacacaaactttttacgttgtggcttggtatatagtcttaactgacttttcttataagaaccccatgaaacttacctgagttttaaaatgctatccaggacatcatacttatgtatacatgaaaa

SEQ ID NO: 723472 - DNA, 626 bp, Homo sapiens
ccgatgccgcatgcctggattaggcaagattggagataatcaggcaattacctgaatcaagatggaccgcttggtcaaggacatgaagatcaagatactgtaggagatctatatcttatcactgaccatgaaggaattagcgaccattgctagcattatagtagactctataaagcttgagggactaaagataatgccagtgcagactcagacacgagtcgttaagttgaataagatcatagtattagttgatatcggcgtcaacattgttcacgtgatactaggtgacaaaggctgcacagaggagttcgtagtcatctagctagacatgatcatggtcaaggtctactattgccttggacgcaaagactacttcggatacaagatcggcgttccccacactagcccttgcaaggagacaggccgttacggttctgtagtgcacgacttagcctgtatacaaagtataagcattgttccgcaaatggcctatgctactatgctgtctgtacagacacagtcaactaagatatataactgcatgaggtaactaggcatggtactttgaagactagtataactactgtaccacaccgcggctctagcagcggcacaaggcttatcat

SEQ ID NO: 723473 - DNA, 94 bp, Homo sapiens
  misc_feature (5)..(5): n is a, c, g, or t
  misc_feature (51)..(51): n is a, c, g, or t
ttctnccggtaaccaggagctgaagtcagcctcaggcattgatttcctgtncatcggggtatccagggtaaccgggagaacagcgatgggggtt

SEQ ID NO: 723474 - DNA, 960 bp, Homo sapiens
tctttttcgtgtcgtgagacagagatagcaatcaacgagtaaccaccagcgagagaagaaagaaacaaggcattatgtgactcctttgcttgtctggtttgtattctctgttgattactccgtccaacgcacaccttttcatttggctctttacgtctttctcattggtaattcttcggttgtttcgaatatttctctccctttgtcccgccacttgttgtccgctgggcacccaaatgtcgtgaatggtttctaacccaaacagacgtctttcccgaggatcccttgggctttcaacaaaggcaatcttggctggccccaacctccagaattatctctccccccgggctttttcaaattaggggtgcacctcatctcggcccacgccctggcggtccatctttttttcgccccaccccccacttatcatcgttggttgccagagtgctgtccgccatacctccttggtgctgtatctctaatctccccgaagtgttcctgattgcgacctacaagggtctgtctccgccccaacgtcgtggagaccaatattcggtggggtcacccaagggccagaatggaagttcttgtgcgcgctccccctctgtgataagaccaccccccttcatttttgaaaaacacgcatgctccccaaacaccttttgtcctccagccccctctttaactgctctctagtgcccggcagcctgctcatatttaaatagataacaatggttaaacatataattcccaccttcttcaccctgttagaacaacagcactcaattagtacagatagtccatgccaacaataaccacttttcttgtatgtgagaacactccagcttctcgcagagatcggctattttccctgctttattcccaccctcgaaaattctaaattgttcttcccccttcagggtttctgaacttctttttcacccaccgccccacaatgac

SEQ ID NO: 723475 - DNA, 328 bp, Homo sapiens
tgatgcagacaacgcattgccacaatccggcatagctttatgattacaaccctcagccaactcggcatagaaggcgcataactcaaggtacatcaaagccatttatgactaacctacagccagcatcatactgaacaaggacaagttgaaaagtttctcctgagaactgaaagaggacaaggcatgcccacttatcaccacttctattcaacatagtactggcacagtcctggccagagcaatcggacaaaggaaagaaataaagggtcatccaaactagaaaagaggaagtcaaactgttgctgtttgcacaatgatatgatttgcc

SEQ ID NO: 723476 - DNA, 445 bp, Homo sapiens
tatatatgttataaaattctaacttcggtggagtactttactttgatattccacttgcaaaacagaaccactgattccttcctgcttgacaagattgagtcgctatcaaggagctgcccgtgctttggaaatggtccaaatcgacgaggaactgccaaggagccccctcagacacctctctaagccacacaagccacggagtatagtatgtctccatcaccaaagaggagcaatcgacacctctctgcatagacaagactatcttgaccagaggcactgacagccttccagggtggcagagagacctgtgtgtgcaaggtggcagagatgtggcgcagaagagatgggcacttactccagtgctgatacacagaagccagctttgttcaaaacagtgttgtttagcaaggttgcactgtatataaattaaatcaacatccttaaa

SEQ ID NO: 723477 - DNA, 166 bp, Homo sapiens
tggctttgtaagaaaattattaataaatttacaggacgggtttaaactaacccgagggggaaaagggggcccttgcccttccaaaagcacagagcacaaaaatgagcccgttaacatggggagcctccgggcgggggttaaagccattaaaaagatcctcaaaggg

SEQ ID NO: 723478 - DNA, 636 bp, Homo sapiens
tagcggagcagtagtgaacaagaagcacggtgaggcggaaaaaaaaaaaccaaaaactcagatagtgtgcaagcatttccggggaggctatggaaaacaacaacgtatggctgggttgggggtatgcccggggggggggtgatattggcatgtatcgtcatgcacttcctccgggattggtgtcgacaaaaaataaaaagaaagaagagaaagaagatgaaatttcattagaagatctaatggagagagagcgtcctgccctaggtccaattgttcccaaactcactctagaatcttttctggccgggaagaaaagggaaaagacaagaaaagatggagtaaccttgaccatgatatggaaacgagggaaggctgacttcaagagcggggaaagcactagtgagtcaggggtcgtgaagtgtgtggaattccgtgcggaacgggtcaaggatgatgatgaggaagcagatgataccggctacacccagggaacggggggtgatgaggttgatgattcagtgagtgtaaatgatatagatgtaagcgggtacatcccaggagatgtagatgaaacgggtataagggtagccagtgttgagagatcagcaattatcttcagataagatgaagaaatta

SEQ ID NO: 723479 - DNA, 281 bp, Homo sapiens
ccggcgccctgcgagcaatagcaacaaggaccctggagagatttgaaccacgaatgggagagcccacggggtttctgctgaaggaaaacatcaggccctttcagctctattagatcatcgtgactcccttgtaccacgacagccatagtgtatcctcccagacctgtctatgcctcactctcatgcaggtggctcccctgctcctgccccgacagcctgcatctgaagcgacattggctagaccgtggtgctctgctggacgtgcgtgcctccagcccccc

SEQ ID NO: 723480 - DNA, 690 bp, Homo sapiens
gaaataggagttagtgcgttacgccgaccagctgtgacatctgttgtccgctgaaatgggcgcggtgtttacacatgtccgattatgggataggagaatgcccgtgtagccccatggatgtcccttaccctccacgatcaggccaacttcccccgtggcgggtctccaaagcagccggtgcgtggctactaccgtggcgctgtcggtggcacgtttgaccgcctgcacaacgcccacaaggtgttgctcagttgtcgcgtgcatcctggccaggagcagcttgtggtgggagtagcagacaaagatctgttgaagagcaacgttgctccctgagctgctccaaccttattcagaacgtgtggaaccatctgagtgaattcctggtggacatcagaaaaagccctccttgacctttttggattggtttcccaatttttccccccaccacaccccccctctttttttggggcggtcctcccccctcgtgtttttggtggggggcgggaggccaaacaaaaaaaccaaccacgtcatccacaacagcacaaccaccaccccacgaatattcttattacaaaaacaccgttcttcgtggcaggcaaggagagagaaggaagatggtaacccccccccccaacccaccttgcgagaggagcaggtgagacaccaccagcatgctcttaatcgagg

SEQ ID NO: 723481 - DNA, 180 bp, Homo sapiens
ttttttttttttgcccttatgtgtcactaaacaactagtttctctcccttttgtcagttcccattgtgtattttttcaaaagaagtactgtattcggatgccagctaataaattgtcacacaatggaaaatcatatgccacaacattcattgtaaggtttaataaaattaaatttgcacc

SEQ ID NO: 723482 - DNA, 945 bp, Homo sapiens
aatgccttcactatgccaaccggagtgctactgttgaggtgactcgcagaacttcatgaaaccgctagataaatgatcttctctttgaatcatagacattagtcatcgactcactcaatgtcatctagtcgttttagcgttactggagaatagttgtgtatgccgctctcagttttcataagagttacggtactactacggatctacagattactgtagtaagtcatcatcgatcccacctatgatcgcatttctcatgacgcgacggtaatacggatcgatcggttgctagctgcatgaaggtgggtttgctcatgatcgttagtgcataggactctagaaagctatgtcacttatctcatgaaaactcagatgacgaataatgtgactattcgatcccccgtaatttctaccatattctaaccgggcaatcgcctttcatgcagtcctaattcgcaggtgttgcgtatagaacgtgctctacgagatcttagcccctaataagggttgcatcgtgattaaaacttccttatgcacgcgcgaatgcgtgtctatcaatatacagcaggactttctaaacccgtacaggtgttcgactactatcatatgaaaccctgtacagtggtactctatgtagcaaccagcggtaaacgaggattttccagtcgacttttgaaaagtgcctaaggtgttccatcggcaatttataactcatacaccgttcaagaccgtagacaaagttggccacattgacttgtgcttcgcggcacgctcggcatctgattcgaaagaccatttctgtacgagaatgacccgcagttaatacaccgatttcacgagattgttgggaaccaaaccatgtgaagggataccgaggaaattctttactggcgccacccgcggcgaacgaagagtattaccattcggcccgactcgaacttaagc

SEQ ID NO: 723483 - DNA, 241 bp, Homo sapiens
tttgaaattccctcccccccaggttagggggagggccccttttccccttccttttccctttgggagggttttacgggtccttcgaaatggtaaccggtttcagccctgagccttgggggggggggggggaacgccctccggccggttttgggggggaaacttttaaaaggttggggtattttttccattaggtttcttttcagaagggggtataggcccaaaaaaatttttttcttttgga

SEQ ID NO: 723484 - DNA, 170 bp, Homo sapiens
ctctaggatcgtatatggtgtgtgtgtaacttatagttagagctgatattatgaggagagggtcggtgatcggagatctattgtgcgggtttgattatatggcgtatagagtagtactgctgactgttgtgtgttatattgaatgaattgctcgggataggtatgtgata

SEQ ID NO: 723485 - DNA, 575 bp, Homo sapiens
ctgtgtcatcccccttcgtgtaaagtcttaacaaacagctcctaagtgggggaaagctgccactgagaggctgagtttccatcgctaatagtctgattaaaaggtattaaagactccacatctgtttcagagacagcccagagtggggcctcatccttgcttgctctgcagcaagtatggtgggtggaagtgggagaaatgccaccagttcctcccctctccctctgaggctgggcctccggttaactcgggagcagaagggcagttaggaggggaggcgggtggagcccctcccaatcagaaaaagagcttggacatggatggattcccaggaggtccccagggggaccagaccagtgtgactatgacaagtgccactatgtgccaggcgctctgctaggcactttacacagattattcccaggcttacaacactggcaaatgggtaaaaccatcccctattgtagctgcagaaactgaggctctgaaagatgaatcatcttgctgcccaaggctgcatggctgtttagtggccaagtcggaatttgaacccatgtacgtatatctcttatcct

SEQ ID NO: 723486 - DNA, 418 bp, Homo sapiens
  misc_feature (5)..(5): n is a, c, g, or t
  misc_feature (85)..(85): n is a, c, g, or t
  misc_feature (212)..(212): n is a, c, g, or t
  misc_feature (238)..(238): n is a, c, g, or t
ggtcntgtttatcataattccccaagggaaagtagactagtatagtaaattactagaggatctgttaggaggagaggtagaactngagtctttttagagtaagatagagaatgagaatgtagaggtactgtatatactctattttctcatttaaggtttgtgttaagaataacagtagaagaaggagaagaatttagtagatctttaactgntgtatgatgacatccaacaattacantggactttcaagtgagaaggatctgtttcggagaaaatagagattgggatagtattgcaaatagaactcgatccagagtagggctagcagaaaatacagtcactattgaaagcaatagtgggggcagggactgcttcagtttcgtcgacgcggccgcgaatttagtagtagtagtcgacc

SEQ ID NO: 723487 - DNA, 123 bp, Homo sapiens
tgctggtgttgctgacatgagccaccgcacctggtctgacacaccattcagttttaatgaactttcaggtgctgtggccacgcccctcttgtgtggcatgcaggttgtgagagatggcttgga

SEQ ID NO: 723488 - DNA, 831 bp, Homo sapiens
  misc_feature (831)..(831): n is a, c, g, or t
gaatctgcgaaagcaaatcagttgccggctaaccttgacctatgatggaaataattcagtggcatctcatgtagatgtaccatttcttatgcaactcagagtgcaatggtgatgaaagtcagttgggaaccagtctgtgggaccaatggatctaacttacctgtcaccttgtctagcaggatgcaaatcctcaggtggtataaaaagcatacagtgtttataccctgtagttgtgtggaagtaacctgtctccagaacagaatattactcagcgcactgtggttgaatgcccaagagataatacttgtacaaggaaattttccatctatgtggcaattcaagtcataaactcttgtgttctctgcaacaggaggtaccacatttatctgtgtgacctgtgaagatggtccaaacctgaattgaaagcactggcaatgggttcccagtcactgttataagacccctaggaggaattctagctccaatatatttgggggctcgatggactacacccttgtttgaaggtggtccacccaacagttgtgggagcacaagggaggctggtagggatatatttaattccggtcattttgcggacgggcctactgtgggctatatctaataagcttaaagattccccaggcactttgtgtacaataatggtaacattggcatttgacgaaaaaattttcagggacaggatacccagggcatcggccatggcaggaaagtcatggggtgaggcaccatcgagattcttacatagctgcgacactttgtgctcttggggcacaatgtaaccgtgttggggtcacaaacgctgtgccgcan

SEQ ID NO: 723489 - DNA, 191 bp, Homo sapiens
ccgacccttaaataacagcgatataaagacaagtttggtatgtgggaaggcttaaatctggagcttgtactaggttctgcttttaaggttttgaaggctgtttctgtccctggttcccattctactagatgaatatttgccctctgggtctccttgattagagtatggaggggcctggctatctcgctggt

SEQ ID NO: 723490 - DNA, 352 bp, Homo sapiens
ggtttctcggccagagtctgcaggacagacttggcagcaggtaccccctgtgaggaacactgaaatggatcacgacggaacccccgaaaacgaaggcgaagagactgcgcagtcagtaagtcattggtgcccgctcgggatttccaagttcaggggaattctcaagctagggtttcatcatgggacaacagctatccacacaacagaaacagtatataaaagtattgaaacaactgcttaaagctagcagagcctcggtttcgcaggctcaattaagggacccagtgcaaactgttgtttcccataacccatggtccccagaagaaggcacgctggacctagagctttggga

SEQ ID NO: 723491 - DNA, 547 bp, Homo sapiens
ctatcctaatttattttatatattaatctacaatctctaaataaaaataattactccctaatttatatcttaccccacccaaaaaaaatatacaattttaaccctaaaacacaccacactacctaaccatcctttatcgccacaccaccctccacaattcaacccccccacaataatcaacaactccctcccccacaaaaaaaccaaaaaaacgaccacatcaactatccacctaatcccacaaacaacttacaactctctcacaccaaaacaataaacctcttcaacaaaaaaaaaaaaaaatcccaaaacacccatccgccattaacataaccacattactccaaaaaatacctccccccccacaaataaaaatttctctaactcaccccccctaaaataaaaaaacataacacattaatcacatcacaaaacctattccatcctccccggaatcctactaaaaaacaaacatattacaattaccaaaccaaccaatcaaaacaaaactactataacccccaaaaaataccaccacaactccgct

SEQ ID NO: 723492 - DNA, 302 bp, Homo sapiens
tcgaccttttgtccaaagcgacgtacaagggagggaacagtcaagctacagagcaataaaaagcatggtgtaacaataagtactactttacatgagaattagaaaacaacaacctagaaaaaaggaaaaagaagtgcaggaatgtaactgccgaagtgcaagttaagcgctagtcaggtgccagttaggaagggaggtgctctctgaagagttgggtcttcaaaagcttcttgaaggtagagagggacgcccctgctctggtagtactaggcagttcgttccaccaacgtcgacgcggccgg

SEQ ID NO: 723493 - DNA, 409 bp, Homo sapiens
cgtcgactccttggtttatttttttgagggcttcaataacaagtcgaccttcaatgacgaaatccttcccttgctacaatgcttaagcctttttccagggttgtcagttctgcttcattgttactgcaatccacaacatataagatcttaaaattatgttgatagtcctggaaaaggctccataccttgcatccccatggtttcctttcgaggcaccatcaaatttaagtttcacaaaatccagaggaaggcctgagtattaagattgggatagactatgaagaaacatagttttccatgaggaaggggatgtcatttgaggggatagtttcaattgattaagaatttgagcctcctgaagagatgtgtcgacgcggccgcgaatttagtagtagtagtaggcggccgc

SEQ ID NO: 723494 - DNA, 444 bp, Homo sapiens
  misc_feature (93)..(93): n is a, c, g, or t
  misc_feature (133)..(133): n is a, c, g, or t
aataatttctttaaggaaaactataacccactgatgaaaagaaatttaaaaaaacataaccaacctagaaattacttcccagtgttccatggnttgggaagaatttacctttaagaatgaccattattacccnaaaccctacagttttcaatacaattgtccatttgaaattacagatttctcattttttttttacaaacacttataaaagaacaatcccataaaatttctttacgtgaatctcaaaacgtgccataaattagagaaaagccaactcttaagccaagaaagaacaaagccttagaggcattcaccaccacattaagttctcaaattttatttatagggtttatagttaccccaaaaagtgcttgattttgtgtttattaaaaacagacacattagattcacgcggaattattattagagaacccttagaaaaaa

SEQ ID NO: 723495 - DNA, 315 bp, Homo sapiens
atgctcccacgatcaaaagggacaagcatcaatgcacagcagccaatgcagctcaaaacgcttcgcctagccacaccccccacgggcaaaccagcagtgcattcaacctttcagcacatacacactgaaagtttcaactcacatgctcatactaacccccagggtatggtcacatttctgtgcccagcccaccgtggttccaacaacgattcacaccccacagtccactagcacagccagtgctgtcaaagcagtgttttcagctccaccccactcccgcaatcaacagctcaacaaactccacctgcaagttgg

SEQ ID NO: 723496 - DNA, 1426 bp, Homo sapiens
  misc_feature (1380)..(1380): n is a, c, g, or t
taagggcaacagaactctttatttaatggtgggtttaaaatgaggagtcaaaatcaagtcccgggctgtggtggaatacccaaaggagaacaaaaaagcgtgccagggcagcttcaaacaagctcgtgaggtggccgggcgtgggccaataaggaaagcagttacggggacagaaggcagcctcccttcccccgagggaagggcaagaggagcagggtgccgtgggcgtgtccctgggggtgtgaccaccttcgtggtgcgtggtgcaagggggaaaggctgtggggcagaagcgtggaaaactcagcctcagacaggcctgggcccttccccgcggggacaccagggcgaggcttccagcgtgggccctcgcgggttcgaggcccctcgagggggccacgcgggaagtgggggtgggagggaggggttaaattaaccattctttatacagaacaattaacgaggtctccttaacagaaaaggtgcgcgtggagcctcaaggcccagggctcgcgaaataaccttcatgtgggaaacacacaaccaacaaaatataaacaaaacaagaggtgcgtgggtgaccaccttctctcaagacaactcggggggggaccatggcaaagcgctcctcacgcgtggggacaaaggggcgcctgtgagaacacaattttctcacaatatatacgagaaagaagccaatggtggcgctcatcttagggagggatatcacccacttggcgtgtgggggggtcccccctggggcgcgggagacaaaacgcgcataggcacactcataaaggaaaaacccaaacacacaaagtatctctggggggcgtccacttaacacaactcggcgaacgtgttccaccccactggctgctttgggggagcaccccccaaaccccccacggtgcgacacggggaaaagaacacactggggggccttctaacaatctcaatttgtggtggactagggggagacccacttccaccccgactggagatattttggaggagcccaagggaacgaccctggaggggccacaacactcttcggctgcaaacagccaaacaaaattcaaaacgaggacgaactggtgcgtaaagtgaaaatagagcaggacatagataataagggtgcccacaaaggacagacgtcacaagagacatactcgtgggcgtgcggtagggacccctatatttttggcgaaagatagcgaggcacagaaaaaggtgcgtacaaacaattgtgtagtagaacaactgctggtcgtaggaaacgaaggggatggcgctactcgattagggttacggacaccaactatctctgaactttaggagagaaaaccccatatggtgggaggactactagtactttantaggagggatagctataaaaaaacacaaacattggtggtatacaag

SEQ ID NO: 723497 - DNA, 319 bp, Homo sapiens
ccagtttacttaatattttctccattttctcatttgtgaattggggatatgatagtacttaaaacatcattgtgaagacaatagaatatttcatgtaagtgtgcataacttacaccgtttctggcatatttagtactccctaaagcttgtgtattctgttacttatcatatgttttgtggtctcttctctgcagccttggttttgtcatccacaatataagtacaataacatctatctcaacagctgtttattagaagtaggacagactgtgctgttcacgcatttagccctgccctaacttagtctcttgggggatcc

SEQ ID NO: 723498 - DNA, 180 bp, Homo sapiens
  misc_feature (150)..(150): n is a, c, g, or t
tccttcatcatacctaccaatgcatagtgtctctgtgcctcagtttcttcacctataaatggggatatgcctttagacaggtgagatgagggttaagggtacagtgcgcacagggaactatccttaatatcctgtaataatccgccatgnaaaggaatgtggtaggtatgatgaaggacg

SEQ ID NO: 723499 - DNA, 681 bp, Homo sapiens
ctaaagatgcttttccgtggatggcacaaaagttcagctatggccatgtgcttactgaaggcctgtatatggaggcatcacagtggctggccttgaagaaattaagatagtgaaagaggacccctgtctgcgaagaaagagctcatgtttgtgtgtgtgctcatgctttgggtgctacaaggagactggtgtctggggaagggaggaagggtgatggttacaggtataggtaaataagttttccaacagttaacaatacttggagacaagctacagagtgatcaatgctagagttaggaacgctgtgagaaggcaaggtgttctgtttgtgccattggggagggctttgctgtggggattgggggaaggatattgctttaggctctgctagatggctaggactttaacaaatatgaaagaacgagctgagtctttaagacagagggaatatcagagacatgaaaatatctagagagatcgggagtggtaggctgagtctggaggtgagatatctggattcaatcacacgagttttcctatgccttcctgtaatgttggaggcttcatttattttcgtcaatcttggagctgtcatgggctttgtggcttgtggcgattattctgtgttctctgcgactcgtgtctactgtcccagctgtatgacgccgtattcatactttt

SEQ ID NO: 723500 - DNA, 942 bp, Homo sapiens
gatcagcatggcctatcatatagtagaaccagcccatgacccctaacaggggccctctcaggcctcctaatgacctccggcctagccatgtgatgtcacttccacctccataacgctcctcatactaggcctactaaccaacacactaaccatataccaatgatggcgcgagtgtagcacgagaaagcacataccaaggtcaccacacaccagcctgtccaagaaaggtcttcgagtgcgggatgatccctattgtattgaacctcagaagtttgttgtgtctgtgcgcaggattgtgttctgacgtcgcttttcaccagctctcgaggcctagtcccgcgtactcgccccacttgaggagggcgactggtcccccgccgaagaggcatcagcccggctgagaaattgccctagaagtcccactccgtaacagcacagtccggattactcgcatcaggagtatcaatgcagctgagctcaccatagtctaagtagaataacataccgaaacctagaatagattcaagcagcctgcttattacaactgtctactgggtcgtctattttaccctcctacaagcctcaggagtacttcgagtctcccttcagcagtttccgagggcagtctacggttcaacaattttttgtagcgcacaaggcgttccacggactgccacgttcattatgtggctcaagcttgcctcacatatctgacttcatccgccaactaatattttcactttacatcccaaaattcactttggcttcgaaagccgccgcctgaatactggcatttgtagatggtggttgactattcctgcatgtctccaccaatgatgagggctttacaacacacaatgcatcaccacagcactccaacccaataccataaccacaccacagcccattgggacaaaacaaaacaataacgcaacacccaca

SEQ ID NO: 723501 - DNA, 789 bp, Homo sapiens
ggagagcaaggacgcgggggagcagagatgatccgagccggcgccggccgccggctgtccccggatacgttcaactaaacctagaggaccggtggggtggtggatagtactaagagagagaaagcaacaggaatcgaatcaatgattttttcgaagggtacatagataatgaacgtggaaaagaaagacaaagaacaagcaagagaagagagaaggaccaaaagtaaaagaaggaggccgagacacgcgcggggaaagaagcggacacacagaaggagacaccatagagacaaggacgaacaacaagattgcatacgacagcaacgaaacagaagagaaggacgaagcaagaggaccaacaacaaaaaaaagagagaaagagatgaagaatggagagacagacaaacgacagcggaacgcaacaagacagacagacaccggacagcaggagagataacataatagaggagaacaaccagaagcgaggaaaacaacagacaaaagccaagcggcaaaaaagagaacaacgatgaaaccacacacgagaaaaagcaggcggcgaaacaagaccaagcgcgacgacaaggaacaaaccccgcacgaaagaccaaaaccaatggacgagagacacacaaaagaagaacaagaagaaacaacaaggagaaggaacgaagacaagaggacgacacaacacacacgacacaaacactaaaaacagatcaagactgagtgagaagaaagacaaaacaacaagcaacaaaagaaacgcacacacaaccaagcaccaca

SEQ ID NO: 723502 - DNA, 128 bp, Homo sapiens
  misc_feature (63)..(63): n is a, c, g, or t
ggctctgaattcaaagctttctaacgatagtacggggacaatgactgtcacgccactctacancacctgctcaagtgattcaacacgcccccacaatgtcagtggtgtttctcgctactttggaaaga

SEQ ID NO: 723503 - DNA, 444 bp, Homo sapiens
tgcaggattcgggacgagcactgaacgagtaccaaggagatgcgccctatgtgccatgcggacattgtggcccagctgtccagtggttgacaccatggctcagaactgtcgacctccgtctcattcccatccttcctgctgctggagtcaaccaccgatggaacgactgacctgcgcagattggtaagcattgaactgacagagatgctgatgctatggaggccaacgaagagctagacctacagctgatgccatcaggagcactgtgacctaggatataggctactgtctctagacgctgcagccattctgatgcactcactgtatgtattcagagtatccttgtatcgcataactgcggacatatgtatgtgctcgcgaccatatagtagcatgcgaggataggtgcactagcatgaataacagtgggccttagagcttttc

SEQ ID NO: 723504 - DNA, 153 bp, Homo sapiens
aggaatgggcctggcgcgtaccgttcctgatcgccgcgcccctgggctttatttccatgtacatccgcctcaagctcgaagacagccccgagttcctcgccctgcaacgcgccgggcaaacttcgcgggcgccgctgcgcgaggtctggcagt

SEQ ID NO: 723505 - DNA, 468 bp, Homo sapiens
cacgaggaacgttggccgtccggcatctcctgccggcagacgagcacgtcgaaatcggcgccgaattccatcagccgcccgagaaagtcaggcggcatcacatatcgatcgtgcgcgatcacaaccagggggcacgacgtgctcgcaacgagctggttcttcttgcgggtgacccagccttgttgcgaaaactctttcgactgtacgatcagcctggtgccatcgccgcgggcctcgaccgttgtccggagactctcgggaccgcagaccagtgtttcgcagcgcagcccgtcgggccacctcaacgcccggacgctgtcgaggaatgcgtgcagtcgcgtcgtgtcctggccgtcgtttatgacgccgaaggccacgccatcgatcgtcgccgggcgttgcgcctccggcagcaggcggaaccccgccaggatggagccattctgaggatagaaattctccagttcg

SEQ ID NO: 723506 - DNA, 310 bp, Homo sapiens
tcgacggacacataagtaatcatgacacagaggctgggtgtggtggctcatgcctgcaattccagcacttcaggaggccaaggtggaggaatcacttgaggccaagagttcaagaccagcctggccaacttggcgaaaccctgtctctactaaaaacacaaaaattagctgggtgtggtggttcatgcttgtagtcccagctactcgggaggctggggcaggtgaatcgcttgaacccgggaggcagaagttgcagtgagtcaaaatcctgccactgtactccagcctgtacaatagtgagaacccgtct

SEQ ID NO: 723507 - DNA, 586 bp, Homo sapiens
taattcccagggtgtgccatatttaattggctaggggcacagacccaaaaccggctatgcggaacaaggtctgatcagcaactgggggaaatagacaaaaaatatgcgggattcattcataccagccacgtgctttcatatgaatgaactccaggggctggtatgaagatgtcttaccaggtacaacaggcaactcaacacatgcctaaaagactccgtgtaaggggtttcagacaagacgagtcctctagcgcttgggtgttcacacctttactccagtgatccggggaaaccgccaacacagacgagcctttcttatttcttatactcaacctcttgtgatgacacagcaaaaacagacgtgactatgctctgggtatatagcagacaatctagccggttttccataccagacacgggaagagccgtggttaataaggcatcatttagacattacaactctcagaccgggtagtaaccaacggcagccactccaagggagtcaagggcaagggccaaagggaacgagagaaaatcatcacctagtagggaaaacgagtcaagcgaaagtgacacagaagtttcc

SEQ ID NO: 723508 - DNA, 2529 bp, Homo sapiens
  misc_feature (9)..(10): n is a, c, g, or t
gagcgtgannggggagagcggaccgacgcgacacgccgtgcgcctccgcggctgcgctacgaaaacgagtcccggagcggccccgcgcccgccgcacccggccctcgcccgcccgaagacaggcgccaagctgccccgccgtctccccagctagcgcccggccgccgccgcctcgcgggccccgggcggaagggggcggggtcccgattcgccccgcccccgcggagggatacgcggcgccgcggcccaaaacccccgggcgaggcggccggggcgggtgaggcgctccgcctgctgcgcgtctacgcggtccccgcgggccttccgggcccactgcgccgcgcggaccgcctcgggctcggacggccggtgtccccggcgcgccgctcgcccggatcggccgcggcttcggcgcctggggctcggggctccggggaggccgtcgcccgcgatgctgctctccaagttcggctccctggcgcacctctgcgggcccggcggcgtggaccacctcccggtgaagatcctgcagccagccaaggcggacaaggagagcttcgagaaggcgtaccaggtgggcgccgtgctgggtagcggcggcttcggcacggtctacgcgggtagccgcatcgccgacgggctcccggtggctgtgaagcacgtggtgaaggagcgggtgaccgagtggggcagcctgggcggcgcgaccgtgcccctggaggtggtgctgctgcgcaaggtgggcgcggcgggcggcgcgcgcggcgtcatccgcctgctggactggttcgagcggcccgacggcttcctgctggtgctggagcggcccgagccggcgcaggacctcttcgactttatcacggagcgcggcgccctggacgagccgctggcgcgccgcttcttcgcgcaggtgctggccgccgtgcgccactgccacagctgcggggtcgtgcaccgcgacattaaggacgaaaatctgcttgtggacctgcgctccggagagctcaagctcatcgacttcggttcgggtgcgctgctcaaggacacggtctacaccgacttcgacggcacccgagtgtacagccccccggagtggatccgctaccaccgctaccacgggcgctcggccaccgtgtggtcgctgggcgtgcttctctacgatatggtgtgtggggacatccccttcgagcaggacgaggagatcctccgaggccgcctgctcttccggaggagggtctctccagagtgccagcagctgatccggtggtgcctgtccctgcggccctcagagcggccgtcgctggatcagattgcggcccatccctggatgctgggggctgacgggggcgccccggagagctgtgacctgcggctgtgcaccctcgaccctgatgacgtggccagcaccacgtccagcagcgagagcttgtgaggagctgcacctgactgggagctaggggaccacctgccttggccagacctgggacgcccccagaccctgactttttcctgcgtgggccgtctcctcctgcggaagcagtgacctctgacccctggtgaccttcgctttgagtgccttttgaacgctggtcccgcgggacttggttttctcaagctctgtctgtccaaagacgctccggtcgaggtcccgcctgccctgggtggatacttgaaccccagacgcccctctgtgctgctgtgtccggaggcggccttcccatctgcctgcccacccggagctctttccgccggcgcagggtcccaagcccacctcccgccctcagtcctgcggtgtgcgtctgggcacgtcctgcacacacaatgcaagtcctggcctccgcgcccgcccgcccacgcgagccgtacccgccgccaactctgttatttatggtgtgaccccctggaggtgccctcggcccaccggggctatttattgtttaatttatttgttgaggttatttcctctgagcagtctgcctctcccaagccccaggggacagtggggaggcaggggagggggtggctgtggtccagggaccccaggccctgattcctgtgcctggcgtctgtcctggccccgcctgtcagaagatgaacatgtatagtggctaacttaaggggagtgggtgaccctgacacttccaggcactgtgcccagggtttgggttttaaattattgactttgtacagtctgcttgtgggctctgaaagctggggtggggccagagcctgagcgtttaatttattcagtacctgtgtttgtgtgaatgcggtgtgtgcaggcatcgcagatgggggttctttcagttcaaaagtgagatgtctggagaccatatgctactatacagtggttctagataaagtgtttctggacatagggaggcggggcccgggcgcaataccgcctatagtgagtggtatttcaactcacttgccaatgctctcaacgatgtgactggcgtcttgttaccaatagacaggactgtgcccttgccactactggcaaccgattgggatgggaatagagct

SEQ ID NO: 723509 - DNA, 1415 bp, Homo sapiens
  misc_feature (39)..(39): n is a, c, g, or t
gctgcttcctgttactgaggccagggagttaaccagcanggacctcgccgtctgttgagcggctctgcctctgtggtgggcgtgctaagccctgtgtccccttaggcacccgagtgtacagccccccggagtggatccgctaccaccgctaccacgggcgctcggccaccgtgtggtcgctgggcgtgcttctctacgatatggtgtgtggggacatccccttcgagcaggacgaggagatcctccgaggccgcctgctcttccggaggagggtctctccagagtgccagcagctgatccggtggtgcctgtccctgcggccctcagagcggccgtcgctggatcagattgcggcccatccctggatgctgggggctgacgggggcgccccggagagctgtgacctgcggctgtgcaccctcgaccctgatgacgtggccagcaccacgtccagcagcgagagcttgtgaggagctgcacctgactgggagctaggggaccacctgccttggccagacctgggacgcccccagaccctgactttttcctgcgtgggccgtctcctcctgcggaagcagtgacctctgacccctggtgaccttcgctttgagtgccttttgaacgctggtcccgcgggacttggttttctcaagctctgtctgtccaaagacgctccggtcgaggtcccgcctgccctgggtggatacttgaaccccagacgcccctctgtgctgctgtgtccggaggcggccttcccatctgcctgcccacccggagctctttccgccggcgcagggtcccaagcccacctcccgccctcagtcctgcggtgtgcgtctgggcacgtcctgcacacacaatgcaagtcctggcctccgcgcccgcccgcccacgcgagccgtacccgccgccaactctgttatttatggtgtgaccccctggaggtgccctcggcccaccggggctatttattgtttaatttatttgttgaggttatttcctctgagcagtctgcctctcccaagccccaggggacagtggggaggcaggggagggggtggctgtggtccagggaccccaggccctgattcctgtgcctggcgtctgtcctggccccgcctgtcagaagatgaacatgtatagtggctaacttaaggggagtgggtgaccctgacacttccaggcactgtgcccagggtttgggttttaaattattgactttgtacagtctgcttgtgggctctgaaagctggggtggggccagagcctgagcgtttaatttattcagtacctgtgtttgtgtgaatgcggtgtgtgcaggcatcgcagatgggggttctttcagttcaaaagtgagatgtctggagatcatatttttttatacaggtatttcaattaaaatgtttttgtacata

SEQ ID NO: 723510 - DNA, 1489 bp, Homo sapiens
  misc_feature (39)..(39): n is a, c, g, or t
  misc_feature (324)..(324): n is a, c, g, or t
gctgcttcctgttactgaggccagggagttaaccagcanggacctcgccgtctgttgagcggctctgcctctgtggtgggcgtgctaagccctgtgtccccttaggcacccgagtgtacagccccccggagtggatccgctaccaccgctaccacgggcgctcggccaccgtgtggtcgctgggcgtgcttctctacgatatggtgtgtggggacatccccttcgagcaggacgaggagatcctccgaggccgcctgctcttccggaggagggtctctccaggtgcgtggtggctcgaggcgggggtgggggcctcgccctgcntgggccctccctgacctctccgctccgcacagagtgccagcagctgatccggtggtgcctgtccctgcggccctcagagcggccgtcgctggatcagattgcggcccatccctggatgctgggggctgacgggggcgccccggagagctgtgacctgcggctgtgcaccctcgaccctgatgacgtggccagcaccacgtccagcagcgagagcttgtgaggagctgcacctgactgggagctaggggaccacctgccttggccagacctgggacgcccccagaccctgactttttcctgcgtgggccgtctcctcctgcggaagcagtgacctctgacccctggtgaccttcgctttgagtgccttttgaacgctggtcccgcgggacttggttttctcaagctctgtctgtccaaagacgctccggtcgaggtcccgcctgccctgggtggatacttgaaccccagacgcccctctgtgctgctgtgtccggaggcggccttcccatctgcctgcccacccggagctctttccgccggcgcagggtcccaagcccacctcccgccctcagtcctgcggtgtgcgtctgggcacgtcctgcacacacaatgcaagtcctggcctccgcgcccgcccgcccacgcgagccgtacccgccgccaactctgttatttatggtgtgaccccctggaggtgccctcggcccaccggggctatttattgtttaatttatttgttgaggttatttcctctgagcagtctgcctctcccaagccccaggggacagtggggaggcaggggagggggtggctgtggtccagggaccccaggccctgattcctgtgcctggcgtctgtcctggccccgcctgtcagaagatgaacatgtatagtggctaacttaaggggagtgggtgaccctgacacttccaggcactgtgcccagggtttgggttttaaattattgactttgtacagtctgcttgtgggctctgaaagctggggtggggccagagcctgagcgtttaatttattcagtacctgtgtttgtgtgaatgcggtgtgtgcaggcatcgcagatgggggttctttcagttcaaaagtgagatgtctggagatcatatttttttatacaggtatttcaattaaaatgtttttgtacata

SEQ ID NO: 723511 - DNA, 2284 bp, Homo sapiens
  misc_feature (9)..(10): n is a, c, g, or t
gagcgtgannggggagagcggaccgacgcgacacgccgtgcgcctccgcggctgcgctacgaaaacgagtcccggagcggccccgcgcccgccgcacccggccctcgcccgcccgaagacaggcgccaagctgccccgccgtctccccagctagcgcccggccgccgccgcctcgcgggccccgggcggaagggggcggggtcccgattcgccccgcccccgcggagggatacgcggcgccgcggcccaaaacccccgggcgaggcggccggggcgggtgaggcgctccgcctgctgcgcgtctacgcggtccccgcgggccttccgggcccactgcgccgcgcggaccgcctcgggctcggacggccggtgtccccggcgcgccgctcgcccggatcggccgcggcttcggcgcctggggctcggggctccggggaggccgtcgcccgcgatgctgctctccaagttcggctccctggcgcacctctgcgggcccggcggcgtggaccacctcccggtgaagatcctgcagccagccaaggcggacaaggagagcttcgagaaggcgtaccaggtgggcgccgtgctgggtagcggcggcttcggcacggtctacgcgggtagccgcatcgccgacgggctcccggtggctgtgaagcacgtggtgaaggagcgggtgaccgagtggggcagcctgggcggcgcgaccgtgcccctggaggtggtgctgctgcgcaaggtgggcgcggcgggcggcgcgcgcggcgtcatccgcctgctggactggttcgagcggcccgacggcttcctgctggtgctggagcggcccgagccggcgcaggacctcttcgactttatcacggagcgcggcgccctggacgagccgctggcgcgccgcttcttcgcgcaggtgctggccgccgtgcgccactgccacagctgcggggtcgtgcaccgcgacattaaggacgaaaatctgcttgtggacctgcgctccggagagctcaagctcatcgacttcggttcgggtgcgctgctcaaggacacggtctacaccgacttcgacggcacccgagtgtacagccccccggagtggatccgctaccaccgctaccacgggcgctcggccaccgtgtggtcgctgggcgtgcttctctacgatatggtgtgtggggacatccccttcgagcaggacgaggagatcctccgaggccgcctgctcttccggaggagggtctctccagagtgccagcagctgatccggtggtgcctgtccctgcggccctcagagcggccgtcgctggatcagattgcggcccatccctggatgctgggggctgacgggggcgccccggagagctgtgacctgcggctgtgcaccctcgaccctgatgacgtggccagcaccacgtccagcagcgagagcttgtgaggagctgcacctgactgggagctaggggaccacctgccttggccagacctgggacgcccccagaccctgactttttcctgcgtgggccgtctcctcctgcggaagcagtgacctctgacccctggtgaccttcgctttgagtgccttttgaacgctggtcccgcgggacttggttttctcaagctctgtctgtccaaagacgctccggtcgaggtcccgcctgccctgggtggatacttgaaccccagacgcccctctgtgctgctgtgtccggaggcggccttcccatctgcctgcccacccggagctctttccgccggcgcagggtcccaagcccacctcccgccctcagtcctgcggtgtgcgtctgggcacgtcctgcacacacaatgcaagtcctggcctccgcgcccgcccgcccacgcgagccgtacccgccgccaactctgttatttatggtgtgaccccctggaggtgccctcggcccaccggggctatttattgtttaatttatttgttgaggttatttcctctgagcagtctgtcctggccccgcctgtcagaagatgaacatgtatagtggctaacttaaggggagtgggtgaccctgacacttccaggcactgtgcccagggtttgggttttaaattattgactttgtacagtctgcttgtgggctctgaaagctggggtggggccagagcctgagcgtttaatttattcagtacctgtgtttgtgtgaatgcggtgtgtgcaggcatcgcagatgggggttctttcagttcaaaagtgagatgtctggagatcatatttttttatacaggtatttcaattaaaatgtttttgtacata

SEQ ID NO: 723512 - DNA, 2235 bp, Homo sapiens
  misc_feature (9)..(10): n is a, c, g, or t
gagcgtgannggggagagcggaccgacgcgacacgccgtgcgcctccgcggctgcgctacgaaaacgagtcccggagcggccccgcgcccgccgcacccggccctcgcccgcccgaagacaggcgccaagctgccccgccgtctccccagctagcgcccggccgccgccgcctcgcgggccccgggcggaagggggcggggtcccgattcgccccgcccccgcggagggatacgcggcgccgcggcccaaaacccccgggcgaggcggccggggcgggtgaggcgctccgcctgctgcgcgtctacgcggtccccgcgggccttccgggcccactgcgccgcgcggaccgcctcgggctcggacggccggtgtccccggcgcgccgctcgcccggatcggccgcggcttcggcgcctggggctcggggctccggggaggccgtcgcccgcgatgctgctctccaagttcggctccctggcgcacctctgcgggcccggcggcgtggaccacctcccggtgaagatcctgcagccagccaaggcggacaaggagagcttcgagaaggcgtaccaggtgggcgccgtgctgggtagcggcggcttcggcacggtctacgcgggtagccgcatcgccgacgggctcccggtggctgtgaagcacgtggtgaaggagcgggtgaccgagtggggcagcctgggcggcgcgaccgtgcccctggaggtggtgctgctgcgcaaggtgggcgcggcgggcggcgcgcgcggcgtcatccgcctgctggactggttcgagcggcccgacggcttcctgctggtgctggagcggcccgagccggcgcaggacctcttcgactttatcacggagcgcggcgccctggacgagccgctggcgcgccgcttcttcgcgcaggtgctggccgccgtgcgccactgccacagctgcggggtcgtgcaccgcgacattaaggacgaaaatctgcttgtggacctgcgctccggagagctcaagctcatcgacttcggttcgggtgcgctgctcaaggacacggtctacaccgacttcgacggcacccgagtgtacagccccccggagtggatccgctaccaccgctaccacgggcgctcggccaccgtgtggtcgctgggcgtgcttctctacgatatggtgtgtggggacatccccttcgagcaggacgaggagatcctccgaggccgcctgctcttccggaggagggtctctccagagtgccagcagctgatccggtggtgcctgtccctgcggccctcagagcggccgtcgctggatcagattgcggcccatccctggatgctgggggctgacgggggcgccccggagagctgtgacctgcggctgtgcaccctcgaccctgatgacgtggccagcaccacgtccagcagcgagagcttgtgaggagctgcacctgactgggagctaggggaccacctgccttggccagacctgggacgcccccagaccctgactttttcctgcgtgggccgtctcctcctgcggaagcagtgacctctgacccctggtgaccttcgctttgagtgccttttgaacgctggtcccgcgggacttggttttctcaagctctgtctgtccaaagacgctccggtcgaggtcccgcctgccctgggtggatacttgaaccccagacgcccctctgtgctgctgtgtccggaggcggccttcccatctgcctgcccacccggagctctttccgccggcgcagggtcccaagcccacctcccgccctcagtcctgcggtgtgcgtctgggcacgtcctgcacacacaatgcaagtcctggcctccgcgcccgcccgcccacgcgagccgtacccgccgccaactctgttatttatggtgtgaccccctggaggtgccctcggcccaccggggctatttattgtttaatttatttgttgaggttatttcctctgagcagtctgcctctcccaagcccctgacacttccaggcactgtgcccagggtttgggttttaaattattgactttgtacagtctgcttgtgggctctgaaagctggggtggggccagagcctgagcgtttaatttattcagtacctgtgtttgtgtgaatgcggtgtgtgcaggcatcgcagatgggggttctttcagttcaaaagtgagatgtctggagatcatatttttttatacaggtatttcaattaaaatgtttttgtacata

SEQ ID NO: 723513 - DNA, 755 bp, Homo sapiens
agcggggcggggaccgtggcgctggccggagcaaggagctgcgcaacgcatcgggtcccggtgccctccccgacatgaaaggctccgcagtcagcgtacgtgagccccgatggggggaccgatgctccctctttctctagccctgaggtggccgggatggccgacgcgtgatctagagaatggctcctggcgcggacccgagaaggcgctactaacttccgactacacgtgactccggagaagataggaaacctgtagactagaactcgagcagtactcggcagacgtctcggggacccgtctgggtacgttgtgacatgagatactaatagatcaacatggggcggtaccactgtgtcgagtgtagcaaggaggcctagataacaagcaggctcgaaaagtccctagtagacccttagtcgagtcgcgctgctctaacggacttggcgagagctcgtcgggatcgtactagcgacttgcattacctgaataagagttcaagtcagtcgtgagcgtattggggccagctacttgttgtaaccatcgtgacaaggaagatgtgacgccactgtaagaagactcgcgggcgaaaacgtattatctatgagaggcttctgacgcaaggggacactactggagtggatagacctggttggactgaacacccgtaaggatacttcctacattgatcgaacgacgtagtttatgacctgggagaagggatatgcgacgagttctgcgctggctggaataat

SEQ ID NO: 723514 - DNA, 2387 bp, Homo sapiens
  misc_feature (9)..(10): n is a, c, g, or t
  misc_feature (1883)..(1883): n is a, c, g, or t
  misc_feature (1895)..(1895): n is a, c, g, or t
  misc_feature (1914)..(1914): n is a, c, g, or t
  misc_feature (1924)..(1925): n is a, c, g, or t
  misc_feature (1937)..(1938): n is a, c, g, or t
  misc_feature (1941)..(1941): n is a, c, g, or t
  misc_feature (1946)..(1946): n is a, c, g, or t
  misc_feature (1951)..(1951): n is a, c, g, or t
  misc_feature (1953)..(1956): n is a, c, g, or t
  misc_feature (1959)..(1959): n is a, c, g, or t
  misc_feature (1966)..(1966): n is a, c, g, or t
  misc_feature (1968)..(1968): n is a, c, g, or t
  misc_feature (1983)..(1984): n is a, c, g, or t
  misc_feature (1986)..(1986): n is a, c, g, or t
  misc_feature (2005)..(2005): n is a, c, g, or t
  misc_feature (2036)..(2036): n is a, c, g, or t
  misc_feature (2041)..(2041): n is a, c, g, or t
  misc_feature (2057)..(2057): n is a, c, g, or t
gagcgtgannggggagagcggaccgacgcgacacgccgtgcgcctccgcggctgcgctacgaaaacgagtcccggagcggccccgcgcccgccgcacccggccctcgcccgcccgaagacaggcgccaagctgccccgccgtctccccagctagcgcccggccgccgccgcctcgcgggccccgggcggaagggggcggggtcccgattcgccccgcccccgcggagggatacgcggcgccgcggcccaaaacccccgggcgaggcggccggggcgggtgaggcgctccgcctgctgcgcgtctacgcggtccccgcgggccttccgggcccactgcgccgcgcggaccgcctcgggctcggacggccggtgtccccggcgcgccgctcgcccggatcggccgcggcttcggcgcctggggctcggggctccggggaggccgtcgcccgcgatgctgctctccaagttcggctccctggcgcacctctgcgggcccggcggcgtggaccacctcccggtgaagatcctgcagccagccaaggcggacaaggagagcttcgagaaggcgtaccaggtgggcgccgtgctgggtagcggcggcttcggcacggtctacgcgggtagccgcatcgccgacgggctcccggtggctgtgaagcacgtggtgaaggagcgggtgaccgagtggggcagcctgggcggcgcgaccgtgcccctggaggtggtgctgctgcgcaaggtgggcgcggcgggcggcgcgcgcggcgtcatccgcctgctggactggttcgagcggcccgacggcttcctgctggtgctggagcggcccgagccggcgcaggacctcttcgactttatcacggagcgcggcgccctggacgagccgctggcgcgccgcttcttcgcgcaggtgctggccgccgtgcgccactgccacagctgcggggtcgtgcaccgcgacattaaggacgaaaatctgcttgtggacctgcgctccggagagctcaagctcatcgacttcggttcgggtgcgctgctcaaggacacggtctacaccgacttcgacggcacccgagtgtacagccccccggagtggatccgctaccaccgctaccacgggcgctcggccaccgtgtggtcgctgggcgtgcttctctacgatatggtgtgtggggacatccccttcgagcaggacgaggagatcctccgaggccgcctgctcttccggaggagggtctctccagagtgccagcagctgatccggtggtgcctgtccctgcggccctcagagcggccgtcgctggatcagattgcggcccatccctggatgctgggggctgacgggggcgccccggagagctgtgacctgcggctgtgcaccctcgaccctgatgacgtggccagcaccacgtccagcagcgagagcttgtgaggagctgcacctgactgggagctaggggaccacctgccttggccagacctgggacgcccccagaccctgactttttcctgcgtgggccgtctcctcctgcggaagcagtgacctctgacccctggtgaccttcgctttgagtgccttttgaacgctggtcccgcgggacttggttttctcaagctctgtctgtccaaagacgctccggtcgaggtcccgcctgccctgggtggatacttgaaccccagacgcccctctgtgctgctgtgtccggaggcggccttcccatctgcctgcccacccggagctctttccgccggcgcagggtcccaagcccacctcccgccctcagtcctgcggtgtgcgtctgggcacgtcctgcacacacaatgcaagtcctggcctccgcgcccgcccgcccacgcgagccgtacccgccgccaaccccccnatcaatggtccnacccccaaaaacccccccnccccaccccnnccaaaaaacacnnaanaaaancgttnannnnatnccccccnancaatctccccccccnnancccccccgcacaccgcccnccccccccagccccccccccccccccacccnccccncccccccacccccccncccccccccccccccccgtctgtcctggccccgcctgtcagaagatgaacatgtatagtggctaacttaaggggagtgggtgaccctgacacttccaggcactgtgcccagggtttgggttttaaattattgactttgtacagtctgcttgtgggctctgaaagctggggtggggccagagcctgagcgtttaatttattcagtacctgtgtttgtgtgaatgcggtgtgtgcaggcatcgcagatgggggttctttcagttcaaaagtgagatgtctggagatcatatttttttatacaggtatttcaattaaaatgtttttgtacata

SEQ ID NO: 723515 - DNA, 2090 bp, Homo sapiens
  misc_feature (9)..(10): n is a, c, g, or t
  misc_feature (2016)..(2016): n is a, c, g, or t
  misc_feature (2037)..(2037): n is a, c, g, or t
gagcgtgannggggagagcggaccgacgcgacacgccgtgcgcctccgcggctgcgctacgaaaacgagtcccggagcggccccgcgcccgccgcacccggccctcgcccgcccgaagacaggcgccaagctgccccgccgtctccccagctagcgcccggccgccgccgcctcgcgggccccgggcggaagggggcggggtcccgattcgccccgcccccgcggagggatacgcggcgccgcggcccaaaacccccgggcgaggcggccggggcgggtgaggcgctccgcctgctgcgcgtctacgcggtccccgcgggccttccgggcccactgcgccgcgcggaccgcctcgggctcggacggccggtgtccccggcgcgccgctcgcccggatcggccgcggcttcggcgcctggggctcggggctccggggaggccgtcgcccgcgatgctgctctccaagttcggctccctggcgcacctctgcgggcccggcggcgtggaccacctcccggtgaagatcctgcagccagccaaggcggacaaggagagcttcgagaaggcgtaccaggtgggcgccgtgctgggtagcggcggcttcggcacggtctacgcgggtagccgcatcgccgacgggctcccggtggctgtgaagcacgtggtgaaggagcgggtgaccgagtggggcagcctgggcggcgcgaccgtgcccctggaggtggtgctgctgcgcaaggtgggcgcggcgggcggcgcgcgcggcgtcatccgcctgctggactggttcgagcggcccgacggcttcctgctggtgctggagcggcccgagccggcgcaggacctcttcgactttatcacggagcgcggcgccctggacgagccgctggcgcgccgcttcttcgcgcaggtgctggccgccgtgcgccactgccacagctgcggggtcgtgcaccgcgacattaaggacgaaaatctgcttgtggacctgcgctccggagagctcaagctcatcgacttcggttcgggtgcgctgctcaaggacacggtctacaccgacttcgacggcacccgagtgtacagccccccggagtggatccgctaccaccgctaccacgggcgctcggccaccgtgtggtcgctgggcgtgcttctctacgatatggtgtgtggggacatccccttcgagcaggacgaggagatcctccgaggccgcctgctcttccggaggagggtctctccagagtgccagcagctgatccggtggtgcctgtccctgcggccctcagagcggccgtcgctggatcagattgcggcccatccctggatgctgggggctgacgggggcgccccggagagctgtgacctgcggctgtgcaccctcgaccctgatgacgtggccagcaccacgtccagcagcgagagcttgtgaggagctgcacctgactgggagctaggggaccacctgccttggccagacctgggacgcccccagaccctgactttttcctgcgtgggccgtctcctcctgcggaagcagtgacctctgacccctggtgaccttcgctttgagtgccttttgaacgctggtcccgcgggacttggttttctcaagctctgtctgtccaaagacgctccggtcgaggtcccgcctgccctgggtggatacttgaaccccagacgcccctctgtgctgctgtgtccggaggcggccttcccatctgcctgcccacccggagctctttccgccggcgcagggtcccaagcccacctcccgccctcagtcctgcggtgtgcgtctgggcacgtcctgcacacacaatgcaagtcctggcctccgcgcccgcccgcccacgcgagccgtacccgccgccaactctgttatttatggtgtgaccccctggaggtgccctcggcccaccggggctatttattgtttaatttatttgttgaggttatttcctctgagcagtctgcctctcccaagccccaggggacagtggggaggcagggggnaggggtttttttttttttttntttttttttttttttttttttttcctttttttcctttttttcctctttgtttg

SEQ ID NO: 723516 - DNA, 412 bp, Homo sapiens
ttcttgactgcacactgagactttacagacgggtatgttccactccgctttatctcccacctatacctcccaataatgtctcccggcgatgaagcatggagagcccaagacacagggaaacagattgaacctctcggggttgtcaggcagctactgttggagagaactgtaccgcacttgccgcagattatcagagaggatcaggctggagtaggccgtgtctgggtccggagtcacgtccactgagtataactgagcctctcttaattcttggatcttctccatatctgactgcattttatctgtgaaactgctttagactctccgtcaagaatagacatttttgggcaaaaatgtggaatagctcttgcaaatctggaggtgtgatccatggttcaggaatcctgaatct

SEQ ID NO: 723517 - DNA, 1812 bp, Homo sapiens
  misc_feature (9)..(10): n is a, c, g, or t
gagcgtgannggggagagcggaccgacgcgacacgccgtgcgcctccgcggctgcgctacgaaaacgagtcccggagcggccccgcgcccgccgcacccggccctcgcccgcccgaagacaggcgccaagctgccccgccgtctccccagctagcgcccggccgccgccgcctcgcgggccccgggcggaagggggcggggtcccgattcgccccgcccccgcggagggatacgcggcgccgcggcccaaaacccccgggcgaggcggccggggcgggtgaggcgctccgcctgctgcgcgtctacgcggtccccgcgggccttccgggcccactgcgccgcgcggaccgcctcgggctcggacggccggtgtccccggcgcgccgctcgcccggatcggccgcggcttcggcgcctggggctcggggctccggggaggccgtcgcccgcgatgctgctctccaagttcggctccctggcgcacctctgcgggcccggcggcgtggaccacctcccggtgaagatcctgcagccagccaaggcggacaaggagagcttcgagaaggcgtaccaggtgggcgccgtgctgggtagcggcggcttcggcacggtctacgcgggtagccgcatcgccgacgggctcccggtggctgtgaagcacgtggtgaaggagcgggtgaccgagtggggcagcctgggcggcgcgaccgtgcccctggaggtggtgctgctgcgcaaggtgggcgcggcgggcggcgcgcgcggcgtcatccgcctgctggactggttcgagcggcccgacggcttcctgctggtgctggagcggcccgagccggcgcaggacctcttcgactttatcacggagcgcggcgccctggacgagccgctggcgcgccgcttcttcgcgcaggtgctggccgccgtgcgccactgccacagctgcggggtcgtgcaccgcgacattaaggacgaaaatctgcttgtggacctgcgctccggagagctcaagctcatcgacttcggttcgggtgcgctgctcaaggacacggtctacaccgacttcgacggcacccgagtgtacagccccccggagtggatccgctaccaccgctaccacgggcgctcggccaccgtgtggtcgctgggcgtgcttctctacgatatggtgtgtggggacatccccttcgagcaggacgaggagatcctccgaggccgcctgctcttccggaggagggtctctccagagtgccagcagctgatccggtggtgcctgtccctgcggccctcagagcggccgtcgctggatcagattgcggcccatccctggatgctgggggctgacgggggcgccccggagagctgtgacctgcggctgtgcaccctcgaccctgatgacgtggccagcaccacgtccagcagcgagagcttgtgaggagctgcacctgactgggagctaggggaccacctgccttggccagacctgggacgcccccagaccctgactttttcctgcgtgggccgtctcctcctgcggaagcagtgacctctgacccctggtgaccttcgctttgagtgccttttgaacgctggtcccgcgggacttggttttctcaagctctgtctgtccaaagacgctccggtcgaggtcccgcctgccctgggtggatacttgaaccccagacgcccctctgtgctgctgtgtccggaggcggccttcccatctgcctgcccacccggagctctttccgccggcgcagggtcccaagcccacctcccgccctcagcctgcctggtccatgggatcctctagat

SEQ ID NO: 723518 - DNA, 303 bp, Homo sapiens
agggctcgcgatagcaggctcttgagcggcccattatgagaaggggggcaaagaagggggaacatgcctgtcacttgcagaggtgacggggtggaaggagcagacagcagtattttgcagggagcctgcgttgggatgtcaacgaaacacggtggccagacgagaatattatgaacgcttggaccggtagaattgaaggcgttaaagtgcatgggttaggtgggaaaccaggtcgttctgtgtgcgggcgtgtggatggaccgaccgatgagggcagaataagcgatggtgggcaccgtcttt

SEQ ID NO: 723519 - DNA, 1761 bp, Homo sapiens
  misc_feature (9)..(10): n is a, c, g, or t
gagcgtgannggggagagcggaccgacgcgacacgccgtgcgcctccgcggctgcgctacgaaaacgagtcccggagcggccccgcgcccgccgcacccggccctcgcccgcccgaagacaggcgccaagctgccccgccgtctccccagctagcgcccggccgccgccgcctcgcgggccccgggcggaagggggcggggtcccgattcgccccgcccccgcggagggatacgcggcgccgcggcccaaaacccccgggcgaggcggccggggcgggtgaggcgctccgcctgctgcgcgtctacgcggtccccgcgggccttccgggcccactgcgccgcgcggaccgcctcgggctcggacggccggtgtccccggcgcgccgctcgcccggatcggccgcggcttcggcgcctggggctcggggctccggggaggccgtcgcccgcgatgctgctctccaagttcggctccctggcgcacctctgcgggcccggcggcgtggaccacctcccggtgaagatcctgcagccagccaaggcggacaaggagagcttcgagaaggcgtaccaggtgggcgccgtgctgggtagcggcggcttcggcacggtctacgcgggtagccgcatcgccgacgggctcccggtggctgtgaagcacgtggtgaaggagcgggtgaccgagtggggcagcctgggcggcgcgaccgtgcccctggaggtggtgctgctgcgcaaggtgggcgcggcgggcggcgcgcgcggcgtcatccgcctgctggactggttcgagcggcccgacggcttcctgctggtgctggagcggcccgagccggcgcaggacctcttcgactttatcacggagcgcgacgcccccagaccctgactttttcctgcgtgggccgtctcctcctgcggaagcagtgacctctgacccctggtgaccttcgctttgagtgccttttgaacgctggtcccgcgggacttggttttctcaagctctgtctgtccaaagacgctccggtcgaggtcccgcctgccctgggtggatacttgaaccccagacgcccctctgtgctgctgtgtccggaggcggccttcccatctgcctgcccacccggagctctttccgccggcgcagggtcccaagcccacctcccgccctcagtcctgcggtgtgcgtctgggcacgtcctgcacacacaatgcaagtcctggcctccgcgcccgcccgcccacgcgagccgtacccgccgccaactctgttatttatggtgtgaccccctggaggtgccctcggcccaccggggctatttattgtttaatttatttgttgaggttatttcctctgagcagtctgcctctcccaagccccaggggacagtggggaggcaggggagggggtggctgtggtccagggaccccaggccctgattcctgtgcctggcgtctgtcctggccccgcctgtcagaagatgaacatgtatagtggctaacttaaggggagtgggtgaccctgacacttccaggcactgtgcccagggtttgggttttaaattattgactttgtacagtctgcttgtgggctctgaaagctggggtggggccagagcctgagcgtttaatttattcagtacctgtgtttgtgtgaatgcggtgtgtgcaggcatcgcagatgggggttctttcagttcaaaagtgagatgtctggagatcatatttttttatacaggtatttcaattaaaatgtttttgtacata

SEQ ID NO: 723520 - DNA, 271 bp, Homo sapiens
cacatttcccccattttattcattaatgttgccaaatggtttagggggccatggggggaaaaaagggtaggagtttcccccccatccccgtccccaggtcaggacatgctgggggcccctggagggaccctgggcccccgccccagggcaaaaaacgttttccagctgctgccccctggcttccgctgtttctcccctttttcccctttcctcctgcggttggggggaaaaacaggaggccgtttgaggaaccaggcctccacctgcccct

SEQ ID NO: 723521 - DNA, 268 bp, Homo sapiens
  misc_feature (26)..(26): n is a, c, g, or t
  misc_feature (194)..(195): n is a, c, g, or t
ggtctagaggatccctagcagtagtnggggatctcatctgtactatagagtcgtgcatccccatccatgctactactcccgttctgttcagtttagacatgaagcgcatcactcgcatgtacatgagggataaaatgaggagaaggaggttgggatggtgtctaggcagagtgacatcggcaacaagaatgatnnggggaggacacactccatccagtcagttccttccatgctgatcttagatggatgaggagaaacgtcgaatcga

SEQ ID NO: 723522 - DNA, 1939 bp, Homo sapiens
  misc_feature (9)..(10): n is a, c, g, or t
gagcgtgannggggagagcggaccgacgcgacacgccgtgcgcctccgcggctgcgctacgaaaacgagtcccggagcggccccgcgcccgccgcacccggccctcgcccgcccgaagacaggcgccaagctgccccgccgtctccccagctagcgcccggccgccgccgcctcgcgggccccgggcggaagggggcggggtcccgattcgccccgcccccgcggagggatacgcggcgccgcggcccaaaacccccgggcgaggcggccggggcgggtgaggcgctccgcctgctgcgcgtctacgcggtccccgcgggccttccgggcccactgcgccgcgcggaccgcctcgggctcggacggccggtgtccccggcgcgccgctcgcccggatcggccgcggcttcggcgcctggggctcggggctccggggaggccgtcgcccgcgatgctgctctccaagttcggctccctggcgcacctctgcgggcccggcggcgtggaccacctcccggtgaagatcctgcagccagccaaggcggacaaggagagcttcgagaaggcgtaccaggtgggcgccgtgctgggtagcggcggcttcggcacggtctacgcgggtagccgcatcgccgacgggctcccggtggctgtgaagcacgtggtgaaggagcgggtgaccgagtggggcagcctgggcggcgcgaccgtgcccctggaggtggtgctgctgcgcaaggtgggcgcggcgggcggcgcgcgcggcgtcatccgcctgctggactggttcgagcggcccgacggcttcctgctggtgctggagcggcccgagccggcgcaggacctcttcgactttatcacggagcgcggcgccctggacgagccgctggcgcgccgcttcttcgcgcaggtgctggccgccgtgcgccactgccacagctgcggggtcgtgcaccgcgacattaaggacgaaaatctgcttgtggacctgcgctccggagagctcaagctcatcgacttcggttcgggtgcgctgctcaaggacacggtctacaccgacttcgacggcacccgagtgtacagccccccggagtggatccgctaccaccgctaccacgggcgctcggccaccgtgtggtcgctgggcgtgcttctctacgatatggtgtgtggggacatccccttcgagcaggacgaggagatcctccgaggccgcctgctcttccggaggagggtctctccagagtgccagcagctgatccggtggtgcctgtccctgcggccctcagagcggccgtcgctggatcagattgcggcccatccctggatgctgggggctgacgggggcgccccggagagctgtgacctgcggctgtgcaccctcgaccctgatgacgtggccagcaccacgtccagcagcgagagcttgtgaggagctgcacctgactgggagctaggggaccacctgccttggccagacctgggacgcccccagaccctgactttttcctgcgtgggccgtctcctcctgcggaagcagtgacctctgacccctggtgaccttcgctttgagtgccttttgaacgctggtcccgcgggacttggttttctcaagctctgtctgtcgtctgtcctggccccgcctgtcagaagatgaacatgtatagtggctaacttaaggggagtgggtgaccctgacacttccaggcactgtgcccagggtttgggttttaaattattgactttgtacagtctgcttgtgggctctgaaagctggggtggggccagagcctgagcgtttaatttattcagtacctgtgtttgtgtgaatgcggtgtgtgcaggcatcgcagatgggggttctttcagttcaaaagtgagatgtctggagatcatatttttttatacaggtatttcaattaaaatgtttttgtacata

SEQ ID NO: 723523 - DNA, 193 bp, Homo sapiens
tactagaggatcccccccttccccccacagtgagaatccatctccaaaaaaaaaaaaaaaccccaaaagtgtgggaaacaataccagttgtgtccttatgatgagtttatttttaactcttctcacatttggatttaacggaattgcaggacaattgggaccattaaacccccttcatgtgtgtgggtgagaa

SEQ ID NO: 723524 - DNA, 772 bp, Homo sapiens
ggtcccttccaggcagttaatgcgctcctgaaacaccttgtttctgcagcttgatccttcccggtacttctcctcctcggggtccacgcgatggatgactagtgccaggtaccttgagcaaatggatgtcacacacgccagcattcacccggtcctggtcatattgattgaaagctgtagatcttcatgatggaggcggccactgggtcggtggagaagtgcaagagaatggcctccgttgatcgcaggcgtcccgcatggtccatgtcctccagggtcggccccagtgagcaggacaggtgaagtacactgccaggcactacgccaggtgggcagagccttcctctctgggctcagataccacgttggtccctggggcctcggggctcccgctgacggtggcgttcggcttgaagttccatttctcacctggtttcggatggtgtcctgcgatgtggggccccaggcccgggactgcttctgctccagccgggctagggcggcagcggctgccatctgtgcctcattggtgggtccctgacggggcggcctgggggctggctggttgggcttctctttgtgggccttttcccccacggactctttgagcttctgaccgggtcccgcgcttttgaacttgatgtcggccttgaactcctgaaagaatttcttcatggtggcggctggcccggcggcggggggccgcgggggcgggggggcacggggcccagtcggggacggggccgccggagaccagccaccggaagaaaat

SEQ ID NO: 723525 - DNA, 1579 bp, Homo sapiens
  misc_feature (23)..(23): n is a, c, g, or t
  misc_feature (35)..(35): n is a, c, g, or t
  misc_feature (171)..(171): n is a, c, g, or t
  misc_feature (185)..(185): n is a, c, g, or t
  misc_feature (272)..(272): n is a, c, g, or t
  misc_feature (278)..(278): n is a, c, g, or t
  misc_feature (351)..(351): n is a, c, g, or t
  misc_feature (355)..(355): n is a, c, g, or t
  misc_feature (368)..(368): n is a, c, g, or t
  misc_feature (374)..(374): n is a, c, g, or t
  misc_feature (611)..(611): n is a, c, g, or t
gggcgagtaagatggaagatgangaggtcgctganagctgggaagaggcggcagacagcggggaaatagacagacggttggaaaaaaaactgaagatcacacaaaaagagaggaaatccaaatctcctcccaaagtgcccattgtgattcaggacgatagccttcccgcgnggccccctccacanatccgcatctcaagaggcccaccagcaacggtgtggtcagcagccccaactccaccagcaggcccacccttccagtcaagtccctancacagngagaggccgagtacgccgaggcccggaagcggatcctgggcagcgccagccccgaggaggagcaggagaaacncatnctcgacaggccanccaggntctcccaacccgaagacagcaggcagcccaataatgtgatcagacagcctttgggtcctgatgggtctcaaggcttcaaacagcgcagataaatgcaggcaacgaaaagatgccgccgttgctgccgtcaccgcctcctgggtcgtccgccacgggttgcactgccgtggcagacagctggacttgagcagagggaacgacctgacttacttgcactggtgatcccccttgctccgncccactgtgaccttgaaccccatgcactgtgaacctcccccttctcccccttcccactgtgattggacatcggacaagggctgtccaagtcaatggaaagggaagggtgggggtcagcgcggacacggttggcgcgggaccccagccaacggcactcagcagagctcagcacagctgccacctcggcccactcggggctaaagccagtgccacgcaactaacacgctttatcactgctcacttaactccgggactttcacaaacacaaatgaaaactcacacccacccacccccaagctgcactgtctccatcacttaacaagtaacgttccactctcgaacaatatcctttcttctcaacccttccatatccacgccgcgcccactacccacctatctgcactggccaacgcaaacccgccgccctggccagcgcggccaacacggcccacccgcacctcccccactcccaccaaaggcgcagtcgcgcaccccaacctccaacacactgctcaccctgcagaaacatcaccctacgacaaccccttacacccaaccacggcacacggccacacctaacccaccccggatatcccctacacgccggccccacacaaccgcgcacacggcccctgcaacccccacaggaaccaaccaacaccccagcgcaactacccctccgccccgcgcgaccataacacacccccggccaatatggcccctgccccggcgaaaccggggcacaacctcagaacggcccggacaaaacctggaggacggcgctcacacccccaccccgagccacttgggggcactactacgcagcgccaaccggaggccctccaacaccacccaccgggcccccaccaccccgcaccacacccccccccaacccacccccgacctacagcacaaccacccccccgcacacaccggcgcaacacaccccaccagcaccccccgcaccg

SEQ ID NO: 723526 - DNA, 268 bp, Homo sapiens
  misc_feature (55)..(55): n is a, c, g, or t
  misc_feature (72)..(72): n is a, c, g, or t
cgatctccgaagccgcccaaggccccagatctctctccccggcggtccccgcccngcagggcctcaagcccntgggttcctcacgcaccccacggactctttgagcttctgaccgggtcccgcgcttttgaacttgatgtcggccttgaactcctgaaagaatttcttcatggtggcggctggcccggcggcggggggccgcgggggcgggggggcacggggcccagtcggggacggggccgccggagaccagccaccggaagaaaat

SEQ ID NO: 723527 - DNA, 1524 bp, Homo sapiens
  misc_feature (23)..(23): n is a, c, g, or t
  misc_feature (35)..(35): n is a, c, g, or t
  misc_feature (116)..(116): n is a, c, g, or t
  misc_feature (130)..(130): n is a, c, g, or t
  misc_feature (217)..(217): n is a, c, g, or t
  misc_feature (223)..(223): n is a, c, g, or t
  misc_feature (296)..(296): n is a, c, g, or t
  misc_feature (300)..(300): n is a, c, g, or t
  misc_feature (313)..(313): n is a, c, g, or t
  misc_feature (319)..(319): n is a, c, g, or t
  misc_feature (556)..(556): n is a, c, g, or t
gggcgagtaagatggaagatgangaggtcgctganagctgggaagaggcggcagacagcggggaaattctcctcccaaagtgcccattgtgattcaggacgatagccttcccgcgnggccccctccacanatccgcatctcaagaggcccaccagcaacggtgtggtcagcagccccaactccaccagcaggcccacccttccagtcaagtccctancacagngagaggccgagtacgccgaggcccggaagcggatcctgggcagcgccagccccgaggaggagcaggagaaacncatnctcgacaggccanccaggntctcccaacccgaagacagcaggcagcccaataatgtgatcagacagcctttgggtcctgatgggtctcaaggcttcaaacagcgcagataaatgcaggcaacgaaaagatgccgccgttgctgccgtcaccgcctcctgggtcgtccgccacgggttgcactgccgtggcagacagctggacttgagcagagggaacgacctgacttacttgcactggtgatcccccttgctccgncccactgtgaccttgaaccccatgcactgtgaacctcccccttctcccccttcccactgtgattggacatcggacaagggctgtccaagtcaatggaaagggaagggtgggggtcagcgcggacacggttggcgcgggaccccagccaacggcactcagcagagctcagcacagctgccacctcggcccactcggggctaaagccagtgccacgcaactaacacgctttatcactgctcacttaactccgggactttcacaaacacaaatgaaaactcacacccacccacccccaagctgcactgtctccatcacttaacaagtaacgttccactctcgaacaatatcctttcttctcaacccttccatatccacgccgcgcccactacccacctatctgcactggccaacgcaaacccgccgccctggccagcgcggccaacacggcccacccgcacctcccccactcccaccaaaggcgcagtcgcgcaccccaacctccaacacactgctcaccctgcagaaacatcaccctacgacaaccccttacacccaaccacggcacacggccacacctaacccaccccggatatcccctacacgccggccccacacaaccgcgcacacggcccctgcaacccccacaggaaccaaccaacaccccagcgcaactacccctccgccccgcgcgaccataacacacccccggccaatatggcccctgccccggcgaaaccggggcacaacctcagaacggcccggacaaaacctggaggacggcgctcacacccccaccccgagccacttgggggcactactacgcagcgccaaccggaggccctccaacaccacccaccgggcccccaccaccccgcaccacacccccccccaacccacccccgacctacagcacaaccacccccccgcacacaccggcgcaacacaccccaccagcaccccccgcaccg

SEQ ID NO: 723528 - DNA, 1115 bp, Homo sapiens
  misc_feature (586)..(587): n is a, c, g, or t
tgatacgtctgttgcgcctcttacacctcttgttgttccattggtctgttaagccttgcggagacctatgtgtgtctcctatcgtttgacctctgaaatttcttccaattgctggagcccttccttatggctccagtgctagacctccttattgtaagcaagatctgaagtgtgagttaaaagctacattgagagttgttgcttgaaccattataagaattgcatgcaaaagacatagagaacagccatgaaaaagtgaggaatcaccccaatgtgggctctttttctttctttaggctctgttgctgtccaatagagagcatctaatatgtcttgtccaaaagatgaaaacagacgatcagctacctccagcatgttgtagatgatgtagagcttgatgacggactgcccccttatcaggtggtacatcatggagtagtcaacatagtgcatcataaaatagcagattaccaaaatgacacccttcaaaatgtcacacacctgggcaggctgaagcaaacgtctgtcccacaaggagtccctgtgccaccacattccattctataaaggaagtgaaagtgctccnnccttcggtcttaagccatagcaaggcaaagtgaggagcctgaatagtgccaggaaaactcttaaaggaagcagggtgaacacatacaaaaacgcatccaggcacagaaagattccaaaaaccatcagcttttccaattctcttggtattcgcaaacaagtgtatactctttctcttctttctgtatacttggcctcattatgttcaaggaagtaccctcttgttagttcagcactgaggaacctcaacaatgaaagctctgtgcggccccggcgcctctcccgccgccggtcgctctcgtagaagcccagcgtctctgtgagctgaggcgccggcgggggcccctgtccgccgctgccgcccggctgctccgcctcgccgcggccgtcccgctgcgggccgtccacgccgccaccgccgccttctcccggagcggccgcgtcgccgacgcccgccatgttccgagcacaacaaactgtccccgccgcctccctccagcctctgcctccgccggccccctccccccgct

SEQ ID NO: 723529 - DNA, 1434 bp, Homo sapiens
ccccgagatggagtctcgctgtgttacccaggctgggtgcagtgggacgatttcagctcactacaacctccacctccagggttcatgtgattctcctacctcagcctcccaagtagctgggattacaggcacgcgccaccaggcacggctaatttttgtatttttagtagagacggggtttcaccatgttggccagtctggtcttggactcctgacctcaggtcatccgccctgcctcagcctccccaagtgctgggattacaggtgtgagccacgtgccggcctgcaatttgaatttcaaagtttattatataacttagggtagcttactatttaaaaaacttgtgaatatctggcttataaagcgaagcatttttttgtaaagtgaatgtatatcagccaacttatttttatataaatgcagattttcatatgctgaatgctttgaagtgagacatattgtactaaaaacattacttacaaaaattgggaacttatatttatttaccctatgtaaagatctgaatttaaatgtgcacttaaaatgtgtatttcttacagcaaacatatacataatcataacatttacttcataatttaaagttctagcatgggtttctaaatgaagttgtgaaactaatttccctagcacttgacaattttggatactcaagggggtactggttctaaaatgtctgggcagcaagaatcttcccagcctacatgaggacatgccatgcctgcaggcttgacccagaggtgtgtcccagaccagcagcatgagccccaccgccctggaaatgcagattctccagacccagcctagatctcctaaatcagaatccatgtttaagaagagcccccaagtgatgacagcacagtaaaggccagaagcaccataactagagtcggtagagcattcttgactctcaggtaccttcagaactgaagacttgaagctgagtgccctgccaggcctgtgcggggtaagcaaggcccttacctccagcatgttgtagatgatgtagagcttgatgacggactgcccccttatcaggtggtacatcatggagtagtcaacatagtgcatcataaaatagcagattaccaaaatgacacccttcaaaatgtcacacacctgggcaggctgaagcaaacgtctgtccgtgcggccccggcgcctctcccgccgccggtcgctctcgtagaagcccagcgtctctgtgagctgaggcgccggcgggggcccctgtccgccgctgccgcccggctgctccgcctcgccgcggccgtcccgctgcgggccgtccacgccgccaccgccgccttctcccggagcggccgcgtcgccgacgcccgccatgttccgagcacaacaaactgtccccgccgcctccctccagcctctgcctccgccggccccctccccccgct

SEQ ID NO: 723530 - DNA, 100 bp, Homo sapiens
tttcaatcacggtcaaggcatccagtctttcatggagggcaaactaagggtgtaaattaggatcctcactgaactggcgggaccctaagaggctttgctt

SEQ ID NO: 723531 - DNA, 1049 bp, Homo sapiens
tgatacgtctgttgcgcctcttacacctcttgttgttccattggtctgttaagccttgcggagacctatgtgtgtctcctatcgtttgacctctgaaatttcttccaattgctggagcccttccttatggctccagtgctagacctccttattgtaagcaagatctgaagtgtgagttaaaagctacattgagagttgttgcttgaaccattataagaattgcatgcaaaagacatagagaacagccatgaaaaagtgaggaatcaccccaatgtgggctctttttctttctttaggctctgttgctgtccaatagagagcatctaatatgtcttgtccaaaagatgaaaacagacgatcagctacctccagcatgttgtagatgatgtagagcttgatgacggactgcccccttatcaggtggtacatcatggagtagtcaacatagtgcatcataaaatagcagattaccaaaatgacacccttcaaaatgtcacacacctgggcaggctgaagcaaacgtctgtcccttaagccatagcaaggcaaagtgaggagcctgaatagtgccaggaaaactcttaaaggaagcagggtgaacacatacaaaaacgcatccaggcacagaaagattccaaaaaccatcagcttttccaattctcttggtattcgcaaacaagtgtatactctttctcttctttctgtatacttggcctcattatgttcaaggaagtaccctcttgttagttcagcactgaggaacctcaacaatgaaagctctgtgcggccccggcgcctctcccgccgccggtcgctctcgtagaagcccagcgtctctgtgagctgaggcgccggcgggggcccctgtccgccgctgccgcccggctgctccgcctcgccgcggccgtcccgctgcgggccgtccacgccgccaccgccgccttctcccggagcggccgcgtcgccgacgcccgccatgttccgagcacaacaaactgtccccgccgcctccctccagcctctgcctccgccggccccctccccccgct

SEQ ID NO: 723532 - DNA, 939 bp, Homo sapiens
  misc_feature (267)..(267): n is a, c, g, or t
  misc_feature (289)..(289): n is a, c, g, or t
  misc_feature (291)..(291): n is a, c, g, or t
  misc_feature (305)..(305): n is a, c, g, or t
  misc_feature (924)..(924): n is a, c, g, or t
  misc_feature (928)..(928): n is a, c, g, or t
aagtatggttgagaatttttaagtggttaattgaaaaagaccaaacaagaccgtctgtaattttccaaaaatatagactgcttcaaatagaacctacgtccagttctgggaatcagcaaatcaattagaatcgcatctgatcaactttatgccccttaagtagttttaaaatttcagtactcaagtacaatcaatgatgtaatcagcctcacaacttagttatttgcatgaacttcaggaaataacggctaacacagcccttttggncaacagaagtaattttttagtngnaagaaatttaatgnagttatggttcagttgctgtttacagcttgagaattaaaacgttgggttcactctatattcaagaagacatccatctcaaaaccttttttcatttaaaactaatctgtaactgcaatatgaatacaaatgcaagttttaaaaattcttttaaaatgagaataaaaacctacagcttatagaaactgtaacattgtaacaatacgtttaaaactggtcattgaatgtaggattcataagtacacattttctcatctagtaatttttttggcataagtttcagttcaggaaaagttcagatgcaacattttatggagtgttaaatatttctgtactgggcaaaactactgaacttcatggtcactaccacaccgtcagctgtctgtgaaaaatctacttgcagggcaagttaacaggtttctatggctcaagtttgcttaaaatacagaacaaaaaaagtcaccttggcatgaatataattaagaaatcagccgtgtgcttctcacgtttgggctccgagacgtgggagatgcccgctaacctaagaccttccgagggcgatgcaaggacccggacagaactttcccggccgcagaccccttctagggcacacctggcctncgcngccgcaagctt

SEQ ID NO: 723533 - DNA, 1649 bp, Homo sapiens
  misc_feature (1067)..(1067): n is a, c, g, or t
  misc_feature (1101)..(1101): n is a, c, g, or t
  misc_feature (1109)..(1109): n is a, c, g, or t
  misc_feature (1169)..(1169): n is a, c, g, or t
  misc_feature (1183)..(1183): n is a, c, g, or t
  misc_feature (1375)..(1375): n is a, c, g, or t
ttcgtgtgtgggttggctcgtcccgaccagagcccaccccactggtgggtgttgtcgagtaggctgctccattatatttccccgcgggggttggaagaagatgtggtgtttaactacaagcgacgagaacagacgttccccacacggttgttgtccctcggggaaagaagtggtgtcccctctccccccctcgaatggtgtgtgactcgcaaagatggctcctgtttttttggtgcttgtgggtggggtgtctccccccttgtgggagcgttgtgcttctgtttggcccacaacaggttgctactataagtgtgtacaacgccaccacacggcgcgtcttttggtggtgtgaaaaagggtggggttactcatcggggcctgtattaccccaccgtggtgccccgcagcgccccagaagtgtggttcacacctgttggtgccacaactctcaacacttggtagcaccggggacctccacggaagatgtccttctgttctttgggggagaaacaccacgaggagaaatttggtgtgtggtctaagcacacaaaaacggggtgaatatttcccccgcctcccctcctccgcaccacaactgttgagaacacggcgtctttgtggtgctcctctggttcgtgggataatatatctctccgctggttttccgcgggagtatttcttcccccctggggcccccccacaacaacaaccccaccggggggcgcttatatgtgaaacagccacaccagcggtgatagcaacacggggtaatgccccccaccatcgtagaagagcgctcggggagaaaattatggggggctcctcacagcttattagtgtgcgttgagaggggtttgtgcggtgcgcggttttttgtttgccccacacacggtgttctgcggcgtttctcgtgagcacccctctgctgcagtagggtgctctgctcccacactctctacacacacacaacggtttgttgtgtagagagtcctgcgtggggcgcgcgtgggcgcggtctttaaaagctgtagagagatttgtcgctgagagagaccacaacagagacncccacggtatattttctctctcaccacactgggnctctatanttagagaaagagacacaacacaggtgtgcgctgtgtgatatctactatatagtcgcgggngtgtatataagggnagatatatattctcttagagatatacacactgtggagactccccagaccacagagagttcacacacaagagtgtgtgtgagagaagtatcgtctgtgtctctgtgtgtctctctcaaagtgtctgcgtctcagacgccagaccacccgacagaccctttgtgtgtgtgcgccacactactacacagagggcntgtgagtgtggaaagagatattcccaggacaccaataccagagatagccaaagagctgtgaaagagagagatatgtacaccaaatatttcttgggctgggatattggaagacttaaacatcctcgtgggatatccacacataccaaataacccagttccaattgttgtccttgtttttgataaattagattcccaattgtaaaagggttacatttcataactcccttaagtaccagaaatccaccatgaaaaataaaggttcccataaagccgt

SEQ ID NO: 723534 - DNA, 441 bp, Homo sapiens
tcagctcggtccctcttatgcaagtgtcaatataatgcagtccagtatcactggacttaggacttcaacaggacatttctggaaaacaacaaaggcacctgacaaaatatgagcagagaacacaggataagaaagtatgagagccccagatagattattctttcttgaggtttggaggtataccaagaggagatgagcatatgattcaaaggaagaacagattacagacaagctttgcttaaaatagggtaatttgatatgtttctaagttgtgagaagatgctagtaactgatttttaaccactgacacatgttccatagtcaagataattccaaagcaatcttaaagtttacgccatttgaactttcaccttgggaatatggtgcttgaggtggcaatgtataacaaatatttgctagaaaaggaagtccttagaagtc

SEQ ID NO: 723535 - DNA, 959 bp, Homo sapiens
tgatacgtctgttgcgcctcttacacctcttgttgttccattggtctgttaagccttgcggagacctatgtgtgtctcctatcgtttgacctctgaaatttcttccaattgctggagcccttccttatggctccagtgctagacctccttattgtaagcaagatctgaagtgtgagttaaaagctacattgagagttgttgcttgaaccattataagaattgcatgcaaaagacatagagaacagccatgaaaaagtgaggaatcaccccaatgtgggctctttttctttctttaggctctgttgctgtccaatagagagcatctaatatgtcttgtccaaaagatgaaaacagacgatcagctacctccagcatgttgtagatgatgtagagcttgatgacggactgcccccttatcaggtggtacatcatggagtagtcaacatagtgcatcataaaatagcagattaccaaaatgacacccttcaaaatgtcacacacctgggcaggctgaagcaaacgtctgtcccttaagccatagcaaggcaaagtgaggagcctgaatagtgccaggaaaactcttaaaggaagcagggtgaacacatacaaaaacgcatccaggcacagaaagattccaaaaaccatcagcttttccaattctcttggtattcgcaaacaagtgtatactctttctcttctttctgtatacttggcctcattatgttcaaggaagtaccctcttgttagttcagcactgaggaacctcaacaatgaaagctctagttattacgcgaagtgcaacctcaaccggatcagaaaaacctccctttccttggatctttccattcacccgtgtttttcctctgttcctcttagtgaactctgaattttgaaccccagaggccacttcaccacactctccggacagcagcttacctgtccctccatgtcacctaaac

SEQ ID NO: 723536 - DNA, 144 bp, Homo sapiens
  misc_feature (140)..(140): n is a, c, g, or t
ctgattatagttgcagttcaatgttgtgctgtgatgggacatttctgttgacccagtctggcaaagtgctggcctgtggactctatgagattcaatacagctggcgtctgacatcagtagcatgtacgggcaattatcanacca

SEQ ID NO: 723537 - DNA, 954 bp, Homo sapiens
  misc_feature (939)..(939): n is a, c, g, or t
  misc_feature (943)..(943): n is a, c, g, or t
tgatacgtctgttgcgcctcttacacctcttgttgttccattggtctgttaagccttgcggagacctatgtgtgtctcctatcgtttgacctctgaaatttcttccaattgctggagcccttccttatggctccagtgctagacctccttattgtaagcaagatctgaagtgtgagttaaaagctacattgagagttgttgcttgaaccattataagaattgcatgcaaaagacatagagaacagccatgaaaaagtgaggaatcaccccaatgtgggctctttttctttctttaggctctgttgctgtccaatagagagcatctaatatgtcttgtccaaaagatgaaaacagacgatcagctacctccagcatgttgtagatgatgtagagcttgatgacggactgcccccttatcaggtggtacatcatggagtagtcaacatagtgcatcataaaatagcagattaccaaaatgacacccttcaaaatgtcacacacctgggcaggctgaagcaaacgtctgtcccttaagccatagcaaggcaaagtgaggagcctgaatagtgccaggaaaactcttaaaggaagcagggtgaacacatacaaaaacgcatccaggcacagaaagattccaaaaaccatcagcttttccaattctcttggtattcgcaaacaagtgtatactctttctcttctttctgtatacttggcctcattatgttcaaggaagtaccctcttgttagttcagcactgaggaacctcaacaatgaaagctctcttggcatgaatataattaagaaatcagccgtgtgcttctcacgtttgggctccgagacgtgggagatgcccgctaacctaagaccttccgagggcgatgcaaggacccggacagaactttcccggccgcagaccccttctagggcacacctggcctncgcngccgcaagctt

SEQ ID NO: 723538 - DNA, 549 bp, Homo sapiens
gactcttagttacgacccaattacagctgctatacagatacggattttatccttcaccatgacagtattgcgacaaagcgaatgatcactcaaacttctattacaccctatattgtatttcctgtatctgcctaccaggtgcaaggtccttcgtggatgcaagctcaacatatattctacagcatcctggttgccgtgtaaacatccctcaatggagcactaccattgtcactactagcccgcatctaatgagtcagccctgctgtgtcctagacaggatgtagtcgatctgtccactaggcagcaccgagagcatatcatgcctggaacgtcaggtaatgcagagggagcctatcttgccaacagtgatgtccctatatgcggaccgacagcggttcctgttgaggaggcaagtggtcaacagcaggtggctggtctgagacgtctaagtgaccattctccatatacctttcaacctaataagtaacgtgtgagatgtaccagaaaggtgttcttacatgagagaagggtgtgacaggctgaccaatc

SEQ ID NO: 723539 - DNA, 375 bp, Homo sapiens
  misc_feature (30)..(30): n is a, c, g, or t
  misc_feature (36)..(36): n is a, c, g, or t
  misc_feature (81)..(81): n is a, c, g, or t
  misc_feature (108)..(108): n is a, c, g, or t
  misc_feature (190)..(191): n is a, c, g, or t
  misc_feature (290)..(290): n is a, c, g, or t
tagggccggtgctgcctgcggaaccggcgnttgagnaggcagcgaacatcatctttgccagtacaggagctcgtgccgtgnccacagcccacagcccacagccatggntgggaccatgacggtgaagatgctggcgggcaacgaattccaggtgtcctgagcagctccatgtcggtgtcagagctgaagnncagatcacccagaagatcggcgtgcaccattccagcagcgtctggctgtccacccgagcggtgtggcgctgcaggacagggtccccttgccagccaggnctgggcccggcaagcacggtcctgctggtggtggacaaatgcgacgaacctcttgaacatcctggtgaggaataacaaagggccg

SEQ ID NO: 723540 - DNA, 136 bp, Homo sapiens
tttaggatgccttcgagtcggcgaagtcagaaagagcatgaaacaaaaacccaagaaagcatctcagactgcaccgaggaaggcgtccgggtcgagacgtgtgccctcgctctggcaaaagagacagacctgaagg

SEQ ID NO: 723541 - DNA, 895 bp, Homo sapiens
ggggtcatggtgtgcttccgcctcttcccggttccgggctcagggctcgtcctggtctgcctagatcctgggagctgtgcggtcttatgcatggaacttaatttgacagattcagaagaatgccacttgcctttatgttaaaacatggcagatgagttctcacagtgcgctatgaaaactacaaaatgaaaaacttataaaagctgtaaccatttcagcaccacggacactgtgacatatgaatggaagcatgttgtggggatgatcgagaatggctcccaagagatagtgcagtgcagttcgagacctggcttttcctggatcggcgaattttaccgaaggcagccagtctacttgattcaatgacagcgtctcatttgtgcctacaacactggtgatagcacaacatttcctgatgctgaagataaaggaattcttactgtgatgaatcttttgtgccatcagaattccattgatatgaccttgttagatgcaatagtgtatcaacttcggaaccgactgatgttgtccagcactactgggatgttcttgtaccacgcgttttgtccaaggatggacgggaggccaaatgagttcctgtgtggattaagacgcaacttccagggtggccccacataataccagtgtgcgatttctagtaaaaaagtaatccaaggaagcggagtggtactagtccgtactaatggaggccctgctgcgggtacacggggcggcgacactcgccacggagagggggtcgtaacacaaaggcccaaaacgctcccgggagggcgctcacaggcattagaccagggccaagtataatgtcctgggagacagcccatctcggagaaaattgtgggggaaacaaagccgcaataaagaggtcccaccg

SEQ ID NO: 723542 - DNA, 777 bp, Homo sapiens
gagcgcgtggggccaagaaagaatacctcctctgaaaaatggcagaagcagttttccatgccccacaaagaggaaaagaagagtgtatgagacttacgagtctccattgccaatcccttttggtcaggaccatggtcctctgacaacgacacttcaagactacttccgctgctgaaacatgacttaaccaaccaactgtgacttgtgacggaactgcggacggaccacttgagcacgctctactgggcacacacggttattctggacaccaggtacttctttcacgaagccgtcccacgcttcacaacctttcacgattcctaaaactggtttgctaacatggaaagactactgacacgacaacacacttgcctactcaatacaccacttcaacacgaggtattcacgcactacgtcgttcgacgtcgggcaagacacgacggctgactgcgtaagaccacgggcgccagagactgaagacgttaccacgtggcggcaggaacttcccctccacaaacggacttctaagccacgcggacaaaccccggctttgtaacactcattccttcccctctgatgacaccacgcgacacctgcacccgaagcggggtcacacaaatgcatcattgcagcaaccacccctacacgcactacgctcgttgaccacatgcgtgtgctcctaccacaaacctgggtgcgaccacggcggcacatccagtgtaacgctgcagagcgaacgaacagcaacgcacccttacctgacgagtgcagtctggc

SEQ ID NO: 723543 - DNA, 289 bp, Homo sapiens
ttcggacccctatcccgatacggttgtataggattgcttgcaattgctgctgtgttggcatctgctctggccgtatcatctaactgatgagcaccgaaggatatatttcctacgccctctcagccgatgaacatgcttggaataggttgttagcggtaactaagattagctatggtacttcggaagataagttgatcttactaactacctgatttatgtccgcgtgtctgcagttttatgtttcacagctcaaaattctaattatgtgcaccatgtatacgatacaatg

SEQ ID NO: 723544 - DNA, 116 bp, Homo sapiens
agcggggaacaatcactttggctaggactagcaaaagtgaacaaataggattacatgaagtgaaaaagcttatgtacagcaaaggaaacaatcaacaaagtgattgttccccgctt

SEQ ID NO: 723545 - DNA, 183 bp, Homo sapiens
tgcagcactggtagcaggatcgtcctagccagctggctccatatggtacgaggatgttaggagttgacgctacagaacattcaggtattgtaagtcctcttcagtacagcagcctttcttgtcatctgatggacatctgtttaaatggagcttgtcagttaacataagctaattggatggttg

SEQ ID NO: 723546 - DNA, 127 bp, Homo sapiens
atttgtatggaatatctgttcctgcttcttctactttcaatccatatgtgtctttaccacctgagaagagtttcttgtaggcagcttatagttgggatcatgatatttgcatcattcagcccgtctg

SEQ ID NO: 723547 - DNA, 223 bp, Homo sapiens
aaaaatttggggggctctcccccgggaactctacaaaacattttttgtcacaaagaccatacttcaaacctccctgttcttatgaattggaacagcatacccccgattcggctaggaccaactcatacacctcctatgaaaaaacttcctaccactcaccctagcattacttatatgatatgtctccatacccattacaatctcaagcattccccctcaaacc

SEQ ID NO: 723548 - DNA, 740 bp, Homo sapiens
  misc_feature (177)..(177): n is a, c, g, or t
  misc_feature (206)..(206): n is a, c, g, or t
  misc_feature (209)..(209): n is a, c, g, or t
  misc_feature (236)..(236): n is a, c, g, or t
  misc_feature (311)..(311): n is a, c, g, or t
  misc_feature (351)..(351): n is a, c, g, or t
  misc_feature (353)..(353): n is a, c, g, or t
  misc_feature (368)..(368): n is a, c, g, or t
  misc_feature (383)..(383): n is a, c, g, or t
  misc_feature (406)..(406): n is a, c, g, or t
  misc_feature (436)..(436): n is a, c, g, or t
  misc_feature (440)..(440): n is a, c, g, or t
  misc_feature (469)..(469): n is a, c, g, or t
  misc_feature (480)..(480): n is a, c, g, or t
  misc_feature (496)..(496): n is a, c, g, or t
  misc_feature (648)..(648): n is a, c, g, or t
atatagtaggctctgtatcgtgatggtaaagtaaaatacatgtgtaaattggtgtcaatactacctgtcagttttagtatccaaatagtgcaagccttataaaaaccattaaggtaacttacagagcatacacaaagaatagtttatgtatagaaaatagtctgttctttccatttngagagaaccaactaaagccatttagactnggngtcttttactggggtaaacctcttttntgtaaaaattcatggtttgaacatttaattttcctaaaaaattttatatttcatctgttttcacatttactaatngaaaacacttttgatcaagttgatttattatttaaatgtntngaatggttcgggtgntttttcattacattntgtgtccattaacttgtgttttnatcttaaatctctcctactttctttgtatnattnagtcttgagctaaaaatctggcttttgtnagcgtatattnaatgatgtttaatgantgcatctagggctatgggtttactttgagttctgtctgattacattatttcgaattttgggatatctgtgttttttttaattcagggattgagatacaactttctaaatctgtatcgttaatttctaatgtatttatttcgagatgttaganaatgtggcccttttttcaaggcagctggaacgggtggctgaaatgaagccagggaccgttgggacaggccccaattgtaaaggacctttggg

SEQ ID NO: 723549 - DNA, 825 bp, Homo sapiens
  misc_feature (49)..(49): n is a, c, g, or t
  misc_feature (77)..(77): n is a, c, g, or t
  misc_feature (83)..(83): n is a, c, g, or t
  misc_feature (100)..(101): n is a, c, g, or t
  misc_feature (174)..(174): n is a, c, g, or t
  misc_feature (179)..(179): n is a, c, g, or t
  misc_feature (202)..(202): n is a, c, g, or t
  misc_feature (210)..(210): n is a, c, g, or t
  misc_feature (212)..(212): n is a, c, g, or t
  misc_feature (219)..(220): n is a, c, g, or t
  misc_feature (240)..(240): n is a, c, g, or t
  misc_feature (248)..(248): n is a, c, g, or t
  misc_feature (267)..(267): n is a, c, g, or t
  misc_feature (284)..(284): n is a, c, g, or t
  misc_feature (298)..(300): n is a, c, g, or t
  misc_feature (314)..(315): n is a, c, g, or t
  misc_feature (318)..(318): n is a, c, g, or t
  misc_feature (320)..(320): n is a, c, g, or t
  misc_feature (332)..(333): n is a, c, g, or t
  misc_feature (335)..(335): n is a, c, g, or t
  misc_feature (348)..(348): n is a, c, g, or t
  misc_feature (354)..(354): n is a, c, g, or t
  misc_feature (381)..(381): n is a, c, g, or t
  misc_feature (394)..(394): n is a, c, g, or t
  misc_feature (397)..(397): n is a, c, g, or t
  misc_feature (432)..(432): n is a, c, g, or t
  misc_feature (461)..(461): n is a, c, g, or t
  misc_feature (467)..(467): n is a, c, g, or t
  misc_feature (515)..(516): n is a, c, g, or t
  misc_feature (532)..(533): n is a, c, g, or t
  misc_feature (819)..(819): n is a, c, g, or t
agaaatgatgaaaaaataagtgaagggtgttgaagatggattaaatganaagtgtttaatggaatgggaaagaagantgtggnataaggaggtggaaggnntgttgagtgatcattgatgatggggaaaaaataattatggtgttaaaaaagcttaaggaataattggtatttnttatnaaagtattttttatggtgtagtntggggaananaaatttnnaaaatttgataatttttggnattggttngtgtagagaagggaaaaanggtgagggaaagggagncagaagaggaggannnaaaagaacggagtnnaantnttgggaaaggannanagggatgggagtnatgttngaatgcatttgcaaaaaaaggggattnttggtgaggggtncanataggaaaagagtaatgattgagttcactggtggntgcatgggttgtataatgaagggagttgncaaagnaatgggttgaactgtggccaggtagagaatggaaagatcatcaaggtnntgagagagtttcaatnnggtgagcatgcgcttaagtgttagaactgctaagggagagaggttgccatggaaatctggccaaacatgttaatcaacagttaggaaacccacaggctgagccttcttaatcagatccaggtgactgttcaaatatgcatatatactctggcatctggctgtggcctttacttgtagttctggaaaagcagcatggccttgtaccacgtggtctatcaattttccagttacgctctgaccaccttcattcagccagaacccaggtaccatggctgagaaataaggncccaga

SEQ ID NO: 723550 - DNA, 173 bp, Homo sapiens
agcagaagtcacgaccaaactcatagagggatgtcatcaacaccttgaacactttgtgtaccagagtagtgtaatgtctcaaaggtctctgacatgcccattagcaaatagatagctagccggtcctctccttgacgcaggctataatccagagagcctcctgacacatggtc

SEQ ID NO: 723551 - DNA, 1200 bp, Homo sapiens
  misc_feature (537)..(537): n is a, c, g, or t
  misc_feature (545)..(545): n is a, c, g, or t
  misc_feature (548)..(548): n is a, c, g, or t
  misc_feature (553)..(553): n is a, c, g, or t
  misc_feature (555)..(555): n is a, c, g, or t
  misc_feature (566)..(566): n is a, c, g, or t
  misc_feature (596)..(596): n is a, c, g, or t
  misc_feature (624)..(624): n is a, c, g, or t
gaggtcagtctcgctatattgcccaggctggtcttgaatgcctgggctcaagcaatcctcccaccttggccacctgaatagctgggactacaggcatgtgccactatgcccagctaattttttgtatttttagtagagatgaggcaatatttttaatatagctaatgcatgatgttaaaaactttgcatatggaaaagatgcattcaaaatagaagacagatcaatgaattttagtgtagtcattttaagtttagtgacatagtttcagtttccacattgcaactatacactgtggagttttagcatagtatctaagaatgaatatccacagttctgaacaggttattttagcactcttttccagcaatatatctctgagaggccatactttcttcacgtatgtcaaacaaataacatattgcaacataattgttcttcagacttgttttttagcagcagacacatttccaaatgtaatcttactctgaatctgagcttcattatacaatacagacaaaagtgagcttttccagttnaagtaggngtntgatntnaaacacacccntggccccaacaaaacaaataaaactcccantcttattttaagagcttgttgaagaganttattaagtaacgccgcccttcctttcggccggaaccgccatcttccagtaattcgccaaaatgacgaacacaaagggaaagaggagaggcacccgatatatgttctctaggccttttagaaaacatggagttgttcctttggccacatatatgcgaatctataagaaaggtgatattgtagacatcaagggaatgggtactgttcaaaaaggaatgccccacaagtgttaccatggcaaaactggaagagtctacaatgttacccagcatgctgttggcattgttgtaaacaaacaagttaagggcaagattcttgccaagagaattaatgtgcgtattgagcacattaagcactctaagagccgagatagcttcctgaaacgtgtgaaggaaaatgatcagaaaaagaaagaagccaaagagaaaggtacctgggttcaactaaagcgccagcctgctccacccagagaagcacactttgtgagaaccaatgggaaggagcctgagctgctggaacctattccctatgaattcatggcataataggtgttaaaaaaaaaaataaaggacctctg

SEQ ID NO: 723552 - DNA, 2358 bp, Homo sapiens
  misc_feature (9)..(10): n is a, c, g, or t
  misc_feature (1286)..(1286): n is a, c, g, or t
gagcgtgannggggagagcggaccgacgcgacacgccgtgcgcctccgcggctgcgctacgaaaacgagtcccggagcggccccgcgcccgccgcacccggccctcgcccgcccgaagacaggcgccaagctgccccgccgtctccccagctagcgcccggccgccgccgcctcgcgggccccgggcggaagggggcggggtcccgattcgccccgcccccgcggagggatacgcggcgccgcggcccaaaacccccgggcgaggcggccggggcgggtgaggcgctccgcctgctgcgcgtctacgcggtccccgcgggccttccgggcccactgcgccgcgcggaccgcctcgggctcggacggccggtgtccccggcgcgccgctcgcccggatcggccgcggcttcggcgcctggggctcggggctccggggaggccgtcgcccgcgatgctgctctccaagttcggctccctggcgcacctctgcgggcccggcggcgtggaccacctcccggtgaagatcctgcagccagccaaggcggacaaggagagcttcgagaaggcgtaccaggtgggcgccgtgctgggtagcggcggcttcggcacggtctacgcgggtagccgcatcgccgacgggctcccggtggctgtgaagcacgtggtgaaggagcgggtgaccgagtggggcagcctgggcggcgcgaccgtgcccctggaggtggtgctgctgcgcaaggtgggcgcggcgggcggcgcgcgcggcgtcatccgcctgctggactggttcgagcggcccgacggcttcctgctggtgctggagcggcccgagccggcgcaggacctcttcgactttatcacggagcgcggcgccctggacgagccgctggcgcgccgcttcttcgcgcaggtgctggccgccgtgcgccactgccacagctgcggggtcgtgcaccgcgacattaaggacgaaaatctgcttgtggacctgcgctccggagagctcaagctcatcgacttcggttcgggtgcgctgctcaaggacacggtctacaccgacttcgacggcacccgagtgtacagccccccggagtggatccgctaccaccgctaccacgggcgctcggccaccgtgtggtcgctgggcgtgcttctctacgatatggtgtgtggggacatccccttcgagcaggacgaggagatcctccgaggccgcctgctcttccggaggagggtctctccaggtgcgtggtggctcgaggcgggggtgggggcctcgccctgcntgggccctccctgacctctccgctccgcacagagtgccagcagctgatccggtggtgcctgtccctgcggccctcagagcggccgtcgctggatcagattgcggcccatccctggatgctgggggctgacgggggcgccccggagagctgtgacctgcggctgtgcaccctcgaccctgatgacgtggccagcaccacgtccagcagcgagagcttgtgaggagctgcacctgactgggagctaggggaccacctgccttggccagacctgggacgcccccagaccctgactttttcctgcgtgggccgtctcctcctgcggaagcagtgacctctgacccctggtgaccttcgctttgagtgccttttgaacgctggtcccgcgggacttggttttctcaagctctgtctgtccaaagacgctccggtcgaggtcccgcctgccctgggtggatacttgaaccccagacgcccctctgtgctgctgtgtccggaggcggccttcccatctgcctgcccacccggagctctttccgccggcgcagggtcccaagcccacctcccgccctcagtcctgcggtgtgcgtctgggcacgtcctgcacacacaatgcaagtcctggcctccgcgcccgcccgcccacgcgagccgtacccgccgccaactctgttatttatggtgtgaccccctggaggtgccctcggcccaccggggctatttattgtttaatttatttgttgaggttatttcctctgagcagtctgtcctggccccgcctgtcagaagatgaacatgtatagtggctaacttaaggggagtgggtgaccctgacacttccaggcactgtgcccagggtttgggttttaaattattgactttgtacagtctgcttgtgggctctgaaagctggggtggggccagagcctgagcgtttaatttattcagtacctgtgtttgtgtgaatgcggtgtgtgcaggcatcgcagatgggggttctttcagttcaaaagtgagatgtctggagatcatatttttttatacaggtatttcaattaaaatgtttttgtacata

SEQ ID NO: 723553 - DNA, 1457 bp, Homo sapiens
acgcctggtgcagcgtggggtggcccgggggccctggtgtgccctgtgtgatggtggaaccgctggtggcattcctgcggaggtttcggcagtgtgcatcctgtgggcctggggtctgctggcactgtggactggtgtgccggggcctgaggcctgctggagctctgcgtgagtgcaatggccgacgtgatcaaggaagtggatgcccagtcaaccacagattgggccagcatatgagtcaaggcaccatgcaagcatcaatgtcgccagtggcaggcagcatctatcgtcgttctcgccgtgccacattcaaaggcacatcagcagcatccatttgcattttcttaccatggagtggccgtcgtctccaaggcatgcagaggttataggcacagcattcatgccgcagttgccagcaaagccagcacacccgttgaccctggcaccagactgccacccaggtgttccacaggcccattctgctccgccgtcatcgcggggaccataccaacaagaggccaaccgatccgggaccctgggagtgcgtcaaaggttgcatacccaaacgggacgagctgggcacccacgcggcaccactaccggtgggcgcgcacaattcgacttcgctggcacccaaagacgtacatcacacatcagcagccacacgagtagaccgccgagcactcgtgcctaccctgagcgtgggaaacacatcggaattcggcggcaataggccaccactacatactttggttccgctcattctggcaaaacgggttggaccccatgagccccgcattgacagcgacttcttggctggcatcgggtaccgcgccataccacatccaccattggacaacacgcaaagagggggacacttcgggccaccttcgcaatcgccttcccggacacacacgccgtgggcaggcccccgatacacgtaaacggcctgggccatcccacgggacttgcgggcctgtgggccacctaccggacactggcaacgtggcgactaaacaacacccttccagcgacaccacggagggcgactatgcacgacttgcaccacccacactgggggaccaacacggtccgcgaccccgaggcgccccgcgcctttgacagggccccacatactctaaaagacaacatgatcagaggcatacccgtggtgcaacagccccgcgacagcagtgctgggacacacggcgcacagccagtgggcaatactgcaccgccaagtgtactcccgtaaaccacagggacaggttacaacgtggagcccaccgcctcggtgcacggcaccccctagacacgcagagtcccgcgggcaagcgcgaacacactgcggtcatggcgtgcgtgcgctcaaacactcaacgggaaaccagacacgaagacacgaacacggaaaactgcacggacagccacacaacgcagcgcgcgcgaccacacgt

SEQ ID NO: 723554 - DNA, 1533 bp, Homo sapiens
  misc_feature (537)..(537): n is a, c, g, or t
  misc_feature (545)..(545): n is a, c, g, or t
  misc_feature (548)..(548): n is a, c, g, or t
  misc_feature (553)..(553): n is a, c, g, or t
  misc_feature (555)..(555): n is a, c, g, or t
  misc_feature (566)..(566): n is a, c, g, or t
  misc_feature (596)..(596): n is a, c, g, or t
  misc_feature (624)..(624): n is a, c, g, or t
  misc_feature (1231)..(1231): n is a, c, g, or t
  misc_feature (1380)..(1380): n is a, c, g, or t
gaggtcagtctcgctatattgcccaggctggtcttgaatgcctgggctcaagcaatcctcccaccttggccacctgaatagctgggactacaggcatgtgccactatgcccagctaattttttgtatttttagtagagatgaggcaatatttttaatatagctaatgcatgatgttaaaaactttgcatatggaaaagatgcattcaaaatagaagacagatcaatgaattttagtgtagtcattttaagtttagtgacatagtttcagtttccacattgcaactatacactgtggagttttagcatagtatctaagaatgaatatccacagttctgaacaggttattttagcactcttttccagcaatatatctctgagaggccatactttcttcacgtatgtcaaacaaataacatattgcaacataattgttcttcagacttgttttttagcagcagacacatttccaaatgtaatcttactctgaatctgagcttcattatacaatacagacaaaagtgagcttttccagttnaagtaggngtntgatntnaaacacacccntggccccaacaaaacaaataaaactcccantcttattttaagagcttgttgaagaganttattaagtaacgccgcccttcctttcggccggaaccgccatcttccagtaattcgccaaaatgacgaacacaaagggaaagaggagaggcacccgatatatgttctctaggccttttagaaaacatggagttgttcctttggccacatatatgcgaatctataagaaaggtgatattgtagacatcaagggaatgggtactgttcaaaaaggaatgccccacaagtgttaccatggcaaaactggaagagtctacaatgttacccagcatgctgttggcattgttgtaaacaaacaagttaagggcaagattcttgccaagagaattaatgtgcgtattgagcacattaagcactctaagagccgagatagcttcctgaaacgtgtgaaggaaaatgatcagaaaaagaaagaagccaaagagaaaggtacctgggttcaactaaagcgccagcctgctccacccagagaagcacactttgtgagaaccaatgggaaggagcctgagctgctggaacctattccctatgaattcatggcataataggtgttaaaaaaaaaaataaaggacctctgggctacaaaaaaaaaaaaaaaaaaaacccgngggcatcaaatggcggggggcgggaaaaaaggggtactggaatgggccatgggccaaagcggttccctggacccagttttcctggtccaagggggaaatcggcggggccccaaaagggaggcggaaaaattccgaaaagccaggtaccnggtagagaatcggcgaccaaggccgccgggaaccaagacacccgcgctagtgacgcggtctataggggggacgcaagcgagtctggagagaccacgaattcgcgggcgcagaacagcggccagagaacaaaagaaaaaccagccagcgccgac

SEQ ID NO: 723555 - DNA, 1695 bp, Homo sapiens
  misc_feature (9)..(10): n is a, c, g, or t
gagcgtgannggggagagcggaccgacgcgacacgccgtgcgcctccgcggctgcgctacgaaaacgagtcccggagcggccccgcgcccgccgcacccggccctcgcccgcccgaagacaggcgccaagctgccccgccgtctccccagctagcgcccggccgccgccgcctcgcgggccccgggcggaagggggcggggtcccgattcgccccgcccccgcggagggatacgcggcgccgcggcccaaaacccccgggcgaggcggccggggcgggtgaggcgctccgcctgctgcgcgtctacgcggtccccgcgggccttccgggcccactgcgccgcgcggaccgcctcgggctcggacggccggtgtccccggcgcgccgctcgcccggatcggccgcggcttcggcgcctggggctcggggctccggggaggccgtcgcccgcgatgctgctctccaagttcggctccctggcgcacctctgcgggcccggcggcgtggaccacctcccggtgaagatcctgcagccagccaaggcggacaaggagagcttcgagaaggcgtaccaggtgggcgccgtgctgggtagcggcggcttcggcacggtctacgcgggtagccgcatcgccgacgggctcccggtggctgtgaagcacgtggtgaaggagcgggtgaccgagtggggcagcctgggcggcgcgaccgtgcccctggaggtggtgctgctgcgcaaggtgggcgcggcgggcggcgcgcgcggcgtcatccgcctgctggactggttcgagcggcccgacggcttcctgctggtgctggagcggcccgagccggcgcaggacctcttcgactttatcacggagcgcggcgccctggacgagccgctggcgcgccgcttcttcgcgcaggtgctggccgccgtgcgccactgccacagctgcggggtcgtgcaccgcgacattaaggacgaaaatctgcttgtggacctgcgctccggagagctcaagctcatcgacttcggttcgggtgcgctgctcaaggacacggtctacaccgacttcgacggcacccgagtgtacagccccccggagtggatccgctaccaccgctaccacgggcgctcggccaccgtgtggtcgctgggcgtgcttctctacgatatggtgtgtggggacatccccttcgagcaggacgaggagatcctccgaggccgcctgctcttccggaggagggtctctccagagtgccagcagctgatccggtggcgcctgccctgggtggatacttgaaccccagacgcccctctgtgctgctgtgtccggaggcggccttcccatctgcctgcccacccggagctctttccgccggcgcagggtcccaagcccacctcccgccctcagtcctgcggtgtgcgtctgggcacgtcctgcacacacaatgcaagtcctggcctccgcgcccgcccgcccacgcgagccgtacccgccgccaactctgttatttatggtgtgaccccctggaggtgccctcggcccaccggggctatttattgtttaatttattcagtacctgtgtttgtgtgaatgcggtgtgtgcaggcatcgcagatgggggttctttcagttcaaaagtgagatgtctggagatcatatttttttatacaggtatttcaattaaaatgtttttgtacata

SEQ ID NO: 723556 - DNA, 531 bp, Homo sapiens
  misc_feature (112)..(112): n is a, c, g, or t
  misc_feature (114)..(114): n is a, c, g, or t
  misc_feature (116)..(116): n is a, c, g, or t
  misc_feature (430)..(430): n is a, c, g, or t
  misc_feature (490)..(490): n is a, c, g, or t
  misc_feature (506)..(506): n is a, c, g, or t
  misc_feature (531)..(531): n is a, c, g, or t
caccgcacccagccccaaactctttaatcttatgagaaagcggggccaggtgtaatggcttgtgctgtaatccaaacactttgtatttgtaatccaaacacccacaaagtgngncntccagctgaactcaggagtcccaagaccagcctaggggcaggtgcaatggctcatgcctgcactttgggaggctgaggcaagtgaatcgtttaaggtcaggagttcaagaccaagtctgtccaacatggtgaatgaaaccccaccctctacttgaaaaaaagtacaaaaattggccaggccgtggtaaggaaagaggaggtcaaagcttgtaaaaaaccagcagaataattttgagccagaaaatcagacttcttttctctttttttgagacacctttcctgtccttagtgtaaaaggctagagtgcagtggcnaatcacagctcgctgcaaccatgacctcccaggttcaggtgatcctcccacttcagcctncccagtacctgggatnacacaagcaagccaccatacccagn

SEQ ID NO: 723557 - DNA, 269 bp, Homo sapiens
tttaaggctgcagtgcaacaatcacagctcactgcggctcaactccccaggctcaggtgatcctcccacttcagcctcccaagtagatgtgactacagatgtgccccaccacgcctggctctttatttttgtatttttgtatttttttttttttttgggtaaaaatggggtttggccatgtggcccaggctggtctcctgaattccggggctcatgccattcgcctgtctgggcctcccaaagtgtgggaattacagacttgagccatg

SEQ ID NO: 723558 - DNA, 1410 bp, Homo sapiens
  misc_feature (537)..(537): n is a, c, g, or t
  misc_feature (545)..(545): n is a, c, g, or t
  misc_feature (548)..(548): n is a, c, g, or t
  misc_feature (553)..(553): n is a, c, g, or t
  misc_feature (555)..(555): n is a, c, g, or t
  misc_feature (566)..(566): n is a, c, g, or t
  misc_feature (596)..(596): n is a, c, g, or t
  misc_feature (624)..(624): n is a, c, g, or t
  misc_feature (1242)..(1242): n is a, c, g, or t
  misc_feature (1256)..(1256): n is a, c, g, or t
  misc_feature (1301)..(1301): n is a, c, g, or t
  misc_feature (1303)..(1303): n is a, c, g, or t
  misc_feature (1311)..(1311): n is a, c, g, or t
  misc_feature (1314)..(1314): n is a, c, g, or t
gaggtcagtctcgctatattgcccaggctggtcttgaatgcctgggctcaagcaatcctcccaccttggccacctgaatagctgggactacaggcatgtgccactatgcccagctaattttttgtatttttagtagagatgaggcaatatttttaatatagctaatgcatgatgttaaaaactttgcatatggaaaagatgcattcaaaatagaagacagatcaatgaattttagtgtagtcattttaagtttagtgacatagtttcagtttccacattgcaactatacactgtggagttttagcatagtatctaagaatgaatatccacagttctgaacaggttattttagcactcttttccagcaatatatctctgagaggccatactttcttcacgtatgtcaaacaaataacatattgcaacataattgttcttcagacttgttttttagcagcagacacatttccaaatgtaatcttactctgaatctgagcttcattatacaatacagacaaaagtgagcttttccagttnaagtaggngtntgatntnaaacacacccntggccccaacaaaacaaataaaactcccantcttattttaagagcttgttgaagaganttattaagtaacgccgcccttcctttcggccggaaccgccatcttccagtaattcgccaaaatgacgaacacaaagggaaagaggagaggcacccgatatatgttctctaggccttttagaaaacatggagttgttcctttggccacatatatgcgaatctataagaaaggtgatattgtagacatcaagggaatgggtactgttcaaaaaggaatgccccacaagtgttaccatggcaaaactggaagagtctacaatgttacccagcatgctgttggcattgttgtaaacaaacaagttaagggcaagattcttgccaagagaattaatgtgcgtattgagcacattaagcactctaagagccgagatagcttcctgaaacgtgtgaaggaaaatgatcagaaaaagaaagaagccaaagagaaaggtacctgggttcaactaaagcgccagcctgctccacccagagaagcacactttgtgagaaccaatgggaaggagcctgagctgctggaacctattccctatgaattcatggcataataggtgttaaaaaaaaaaataaaggacctctgggctacaaaaaaaaaaaaaaaaaaaaaaaaaaaaaaaaaacnccgggggcacaaanggggggggggaaaaagggggaaaacaaagggcccaggggccaaangngggtccgnggnccaggtttgttgtcacacagggcgaaaaatgggaggacaccaatagagagcgcgaaaaacgagaaagcacggtaccgtaagaactagacaaagagc

SEQ ID NO: 723559 - DNA, 1168 bp, Homo sapiens
  misc_feature (9)..(10): n is a, c, g, or t
  misc_feature (1103)..(1103): n is a, c, g, or t
  misc_feature (1126)..(1126): n is a, c, g, or t
  misc_feature (1131)..(1132): n is a, c, g, or t
gagcgtgannggggagagcggaccgacgcgacacgccgtgcgcctccgcggctgcgctacgaaaacgagtcccggagcggccccgcgcccgccgcacccggccctcgcccgcccgaagacaggcgccaagctgccccgccgtctccccagctagcgcccggccgccgccgcctcgcgggccccgggcggaagggggcggggtcccgattcgccccgcccccgcggagggatacgcggcgccgcggcccaaaacccccgggcgaggcggccggggcgggtgaggcgctccgcctgctgcgcgtctacgcggtccccgcgggccttccgggcccactgcgccgcgcggaccgcctcgggctcggacggccggtgtccccggcgcgccgctcgcccggatcggccgcggcttcggcgcctggggctcggggctccggggaggccgtcgcccgcgatgctgctctccaagttcggctccctggcgcacctctgcgggcccggcggcgtggaccacctcccggtgaagatcctgcagccagccaaggcggacaaggagagcttcgagaaggcgtaccaggtgggcgccgtgctgggtagcggcggcttcggcacggtctacgcgggtagccgcatcgccgacgggctcccggtggctgtgaagcacgtggtgaaggagcgggtgaccgagtggggcagcctgggcggcgcgaccgtgcccctggaggtggtgctgctgcgcaaggtgggcgcggcgggcggcgcgcgcggcgtcatccgcctgctggactggttcgagcggcccgacggcttcctgctggtgctggagcggcccgagccggcgcaggacctcttcgactttatcacggagcgcggcgccctggacgagccgctggcgcgccgcttcttcgcgcaggtgctggccgccgtgcgccactgccacagctgcggggtcgtgcaccgcgacattaaggacgaaaatctgcttgtggacctgcgctccggagagctcaagctcatcgacttcggttcgggtgcgctgctcaaggacacggtctacaccgacttcgacggtgagcgcgggcgcggggcagggaacgttccggggnccttgccggcgggttaacgcctncaggnncggcacatggaggggctgatgactgttgggcggccg

SEQ ID NO: 723560 - DNA, 1463 bp, Homo sapiens
  misc_feature (537)..(537): n is a, c, g, or t
  misc_feature (545)..(545): n is a, c, g, or t
  misc_feature (548)..(548): n is a, c, g, or t
  misc_feature (553)..(553): n is a, c, g, or t
  misc_feature (555)..(555): n is a, c, g, or t
  misc_feature (566)..(566): n is a, c, g, or t
  misc_feature (596)..(596): n is a, c, g, or t
  misc_feature (624)..(624): n is a, c, g, or t
gaggtcagtctcgctatattgcccaggctggtcttgaatgcctgggctcaagcaatcctcccaccttggccacctgaatagctgggactacaggcatgtgccactatgcccagctaattttttgtatttttagtagagatgaggcaatatttttaatatagctaatgcatgatgttaaaaactttgcatatggaaaagatgcattcaaaatagaagacagatcaatgaattttagtgtagtcattttaagtttagtgacatagtttcagtttccacattgcaactatacactgtggagttttagcatagtatctaagaatgaatatccacagttctgaacaggttattttagcactcttttccagcaatatatctctgagaggccatactttcttcacgtatgtcaaacaaataacatattgcaacataattgttcttcagacttgttttttagcagcagacacatttccaaatgtaatcttactctgaatctgagcttcattatacaatacagacaaaagtgagcttttccagttnaagtaggngtntgatntnaaacacacccntggccccaacaaaacaaataaaactcccantcttattttaagagcttgttgaagaganttattaagtaacgccgcccttcctttcggccggaaccgccatcttccagtaattcgccaaaatgacgaacacaaagggaaagaggagaggcacccgatatatgttctctaggccttttagaaaacatggagttgttcctttggccacatatatgcgaatctataagaaaggtgatattgtagacatcaagggaatgggtactgttcaaaaaggaatgccccacaagtgttaccatggcaaaactggaagagtctacaatgttacccagcatgctgttggcattgttgtaaacaaacaagttaagggcaagattcttgccaagagaattaatgtgcgtattgagcacattaagcactctaagagccgagatagcttcctgaaacgtgtgaaggaaaatgatcagaaaaagaaagaagccaaagagaaaggtacctgggttcaactaaagcgccagcctgctccacccagagaagcacactttgtgagaaccaatgggaaggagcctgagctgctggaacctattccctatgaattcatggcataataggtgttaaaaaaaaaaataaaggacctctgggctacaaaaaaaaaaaaaaaaaaaaaaagaaaaccttttggggggcctgggcccaggcgactttagactcgagcaagtttatgatggcggccgaaattggagctcattggccaatccccctataggggggcgtattaaaatacatgggccgggggttaaaaacggggggactgggaaacccctgggggtccccaataattgccttggggacatccccttttgcaggtgggggataaaaaaaaggcccccccatcgcccttca

SEQ ID NO: 723561 - DNA, 1289 bp, Homo sapiens
  misc_feature (537)..(537): n is a, c, g, or t
  misc_feature (545)..(545): n is a, c, g, or t
  misc_feature (548)..(548): n is a, c, g, or t
  misc_feature (553)..(553): n is a, c, g, or t
  misc_feature (555)..(555): n is a, c, g, or t
  misc_feature (566)..(566): n is a, c, g, or t
  misc_feature (596)..(596): n is a, c, g, or t
  misc_feature (624)..(624): n is a, c, g, or t
gaggtcagtctcgctatattgcccaggctggtcttgaatgcctgggctcaagcaatcctcccaccttggccacctgaatagctgggactacaggcatgtgccactatgcccagctaattttttgtatttttagtagagatgaggcaatatttttaatatagctaatgcatgatgttaaaaactttgcatatggaaaagatgcattcaaaatagaagacagatcaatgaattttagtgtagtcattttaagtttagtgacatagtttcagtttccacattgcaactatacactgtggagttttagcatagtatctaagaatgaatatccacagttctgaacaggttattttagcactcttttccagcaatatatctctgagaggccatactttcttcacgtatgtcaaacaaataacatattgcaacataattgttcttcagacttgttttttagcagcagacacatttccaaatgtaatcttactctgaatctgagcttcattatacaatacagacaaaagtgagcttttccagttnaagtaggngtntgatntnaaacacacccntggccccaacaaaacaaataaaactcccantcttattttaagagcttgttgaagaganttattaagtaacgccgcccttcctttcggccggaaccgccatcttccagtaattcgccaaaatgacgaacacaaagggaaagaggagaggcacccgatatatgttctctaggccttttagaaaacatggagttgttcctttggccacatatatgcgaatctataagaaaggtgatattgtagacatcaagggaatgggtactgttcaaaaaggaatgccccacaagtgttaccatggcaaaactggaagagtctacaatgttacccagcatgctgttggcattgttgtaaacaaacaagttaagggcaagattcttgccaagagaattaatgtgcgtattgagcacattaagcactctaagagccgagatagcttcctgaaacgtgtgaaggaaaatgatcagaaaaagaaagaagccaaagagaaaggtacctgggttcaactaaagcgccagcctgctccacccagagaagcacactttgtgagaaccaatgggaaggagcctgagctgctggaacctattccctatgaattcatggcataataggtgttaaacacaaaactaaaggacctctgggctacaataaacaaatacatttcttcctacctttcctcatatcattatattctcttctattattctcctccgtcgtactcaaaaaaaa

SEQ ID NO: 723562 - DNA, 188 bp, Homo sapiens
tgaccagctttgtttctggctttggctgcaacttcatctggaagcccacggtgttcactcgagtctccgccttcatcgactggattgaggagaccatagcaagccactagaaccaaggcccagctggcagtgctgatcgatcccacatcctgaataaagaataaagatctctcagaaaattccaaaaa

SEQ ID NO: 723563 - DNA, 104 bp, Homo sapiens
atgcaggaaggtaaggtacagtaaaagcctacttggcctttataaaagaaaaccattctgacattgcttttaaaagggtacttagattccctgcatatgtaggt

SEQ ID NO: 723564 - DNA, 859 bp, Homo sapiens
atcccagcacttgggaggccgaggcgggtggatcacgaggtcaggagatcgagaccatcccggctaaaacggtgaaaccccgtctctactaaaaatacaaaaaattagccgggcgtagtggcgggcgcctgtagtcccagtcacttgggaggctgaggcaggagaatcgctagaacccaggaggtggaggttgctgtgagccgagatcgcaccattgcactccaggctgggcaacaagagcaaaactgcaaaaaaacataaaataaaataaaaaaagaaagtacatctcaaaaaaaagaaagaaagacaagaaaaagaaaaaaaaaggaaacacctttgtcttgtgtccagtcagtgggctcccaggaaaatgttccttctctttttgtggcatggacactgtggaatctggtacattccggtagacattctcctttaatttggactgtaagtctgacctctatgattaattacttcagcccctgatggctcccgtgcaagctcctttggccaatttcaccttagcttctggtacgtctgggccagctaagcgcatctatcatcatcccttccagctcctgattggtctgcgccaaaggctgggcaagctgagccacacgtttttcaagcaccgcctgtgaactagggccatattcttcccttccagtcataaaacctggcccagccccgttgaggacccattcaaaccctattcgcggaagagctcatccctgattaattactcactcactgggtgaccctattctagggaaaaagattgggtcccaacacgagagactgcgccgcgcacgcaagcgtcttcgggaacatcacagaggaacggctggactaagatgtg

SEQ ID NO: 723565 - DNA, 1218 bp, Homo sapiens
  misc_feature (537)..(537): n is a, c, g, or t
  misc_feature (545)..(545): n is a, c, g, or t
  misc_feature (548)..(548): n is a, c, g, or t
  misc_feature (553)..(553): n is a, c, g, or t
  misc_feature (555)..(555): n is a, c, g, or t
  misc_feature (566)..(566): n is a, c, g, or t
  misc_feature (596)..(596): n is a, c, g, or t
  misc_feature (624)..(624): n is a, c, g, or t
  misc_feature (1216)..(1216): n is a, c, g, or t
gaggtcagtctcgctatattgcccaggctggtcttgaatgcctgggctcaagcaatcctcccaccttggccacctgaatagctgggactacaggcatgtgccactatgcccagctaattttttgtatttttagtagagatgaggcaatatttttaatatagctaatgcatgatgttaaaaactttgcatatggaaaagatgcattcaaaatagaagacagatcaatgaattttagtgtagtcattttaagtttagtgacatagtttcagtttccacattgcaactatacactgtggagttttagcatagtatctaagaatgaatatccacagttctgaacaggttattttagcactcttttccagcaatatatctctgagaggccatactttcttcacgtatgtcaaacaaataacatattgcaacataattgttcttcagacttgttttttagcagcagacacatttccaaatgtaatcttactctgaatctgagcttcattatacaatacagacaaaagtgagcttttccagttnaagtaggngtntgatntnaaacacacccntggccccaacaaaacaaataaaactcccantcttattttaagagcttgttgaagaganttattaagtaacgccgcccttcctttcggccggaaccgccatcttccagtaattcgccaaaatgacgaacacaaagggaaagaggagaggcacccgatatatgttctctaggccttttagaaaacatggagttgttcctttggccacatatatgcgaatctataagaaaggtgatattgtagacatcaagggaatgggtactgttcaaaaaggaatgccccacaagtgttaccatggcaaaactggaagagtctacaatgttacccagcatgctgttggcattgttgtaaacaaacaagttaagggcaagattcttgccaagagaattaatgtgcgtattgagcacattaagcactctaagagccgagatagcttcctgaaacgtgtgaaggaaaatgatcagaaaaagaaagaagccaaagagaaaggtacctgggttcaactaaagcgccagcctgctccacccagagaagcacactttgtgagaaccaatgggaaggagcctgagctgctggaacctattccctatgaattcatggcataataggtgttaaaaaaacaataaatatatttattttttccacatacttcnca

SEQ ID NO: 723566 - DNA, 175 bp, Homo sapiens
tgagagaccgtgttgcaatgtggtctcgaagttctgcctcaagtgatccacccaccttgggctcccgaagtggctgggattgcaggcatgacgcaatgaactggcctttcatccaccttagtcatcacttcctttcttctcttccagttcattgcaacacgggggtaccgaggct

SEQ ID NO: 723567 - DNA, 789 bp, Homo sapiens
aaaaacaaaaattaaggctaggtacgaggccgggtgttgaatcggccgagggaaccgccatcttccagtaattcgccaaaatgacgaacacaaagggaaagaggagaggcacccgatatatgttctctaggccttttagaaaacatggagttgttcctttggccacatatatgcgaatctataagaaaggtgatattgtagacatcaagggaatgggtactgttcaaaaaggaatgccccacaagtgttaccatggcaaaactggaagagtctacaatgttacccagcatgctgttggcattgttgtaaacaaacaagttaagggcaagattcttgccaagagaattaatgtgcgtattgagcacattaagcactctaagagccgagatagcttcctgaaacgtgtgaaggaaaatgatcagaaaaagaaagaagccaaagagaaaggtacctgggttcaactaaagcgccagcctgctccacccagagaagcacactttgtgagaaccaatgggaaggagcctgagctgctggaacctattccctatgaattcatggcataataggtgttaacaaaaacaaataaaggacctctgggctacaaaaaaaattcactgggcggtgttttacaaggttgggacggggaaacctggggttaccaattaatcgcctgaagcaatcccctttcgcagtgggtaataggaaaggccgacgatcgccttccaaagtgggcacctgaagggatggcaatgaggggtaattggggaaacgggtggggagaacgctttt

SEQ ID NO: 723568 - DNA, 1126 bp, Homo sapiens
  misc_feature (537)..(537): n is a, c, g, or t
  misc_feature (545)..(545): n is a, c, g, or t
  misc_feature (548)..(548): n is a, c, g, or t
  misc_feature (553)..(553): n is a, c, g, or t
  misc_feature (555)..(555): n is a, c, g, or t
  misc_feature (566)..(566): n is a, c, g, or t
  misc_feature (596)..(596): n is a, c, g, or t
  misc_feature (624)..(624): n is a, c, g, or t
  misc_feature (1121)..(1121): n is a, c, g, or t
gaggtcagtctcgctatattgcccaggctggtcttgaatgcctgggctcaagcaatcctcccaccttggccacctgaatagctgggactacaggcatgtgccactatgcccagctaattttttgtatttttagtagagatgaggcaatatttttaatatagctaatgcatgatgttaaaaactttgcatatggaaaagatgcattcaaaatagaagacagatcaatgaattttagtgtagtcattttaagtttagtgacatagtttcagtttccacattgcaactatacactgtggagttttagcatagtatctaagaatgaatatccacagttctgaacaggttattttagcactcttttccagcaatatatctctgagaggccatactttcttcacgtatgtcaaacaaataacatattgcaacataattgttcttcagacttgttttttagcagcagacacatttccaaatgtaatcttactctgaatctgagcttcattatacaatacagacaaaagtgagcttttccagttnaagtaggngtntgatntnaaacacacccntggccccaacaaaacaaataaaactcccantcttattttaagagcttgttgaagaganttattaagtaacgccgcccttcctttcggccggaaccgccatcttccagtaattcgccaaaatgacgaacacaaagggaaagaggagaggcacccgatatatgttctctaggccttttagaaaacatggagttgttcctttggccacatatatgcgaatctataagaaaggtgatattgtagacatcaagggaatgggtactgttcaaaaaggaatgccccacaagtgttaccatggcaaaactggaagagtctacaatgttacccagcatgctgttggcattgttgtaaacaaacaagttaagggcaagattcttgccaagagaattaatgtgcgtattgagcacattaagcactctaagagccgagatagcttcctgaaacgtgtgaaggaaaatgatcaaaaaaaaaaaaaaaaaaacaaaaaaaaaaaaactttttggggcgccctgggccccgagaaaaagtttttaaacaccatttgttggggggccgcgngggcc

SEQ ID NO: 723569 - DNA, 1547 bp, Homo sapiens
  misc_feature (537)..(537): n is a, c, g, or t
  misc_feature (545)..(545): n is a, c, g, or t
  misc_feature (548)..(548): n is a, c, g, or t
  misc_feature (553)..(553): n is a, c, g, or t
  misc_feature (555)..(555): n is a, c, g, or t
  misc_feature (566)..(566): n is a, c, g, or t
  misc_feature (596)..(596): n is a, c, g, or t
  misc_feature (624)..(624): n is a, c, g, or t
gaggtcagtctcgctatattgcccaggctggtcttgaatgcctgggctcaagcaatcctcccaccttggccacctgaatagctgggactacaggcatgtgccactatgcccagctaattttttgtatttttagtagagatgaggcaatatttttaatatagctaatgcatgatgttaaaaactttgcatatggaaaagatgcattcaaaatagaagacagatcaatgaattttagtgtagtcattttaagtttagtgacatagtttcagtttccacattgcaactatacactgtggagttttagcatagtatctaagaatgaatatccacagttctgaacaggttattttagcactcttttccagcaatatatctctgagaggccatactttcttcacgtatgtcaaacaaataacatattgcaacataattgttcttcagacttgttttttagcagcagacacatttccaaatgtaatcttactctgaatctgagcttcattatacaatacagacaaaagtgagcttttccagttnaagtaggngtntgatntnaaacacacccntggccccaacaaaacaaataaaactcccantcttattttaagagcttgttgaagaganttattaagtaacgccgcccttcctttcggccggaaccgccatcttccagtaattcgccaaaatgacgaacacaaagggaaagaggagaggcacccgatatatgttctctaggccttttagaaaacatggagttgttcctttggccacatatatgcgaatctataagaaaggtgatattgtagacatcaagggaatgggtactgttcaaaaaggaatgccccacaagtgttaccatggcaaaactggaagagtctacaatgttacccagcatgctgttggcattgttgtaaacaaacaagttaagggcaagattcttgccaagagaattaatgtgcgtattgagcacattaagcactctaagagccgagatagcttcctgaaacgtgtgaaggaaaatgatcaggctacaaaaaaaaaaaaaaaaaaaaaaaaaaaaaaaaaaaaaaaaaaaaaaaaaaaaaaaaaaaaaaaaaaaaaaaaaaagggggggggggcaaaaaaaaaaatccacccgagggggggcgaccaaaaaaaaagcagcacacaagaagatgagagatagaaagaagggggacccacaaaggagagagagagcattaaaaagaaagacgtggaagggaggcaggcgaaaataaacaaaaggaagaagagagaaacaagagacgaaagaggaaatagtagaaagaagaaggacaccaaactaccgcgagggggaaggaacaaaaaaaggaagaggaacacaaactgccaccaaaaaaaaaaaataaacagcacaaaaaggagagagtaaataaaaagaagcgaagaggaaaaaaaaaaaggtgaaagacaaaagacacccaaagaaaagtagccacgcacacaaacaaaaaacaggcagcagcgacgacaggcatcaacgaacaacaagagaaaataagaag

SEQ ID NO: 723570 - DNA, 871 bp, Homo sapiens
  misc_feature (392)..(392): n is a, c, g, or t
  misc_feature (415)..(415): n is a, c, g, or t
gcagaaggagacggaaggacgcatgcgttggtgagtcccggattctggtgtggttcttccgctcagagctgtgtgaagcgcttccgggtcgccgacgtgagtagtcctcccggagcgatgaagacatctgaggctcagcagaggttaagtgagctcagggcaacggttcaagaacagctcagtatacgtggtaggagcgcatggactcagaatggcacgatcatatgaggccatgtccacatttgttccccttcagtcttccctcgtgtgactgagactcgtgtggtttaatctggatcgaggcctgtgtggaagagacagagcatggatggcagtcaggaacagtgaggatcaggcctggttccaaagcatcgcgtgagaaagacaacaanctggttcctattggcaagccagnctcagagcactatgatgacgaggaagaagaggatgatgaagatgatgaggatagtgaagaggactcagaggatgatgaggatgtgcaggacatgggacgagatgaatgataccgatgagttcagcggatgtatggacgagtgtcactgaggtggcatgggaaggaagaaaggatcaggaccagtggatgatctaggtagacaaggcagggtggctcagggagattccaggcagccaaagtatcctgatccaaccccaaaccctgcccacagaaacagtgatggtcccagtgctgaaaagtgcgcttggggacctctcaagtgtgccaggatctggtctctttgggccctccaggcaatcagtctgacttgaaatccccaggctgaactatcacttctggcagtactttaccttgattgccagctggctagttcttataagacaaggggtgttcaaa

SEQ ID NO: 723571 - DNA, 734 bp, Homo sapiens
gttctcaaaaagccctcctgcccactcagtccttcatccctgcctgctctctattgaagtctgttccgctccatacccaacaacactggtaaaggctgcgccatctttgaatagtgtttccatttattatttgtgttattgttatttagacaatcaaatcgttcacttaaatgaatacattatgaacatattttaaattgcctatggacttatttaagataacaattcctcagatcttaaatttttttcccctttttggttaaaagggaaatggggggctgaataggtgatgataatttatttttcttcatacaattagccattattctgaaaatgtttatattcttttaaaaatttatagtcattatgggttaaaccataatgtcagtaaaacagcatctacattagtctgggggaaaaaaactatatctgccaccagcagaaagatgaatttggtgggcctttgaaagtcagaggattaactagtgttgggggggaacatgtcttaacacagatacagaacctgtcttatttctgcttcatgaactagtaacacaaacactggagaggctgtgatggggtgtgtccagctgtctgctaaccagatgaggcttttgagcgttgtgagcccaaggaacagcaaaccaccattctgggtttaataagcccttatactctccagtattgagaatacccgggacagaagttaaacctgggggggaaaacaaacagtt

SEQ ID NO: 723572 - DNA, 297 bp, Homo sapiens
aatctagctgtttcagggtacacagatccatttgttccgaatgccactaaaagctatatttcgctgtcactgctgctccaggtaatatttagtctgtggaaaatctatcatcagtagggcactgttgtttattggatgagctgaaaagaaagatatgcttctggcatccagaatgttttacggtctttcaagttgtatcaaatgtgacctgcagaatcgtttaagtgttctcaggatgcataagttggagctgaaatgtgacatctaaccagttgctaaaagtgtgcagtggtatct

SEQ ID NO: 723573 - DNA, 1053 bp, Homo sapiens
  misc_feature (537)..(537): n is a, c, g, or t
  misc_feature (545)..(545): n is a, c, g, or t
  misc_feature (548)..(548): n is a, c, g, or t
  misc_feature (553)..(553): n is a, c, g, or t
  misc_feature (555)..(555): n is a, c, g, or t
  misc_feature (566)..(566): n is a, c, g, or t
  misc_feature (596)..(596): n is a, c, g, or t
  misc_feature (624)..(624): n is a, c, g, or t
  misc_feature (989)..(989): n is a, c, g, or t
  misc_feature (1053)..(1053): n is a, c, g, or t
gaggtcagtctcgctatattgcccaggctggtcttgaatgcctgggctcaagcaatcctcccaccttggccacctgaatagctgggactacaggcatgtgccactatgcccagctaattttttgtatttttagtagagatgaggcaatatttttaatatagctaatgcatgatgttaaaaactttgcatatggaaaagatgcattcaaaatagaagacagatcaatgaattttagtgtagtcattttaagtttagtgacatagtttcagtttccacattgcaactatacactgtggagttttagcatagtatctaagaatgaatatccacagttctgaacaggttattttagcactcttttccagcaatatatctctgagaggccatactttcttcacgtatgtcaaacaaataacatattgcaacataattgttcttcagacttgttttttagcagcagacacatttccaaatgtaatcttactctgaatctgagcttcattatacaatacagacaaaagtgagcttttccagttnaagtaggngtntgatntnaaacacacccntggccccaacaaaacaaataaaactcccantcttattttaagagcttgttgaagaganttattaagtaacgccgcccttcctttcggccggaaccgccatcttccagtaattcgccaaaatgacgaacacaaagggaaagaggagaggcacccgatatatgttctctaggccttttagaaaacatggagttgttcctttggccacatatatgcgaatctataagaaaggtgatattgtagacatcaagggaatgggtactgttcaaaaaggaatgccccacaagtgttaccatggcaaaactggaagagtctacaatgttacccagcatgctgttggcattgttgtaaacaaacaagttaagggcaagattcttgccaagagaattaatgtgcgtattgggccattaagcctttaaaagcccngaaagctttctgaaaacggtgaagggaaatggtcccaaaaagaaggcccggggtccctgggttn

SEQ ID NO: 723574 - DNA, 424 bp, Homo sapiens
tccccctcgtggatgcaaaggtcgtaatacagccgggaacttaacagcagtgggacactgagagctagagcatctcgatgtaatacaccatgacttaacacagtgggacacggagagctagagcatctcgatgtagtacaccatgacttaacacagggggacacggaaagctagagcatctcgatgtagtacaccgtgacttaacacagcgggacactgaaagctagagcatctcgatgtagtacaccgtgacttaacacagcgggacactgagagctagagcatctcgatgtagtacaccgtgacttaacacagtgggacactgagagctagagcatctcgatgtagtacaccgtgacttaacacagtgggacactgagagctagagcatctcgatgtaggacaccgtgacttaacacagtgg

SEQ ID NO: 723575 - DNA, 289 bp, Homo sapiens
ccctgccattgagtttggagggccctgttggagcctttggacctatagctcaaggccaaaaaaatccctggctttggaattaaatagcttagattgtactataacccctacttatgaactcagggactattagggactattcaggggctatgaatttgagcctttgttttttgaactgtaaagtggaaatgatgtaaacccccttgcaaaattgtaaagttgggtaaggtcatgaacataagggcctggcccaaagggtgccctgtaaataaacagacatccctcctta

SEQ ID NO: 723576 - DNA, 379 bp, Homo sapiens
  misc_feature (12)..(12): n is a, c, g, or t
  misc_feature (19)..(19): n is a, c, g, or t
  misc_feature (44)..(45): n is a, c, g, or t
  misc_feature (50)..(50): n is a, c, g, or t
  misc_feature (75)..(75): n is a, c, g, or t
  misc_feature (82)..(82): n is a, c, g, or t
  misc_feature (113)..(113): n is a, c, g, or t
  misc_feature (117)..(117): n is a, c, g, or t
  misc_feature (130)..(130): n is a, c, g, or t
  misc_feature (161)..(161): n is a, c, g, or t
  misc_feature (165)..(165): n is a, c, g, or t
  misc_feature (172)..(172): n is a, c, g, or t
  misc_feature (220)..(221): n is a, c, g, or t
  misc_feature (243)..(243): n is a, c, g, or t
  misc_feature (250)..(250): n is a, c, g, or t
  misc_feature (253)..(253): n is a, c, g, or t
  misc_feature (320)..(320): n is a, c, g, or t
  misc_feature (322)..(322): n is a, c, g, or t
  misc_feature (367)..(367): n is a, c, g, or t
ttagaccaggcncatgggnatgttccagccagcggttctgccanntccgntatgacaggacttctcgcctttcanattgtcncaggtgagctcagaagctgatttcttcaccngtgntacagctgccaanacagcgcaccagaccacacttgcccgatatntagncaaaccntccatccaagttcatggcatcagcttctccattcatgatcttgccaanncagtcttcggtggtctctgttnatacacnctntattttccatacactgttaacactccactcatcacacttgagcctctcgtggtggctcagcgcacancncttcacaggcgcgcactcatctgttggggcttctgcgcatgcgcnttcccctcgtgc

SEQ ID NO: 723577 - DNA, 104 bp, Homo sapiens
atacagaaaacaaaacgaaacaaaacaaaaacaaacagaataccagtgaccatccaaaagtgggacataccgcgctgacccatatcgaccccacccatagctgg

SEQ ID NO: 723578 - DNA, 92 bp, Homo sapiens
ccgtcatcgcttgtggtggtgtgactcgcgtcgagagcacatccgaggtcgacgcatctgcggtggtcgcggatgcggcgtcggaatcggct

SEQ ID NO: 723579 - DNA, 202 bp, Homo sapiens
tatatagaagaggtagaaaaagggactcgcagtaccttcagctttttctgctcttaagaaagatgaagggctgggcatggtggctcatgactgtaatcccagcactttgggaggcaaggtaggcagatcaggaggtcaggagtttgagaccagcctgagcaacatggagaaaccccatctctaccaaaaatacatatattag

SEQ ID NO: 723580 - DNA, 372 bp, Homo sapiens
  misc_feature (304)..(304): n is a, c, g, or t
gtgaattttgtaagagcccattgttcctgaaataagccatatattatagatatgttagcagaatacttgataaatccttatttgtggatatttcttttttttttgagacggagtttcaccctcttgccccaggctggagagcaagtggcacgatcttggctcactgcaagctctacttcccgggctcaagtaattctgcctcagccacgtgggaggctaagggaggaggattgcttgaggccggaaggtgaaggttgctgtaatcccagctactcggggggccgaggcaggagaatcccttgancccgggaggcagaggttgcagtgagccgagattgcatcactgtactccagcctgggggacaagagcaa

SEQ ID NO: 723581 - DNA, 264 bp, Homo sapiens
ctctctatccagatccacttctcttagaccatctaaatacacgcgcggattttaaaagagaacatagggccggacgtggtgactcatgcctataatcccaacactttgggaggccgaggcgggcagatcacttgaggtcagaagttcaagaccagcctggccattatggcgaaaccccatctctactaaaaatacaaaaatttgccaggcatggtggtgctcatttgtaactcccagctacttgggaggctgagattacaggtg

SEQ ID NO: 723582 - DNA, 726 bp, Homo sapiens
  misc_feature (699)..(699): n is a, c, g, or t
gtttcaccgggctggccaggctgctctcaaactactgaccttgtgatccgcctgcctcggcctcccaaagtagctgggattacaggcgtgagccactgtgcccggcctggaaagaagattctttacatgaagagaggcgagtcaaaggtctggcacagcagcagctgtaacacggaaactgatctcctctccccacctgaaggttgatggatataggagagggagcatcatcagagccaagaggcaagaagtgcctttgaggagccaggttttagttaataaggatgacttcagagcacagaatagaaattatgggggagaaagaagtgagggacatcttataacactatgagatgtgctaagacatgatgctatctttcaagacactgacttttaccctatataagtctataactccattatcatagtcctcatctaactcaaggtttgctttaagattatattggcattgagataaatattaatgccgagattcacaactaggtgacacacctagactattgggtaaagtatgcagatagtggtaatattaaaaatgtgtcttaaacatctgagcaacactttgtttgatacacatgatgtctaccgcaggcctcagaaagacagtatcacagaaggctggaagatgaatgagactgaacttcatcaggcaataaagtcaatatgaatttttcaaanaagaggggccacaggggggggctgttt

SEQ ID NO: 723583 - DNA, 295 bp, Homo sapiens
cgtctatgccactgagtgatgcgtgatctcggtcacataactttctccgggttcagcgattctcccgctcagcccccgagcagctgggaccgcaggcatgcaccaccatgcccagctaatcaaaaaaaaatttggagtgatggggcttatgtgttcccaggctggtcgtcaactcctgggctcaggtatctacccgccttggctcccagggtgttgggattattgtcatgagccactgtgcctggcagccatagactcttacagttgaatacaatgatgattttttgcatcatta

SEQ ID NO: 723584 - DNA, 106 bp, Homo sapiens
  misc_feature (24)..(24): n is a, c, g, or t
  misc_feature (42)..(42): n is a, c, g, or t
  misc_feature (67)..(67): n is a, c, g, or t
ggtagatagcttttggatgattgnggcatgcttatattatgnaaaaaattgctaataaagataaatnctacatgttcagaataaaagttacatttttcaaatattg

SEQ ID NO: 723585 - DNA, 1430 bp, Homo sapiens
cccctccccccacgaaagcgagcagagcggagagagcgcggggaagtcggactaggctcctgtggttcttattctcggccgtgcgtgtgtctcctcccctgttggtttcctctgttgtgtgctgccccacgttgttgattttgttccagagtgcttcccccactctcgcggggtgtgtgtctccacgaagttgttgccccccccggggttttctcacaggggtcttttttccttgtgcctcctctctgttatgcacctctggtggttcttactttctgcgcgaagggcaccccctgtggggcgccccctaagatgcgccttttttacccccgcggtgagttcttttttttgcggcccccctctcatggtttcctccggggggggttgctccctcctccctatattaggggggcctctcctttttgtccgccgggccacaattgtggttttctcgggggattcttttaggggagaattttggtggggaaaggagaattcccgggggtccccttaatgggctgtgaatccttcccaagaaatctctttatatggcgcgcagttctgggcgcccgcctacctctttattgtcccgccatatcttttagagaagagtatagctctgtgtaaacccaccgggtgtttcgttggcaccactatctctcgggagatacacactctcttttgtatgggcgcccctctcctcccccggggggggtgtcctctcccccccgcttttcctgtgaggggggcgcaccttccccacaagtgtgtcacggggggccgcacacatgtggaaggggtgtcccccctgggacacacacagaagcagggagagaagtgtcaagggcgcgccttccctcctctctttccctccgtgcgctgcacatagtggggtgttccccccgggcgacctgttgtcctcctttggcttctctctcgaggaggtccccggccttctttccccccccgcggagattttcttgttttggcgcccctcttcttgcggtgtcccccactgttccctcttcccccacgggttctaataagggttggtatatattctggccccttgtgccacacaactcttctccaagcaccacattcaccgcgggacacccgagattggtcaaaaacaccgttcacgaaaaggcgcgtttgcgcggtcacatctccgagtgtggcccgtgctcacagcgccctgggaccccctctgggttccacgccctcggaggcgctgggagagcccgcgagattaagtttgtagatccgcgcctttcgggtgggggctgtactttcctctttggttgtggacacccccttttgtttttgcccctctctgggggttttttttggtccccccggagggggggggggcccggggggcgggggttttttttgggggccataaaaattgttcttggggtgtgtta

SEQ ID NO: 723586 - DNA, 389 bp, Homo sapiens
  misc_feature (18)..(18): n is a, c, g, or t
  misc_feature (52)..(52): n is a, c, g, or t
  misc_feature (67)..(67): n is a, c, g, or t
  misc_feature (121)..(121): n is a, c, g, or t
  misc_feature (311)..(311): n is a, c, g, or t
  misc_feature (361)..(361): n is a, c, g, or t
  misc_feature (380)..(380): n is a, c, g, or t
agcactttgggaggcttnagtgggtgaatcacataagccataggagttcaanactaccccgggcaanatggcaaaaccccatctcctataaaaaatttaaaaattaggctgggccgccggntgtcacgccctgtagttccagcactttgggaggccaaggcggtcagatcatgaggtcaggagatcaaaaccatccctggcccacatggtgaaatgctgtctctactaaaaatacaaaaattagctgggcgttgtggcacatgcctgtaatcccagctactcgggaggctgaggcaggagaatcgcttganccagggagtcggaagatgcagtgagctgagaatgcaccgctgcactccancctggtgacagagctgagnctctgtctc

SEQ ID NO: 723587 - DNA, 167 bp, Homo sapiens
tggacattctacctacgaggtcgagcataacataaataattggaatctccagctggagctattgaacatcccgcataatgggattacatgtgtggaagcttctgcagcggggctatggtgcaacttcaggtctcatctccatcaaagaaaaatacgtgaaagatatg

SEQ ID NO: 723588 - DNA, 152 bp, Homo sapiens
tatactaagtcgagccggtaccccatcttctccttacacctagcagagtgttctctatcttaggggccatcaattttcatcacaacaaattatcaaatataaagaccccctgtcgatgaacctcagttactcaaacgacccctctgtcgttc

SEQ ID NO: 723589 - DNA, 417 bp, Homo sapiens
  misc_feature (96)..(96): n is a, c, g, or t
  misc_feature (99)..(99): n is a, c, g, or t
  misc_feature (104)..(104): n is a, c, g, or t
  misc_feature (119)..(119): n is a, c, g, or t
  misc_feature (198)..(198): n is a, c, g, or t
  misc_feature (231)..(231): n is a, c, g, or t
  misc_feature (240)..(240): n is a, c, g, or t
  misc_feature (245)..(245): n is a, c, g, or t
  misc_feature (274)..(274): n is a, c, g, or t
  misc_feature (401)..(401): n is a, c, g, or t
  misc_feature (404)..(404): n is a, c, g, or t
  misc_feature (412)..(412): n is a, c, g, or t
cctccccctccattgtcccctccccccccacacaccttcctttttgtccttgtgttgaaaagggtatcttggggaatgagtttattattttttccncgncctcncctatacatcccccnccccatcctccaggtttgggaaatatccatttttttggccagtcttagcatgtttttttaatgtcccattccccccccnggcccaaaagagattttatgacatatattatanagagaattntatanccatatatataaatattagagattatgtncccaagggcatgggctcaaatgccccctgccagtcccccccccaggcttcagcatcttttttggcctggggaagtgggagggatgtgatgctggaaaaggctccaggctgtgttcaatgcccctaancanaatgtggnggcca

SEQ ID NO: 723590 - DNA, 318 bp, Homo sapiens
gacaacgccgagggtcaaattaataaggaaatgcgaagaacctagaatagttcagagcacctttggagaatacgcacttaccatatggctacagtaattagtattgacacaaggatacatatgaaacagagcaagaatccactgggaggccgaggtgacggatcacctggtgccaggagtacaagaccagcctgggcgacataccgaaaccccatctctactaaaaatacaaaaaaattacccaggcatgatagcaaacacccataatctcagctactcaagaggctgaggccatgagaattgcctgaacctgggagg

SEQ ID NO: 723591 - DNA, 144 bp, Homo sapiens
ccgggtacttgcgtccctcagatctacttttctaagagccatatgccaccccaagtggtatgtcggccatccctatatcttctggtagggccggcagcctgtgaggccctgtccccgttccgactcgtccccgcccgcgggccg

SEQ ID NO: 723592 - DNA, 105 bp, Homo sapiens
ctctacaggatccccagttacgcctcaccggctagccgggcagacaggagcgtgtgcctgtctacctctctccgtccctggacgtgtgtctcggcctcatctgat

SEQ ID NO: 723593 - DNA, 164 bp, Homo sapiens
agatgtccgatacagttcctacagcaattttttatatactgaactctcttatatccccgatgggcgtcagaatggagagtgtatctctacagctccttctagagcacaagcaggcttaaccatgaatcttggggacactggtactcatacgattcacaaaattc

SEQ ID NO: 723594 - DNA, 467 bp, Homo sapiens
  misc_feature (213)..(213): n is a, c, g, or t
  misc_feature (344)..(344): n is a, c, g, or t
  misc_feature (413)..(413): n is a, c, g, or t
  misc_feature (464)..(464): n is a, c, g, or t
ggaagattacctttctgccccatccccttttcagcttcccttccagctgagaatcactttcattggcaataaaatctcccacatttactattcttcaatttgtttgggcaacctcatttttcctggatattagacaagatcttggcagccatgagcatggatgcaaagggcctactgagatgttaacacttaaaccgttcgtggatggcaganctgaaggagcactgtaacacaccctccagggctttgggagtcacaggcatgctgcctgaaacagggcctgcatggagtttgctcttgccagtgcccaaaaagtggtcgctcaggctcctgcacccactcanctgctttgctccctcccgcaagggtgggaaatgcagcagtctgagtgagtagagtttgatcccacaggnaccaaatgggcagcagtttcagtgttcatgcactccagttccacccattgnttt

SEQ ID NO: 723595 - DNA, 203 bp, Homo sapiens
ccctatttttcttttttaaaatcataaaccggcagaccagatttggtttgttttgaagaaaaggaagctctataaatttaaatttatattcctgttttttttttttataatttataaatccccagttcttttgccttttatttttgtgtaatttgtaatgtttgttttaaaaccaataaataaagcccagaagtttaatgaga

SEQ ID NO: 723596 - DNA, 1139 bp, Homo sapiens
gagccctggggccccgcgctccgcctgcagtgaagtggcgttgcatttcccgtggggtaccctctgagctgccctcttgtgactccttagctggggcgtgctggtcagacaaatgtgtgccatccgtggccggagtgtgcgacccatgatgtgatgggggaatgatgcctgccggacacggtgctggaggcctggcagagtccgacgctgcgtcccggaggtggccgcatgtggcccccaggctgctagggccgcaggccgggactgtggccgctgagcgctgtggccgcgaatgccccaaaccggccctgctttggggctcaccggcagcataccagaggcgcgggatcgagactggatggtgccctgctggccctatgtgatgaccgcatgctttgtcctattcgccaccccgacatatccaaccgctttgtgaccgcagcctgaccgcaccatctggtcgggggatcgacgaactcactttatggaaccacaagtggggcaagtttacctatagtcaacccgttacaattcttccttttgaactgtgcaccccgtccccatgtggcacatagcattgcttgaataagggatctttggccatgggcctacccctgaagatgggcactacggcattgggttaaccttttcgtgtccccaaacaacagcacctggtgggactaacaattcattgaacgccattcaacaacgtcttacccttggcgcacattggatgcaacgcagtttacccttggttggcaattttcccttttgaggcttacccattgtggctttaggatacccacctcattttataggcacgtataacccttccgacgcttggtaccataggggaattacttaggacccaatagtgcttaccacgctatcgttgtcgggacagtgagccaccttggcgtgtcgcaaccaaggtccgtggccacctgtccactattcaagccagtttatgggaacgagccggggacaactgtccccttcagtacctccagatgtctacacgctaaggttaccaaattacccttgtacctatggagcccccatcaactccagcttggaaagtggatacacttatcactaccatatgggtcgcttggtcccaaagtcgctctgaacgcatg

SEQ ID NO: 723597 - DNA, 1359 bp, Homo sapiens
  misc_feature (428)..(428): n is a, c, g, or t
  misc_feature (1029)..(1029): n is a, c, g, or t
atagggtgttgtttgttgtctccttctggtgggtgcccccgcttgttcgcttgtgttgtggtgtttcaccgaggtgtctagcgggggtcgtgcttcttctcctcgttggtgggcgtcgccacatggtgtgttgatctcctgcccgtgttggttggtggattatctcgtgccgggggagtcgacaaataatttgacgagggggtgtacttatcacgcgtggtggagcacacgacccggttgtccgccgcgcaagaaagttgtgcgaggtcttcatccggcgaccctcccgggggggtgattttgaccggggggttctctcgtgcgccccctctctctctattctggggctcccccccgccgccagaaagtgcgcgctttttattagcgcgcgcgagcgctatttttacacctatatagagttgggcgcngtgtatacacacccccccttgtgttttgtggagcaccacacacaagagcgcgcataaacatcttgtgcgcgcgcagcagagatgacacccgcagaggatggagagagagtgtgtgcgcacagcgcgcgccttgtatatatgtgtgtgtgttggtctgttgtgtgtgtgtcgtgtgtcgtgtgtgtggtttgtgttgtgttcgttcgttttgtttgttggtgcgcctgtgagcacttctcacgcgagattttatacacacacatcttcgtgagacacgcgcgtgaagaggggtgacacacgccacagcgtccgcgcgtgtgtgaaagcgcggcagcggccacatctcgccgctcgcacacaagtgtgtgcacacacacaggggtggccccgcagaggagacctttgtgagatgtggcacacacatgtgtgttgtgttgtgtgtgttaaagtatgggtcacagttctcacacaatatatgagagagatgcgcacatgtgtgtgtacacacgcgagaagtgtgcccctcttgccatctctctctatatagaacgcgcacccccggcacactcttctctctctctcataagagagagaaattggnccacacagtgtcgctctctctctcaacacagtgccacacacacacgcggagagagagtgatgaatataccactctgctcttttctgtgtaaatatatagtgaatacgccaaatattttttaatatctttcccctctaataactctttttatatttgtgtttattttgaatagatagaagcctcttctggccccccctctccccctctttttttgccccccacctctgagaagtatgaaggcttttggtctccctgggaatgggtggagcgccaccccgggcttaccctgtaccctgacttgagaccccgttgaatataaagtgcaccccc

SEQ ID NO: 723598 - DNA, 429 bp, Homo sapiens
ttatcatccatggtgaggagggcagcagggggactatttcctcaggtgaggtctttagttaggcctctgagcccaagctaagccatcatatcccctgtgacctgcacgtatacatccagatagcctgaagcaactgtgaaaatatccttaactgatgacattccaatattgtgatttgtttctgccctaccctgactgatcaatgtgctttgtaatctccctcacccttcagaaggctctttgtaatcctccccacccttgagaatggacttggtgagatccaccccctgcctgcaaagcattgcccctaactccaccgcctgtcccaaaacctatgagaactaatgataatcccaccacactttgctgactctctttccagactcagcccggctgcacccaggtgaaataaacagcctcgttgctcac

SEQ ID NO: 723599 - DNA, 969 bp, Homo sapiens
cagcgagcgctgcgtctcgatgtcctgagcccgtgcgtctgtctgcgatccgaggcctccggctgcgcgtggattctagcgtgcgaaccggagaccatgggcaaaccagcacagggtggcaagtaccggggtctccatccatgacttcccaggctttgacccctaaccaggtatgcctgaggctcgtgtacacgtggcatgaagggcttcggcatgtgacaaggaggccatatgtgacataatcaacctcagggagcaacagtgcatgaggcagtgatggtcgtgccagatgcatacagagatccgctctactggcaaagtgaccatcactttgctggagtttaacaggtatgagattgagcggagcgacacgctttgagacgtgttgagtatgctgaggccgtgagtgagggccacgcatgcacttagttgatgactgcctaaatgcaacacttacacatggatggccgaatctctgtgggacactagtgcctagctgcatcgcaagcaaagtgcccgtcgagttgaggatcttttggcctttgccccggggacaccacagtggaggccgaaggactggccacctagttgtgtggttgagccgacggcaattaccagacatgattagtccttaacaggacgacggggggaccccttggccatggcctggagcgaatcgaatatcgaggcagaagaaacacattcgtaggtacccgacgcactttcgccaggtacaacgcacttgagccttgtggctagacgcatcccaccatggtccattcctcgaccgaggggtaaaacctcacgcaggggcaaccggcgacggaggagttggaaccagggtacatggcctggaccggcctgaagggggaacctcatgggggtataatcaaaaagccaggcgggcagagtggatttcaccaggggggacccgcgtatagataacgccagaaagggcccaatgtggag

SEQ ID NO: 723600 - DNA, 246 bp, Homo sapiens
cgctatctgtggtgtaccgtggctgtggaggttaggttgatcctcagcctggtgcagtgggtttaaaggatcctgtcttaccacagctgcgggagtagatcacagccgtgggtttgccaggtcccaggaacttctatatgtctaggggtaacaaacaaacaaacaaacaaacaaaacaaaacaaaacaaaaaaacagaaaacaacaaaaaaacctgcagtggctcagttggctgtggaggtatagg

SEQ ID NO: 723601 - DNA, 133 bp, Homo sapiens
ggctggctgtgctggctgtactagctgggctaggagctgtggaggctgctgttatgtgtaggaggaacgccgtcagttggaaaaggagggagctgctctcaggctgcgttcagcaacagtgcccagggctccg

SEQ ID NO: 723602 - DNA, 704 bp, Homo sapiens
  misc_feature (9)..(9): n is a, c, g, or t
  misc_feature (74)..(74): n is a, c, g, or t
  misc_feature (76)..(77): n is a, c, g, or t
  misc_feature (87)..(87): n is a, c, g, or t
  misc_feature (106)..(106): n is a, c, g, or t
  misc_feature (122)..(122): n is a, c, g, or t
  misc_feature (138)..(138): n is a, c, g, or t
  misc_feature (143)..(143): n is a, c, g, or t
  misc_feature (258)..(258): n is a, c, g, or t
  misc_feature (260)..(260): n is a, c, g, or t
  misc_feature (266)..(266): n is a, c, g, or t
  misc_feature (276)..(277): n is a, c, g, or t
  misc_feature (289)..(289): n is a, c, g, or t
  misc_feature (299)..(299): n is a, c, g, or t
  misc_feature (318)..(318): n is a, c, g, or t
  misc_feature (383)..(383): n is a, c, g, or t
  misc_feature (443)..(443): n is a, c, g, or t
  misc_feature (502)..(502): n is a, c, g, or t
  misc_feature (598)..(598): n is a, c, g, or t
  misc_feature (604)..(604): n is a, c, g, or t
  misc_feature (616)..(616): n is a, c, g, or t
  misc_feature (618)..(618): n is a, c, g, or t
  misc_feature (624)..(624): n is a, c, g, or t
  misc_feature (627)..(627): n is a, c, g, or t
  misc_feature (632)..(632): n is a, c, g, or t
  misc_feature (640)..(640): n is a, c, g, or t
  misc_feature (666)..(666): n is a, c, g, or t
ggcatctgnggctgccacactttccaagacagacaaggggaactctccaagcagaggggaaacaacttccaggngnngcgcttcaanggcgctggggggggggggngggggggggggcggcntggcgatggggggggngaccnggggggcgggggtctggcgggctgggcacacctaaccctcatctcctggtgactggaggtcacactcccttcttcaggggtgccatgcagactctggacaatctaacaggcgcangngtctcncggggggggnngggggggggggngggcatgggntcgggtccctgggggtggngggggggggctgggggggcttcccctctggtggggggggtggccggcctgggtccttgcgttctnaaactctaaagtgcttataggaatcagctgggggtcttgctaaaatgcagggtctgagtngggaggtatagggtgaggcctagactctgcattcctaacaagctcccaggtgtcactgncgctgctggtccacagaccacactttgagttgcaaggctctggtcatacattgtgtttgtgcacatcagagaaggatgcctcttcttcaacaaggnggaacnccactccagggnanaaggcnggnggggncagcgcanctgcacaggacttcagcccccacttncccccaacacacacagatgaactcggtagctctggaga

SEQ ID NO: 723603 - DNA, 402 bp, Homo sapiens
tgtattggcacagggaccacacaccgtgccagatcctctctccataccctctccctgaggcagtgggcttgtcttgcagaggacgtggtaccaagagaatggcagatgtgattttccaaagatgacagcaagaggctcccccatatcccagatgctcatcttacaatgtgacttggacactccaagtcacatgggggggtacggtgttctctgcccttgaaactggtgtgggcccgtgactaccagtggaagtgacaccatgtgaccttcaaggctaagtgataaaggatgaaacagcttcttgctttgtctgcttggagtgttgcctttggggatccgtgggtggcaaatcttgaggttggcatgcttgtgaggaatcccagggccacatggagaggcccc

SEQ ID NO: 723604 - DNA, 304 bp, Homo sapiens
tggacttttaaaagaagtaagcctttatttccttgtttggcaaaaaaaacgggctaagtgggtggcttttgggggattagccaaagagaccaaatcccatatcctggtccgactcctccgacttttctttggtttcaaccttagctggggctgcagcagcagcaggagcagctgtgggggcagcagccacaggggcagcagccacaaaggcagatggatcagccaagaaggccttgaccttttcagcaggggggaaggtgtaatccgtctccacagacaaggccaggactcgtttgtacccgtt

SEQ ID NO: 723605 - DNA, 311 bp, Homo sapiens
cactaggggagatgcacttgcgtgatacccatggtaaacatggcaacctcccagtccaactacttccttatgataaaccacatagtggataattaactgaggtgtctcattgggagaggagacatcgtgggcaccaagcagatggaacagatttttatgtcccttcacgttaacgttgtggagcttctggggataaagaccattaagcacatcgtcatccgatggcagctggaaaactgtccagctctggcgaaacagtcgccgcacagcctcgggaatgttcgctttgtgttcaacaccgtcgtgctcag

SEQ ID NO: 723606 - DNA, 620 bp, Homo sapiens
agaaaaagctgtctatatcatggataccatcttcttctggggagaaactttcctgtttagctttactttaaggttgccaatgggtgtacagttccaagagtggaggggcccttttgagttgtgagattattaactcaaaatttcaaggtcccaaagtgttgctgcaatgtagatggcaagggcagtctttctctggtattctcagaagattcaatctttgtgttctagattttgaaggggttgattgtcctcagtcagcagactgtgaaaagctttcttcaccaggtggaaatatactttgacaaatagagctaatgttataacatcagccctcttgcatgggaaagcttttatacaaccagaagacatgcattgaaaatgacaattgaatgaaatctttctataaatgtttaaatggctcatcagctagcaaaaatgtacctgaaattttggttgtctttccaggaatatgggtttgaaaagccaacattggttgtaaactcttttagcaacatggaacagtcactacactaattaatacttttttttttattatactttaagttctagggtacatgtacaacgtgcaggtttgttacataggtatacttgtgctatgt

SEQ ID NO: 723607 - DNA, 791 bp, Homo sapiens
tgcagtggctcacgcctataatcacagcactttgggaggctgagacgggtggatcacctggggtcaggagtttgagaccagacctggccagatgacgaaccccatcgtctactaatagaatataaaaattacgctgggtgtggtcatgcacgtgcctgtaatcccaactactctggaatctaatggcaggagaatcgcttgaaccctaggaggctagaggtgcatggtgatgccaagatcacgccactgtcatctccagtctggtgtgacagagcgagcaagactcgtctcaggaaaaacactaacttagggaaagaaaaaaaaaatcgcacatggggactgacctttataggggagcctattgttccgattgggaagttccccattttggcctacgagacgggggagggaaaattaaccaactctgtgagccttgaggagtaacggaggaggtaagggtcataaggcaatcctctccgggctcccggtttcagttgctgaaccctttggaaacccagacaggggaccccgggataaaccgagattcctcagtctccagaagactacgtatatagtccattggacggatttatgggaactcgggattaggcatagtcctaactaaactgggagaattctcctttaacgtggtccccttaaaaaagtaatcaggcgaaaattttcatcagcgaatggtgcattacgggggggatttccaagtttgtgaattttccctcttggggattcgtccagaaggtcccgaatgggaatgtgccacggggtattttacg

SEQ ID NO: 723608 - DNA, 198 bp, Homo sapiens
cttcagccaccagactcaatagctcatcaaaccgcataccaatgcgtcgtaatctgcctcgttttcctggcttgcgcagacaaggcgaaacgaacgtgccagtgctctgccggcactcgcataagtgcgctcatctgattttttccttccatttgtttttctcataatcacggacgcgggtgaagggtaccgagctcg

SEQ ID NO: 723609 - DNA, 203 bp, Homo sapiens
gctgttcagaggagtcccttactcttaagcagaggctggggacatcggatgaatggcttcccctcatgtgatgcctctgtcctagacagtcctaggcgatgtacacgaaggatactattaagcatcctacagagaaaagatgaagagaacatccaggtcacactctaagagttcatgatggctagcatccggcgatgatggga

SEQ ID NO: 723610 - DNA, 239 bp, Homo sapiens
tgttactccaccaggatacctgcagaaaaacctctcccatgcggtctgcgaaatgctgctctgctgagatgggcacaaagcctgtggcagaagagctggattggagtccagcgaggtgctgaccagttgtgcaatcctgcgggcaccgccaaggcctcggctctcccacctgcaaaatgtcctatctgctcacaggtatgcacagggccactctctgcattgagacacgcatatcaggc

SEQ ID NO: 723611 - DNA, 296 bp, Homo sapiens
  misc_feature (95)..(95): n is a, c, g, or t
  misc_feature (198)..(198): n is a, c, g, or t
tggctccagggaaacctgagactgtggccctcgtctctgctgagcgccacctttggacacaggttgtggggtcctcactgcttacctgggctctntgcaccatgtcccttcctaaaggaggaatgagggaaaggagcccaccgggactgcagaccaggccatgccacggcctctctgctagacactcacaggccccancccaggagggcaggctctgtggggaagtggatcacagtcccgagagcctcgcaatcctgaaaaaacaaaaccccccaaacctaaaaaaaaaaaaggga

SEQ ID NO: 723612 - DNA, 462 bp, Homo sapiens
ggcgagattagtggtcagggactgcatctcatcgaaacagttagtggcgacgacttgtgactgcttctggtgtcagtaacatctgtgccccaaatcataactgccaagttcttcgtgtacttggaatctccttgggttacttgtagctggtgccatttctcctcatcgacccaaatcccgcttcccagatggaccttgccattgtctaggatgtacttgtccatgacaggcgcaggagcggggtaataggacgacgtatttgcttcctcactgaaagtgctccgtaactccggctcgggctcgagacattctgactttactttttccagatcaatggcgggaccgctgccaagcctcaggagcagcacgtcctggagcctccggttaaggtcacggagctccttcatttcagacacaagtgccccgtactccttgagcttcttggcctgttgtaccagctgc

SEQ ID NO: 723613 - DNA, 941 bp, Homo sapiens
  misc_feature (298)..(298): n is a, c, g, or t
cacatgacagtctcacccaggataccacatgacatttgtcattatgtctccttaggctcctcttgactgtgacagttttctgtgccctatttttcaatctgctttgagctactttgcaagaggtgctttttcctttctttctttctttctttttttttttttttgggagcacggggtctcctctggttccccaggcgcctagatgttgcggggccccacaaacccaacaggtttaattggcaggctttagaacctccttggggcctcaagggggatctctccacacttaggcctcccnaaggtggctggggatacaacggtgtggttgccgcccaccatggcttgggtcctttttccacttttttggctaaaggcgcctggatggttgggggggtcaaaggcgcggtccattttcttcataaactccttccgagtcagcaacctttggcggagtactttcaccaggttgggcgttcctgaccttattgacacgaccagggggatgttgctttcccccgggtgctaggtgctggcccaggctttccatgggccttttggtacctgcagatcctggttccagtaggtcccaggcaggctgagattttggttcccaaaaaagttccccgttggccccccaggctggcagagcatctggctggcgggaatcagacccttagatggcccagaatccaatataagtggcggggaaacccagggcaccgcgcgcatgcagaacaggttgatacttattttcacagctggcctcggaagcgggctcttcagacacaacacacacgggggggcgggggcaggtgtgaacccgacttgcggccgcgggggaacactgtggcgagtgaacgcgccaattttggagggcgcggctcaaaacaaaggcggcggcgccagcggcgggaaaccgcggggaacaccgggcaagaaat

SEQ ID NO: 723614 - DNA, 242 bp, Homo sapiens
tgactcgtaccgacgctctctctgtgggggagggcatacccctcgtaatgcacagtgtgggtgaccccgtcaccggagtcatcacgatgccagtggtacggccagaggcgtacagtggatagcacagcctggatagcaacgtacattgctggggtgttgaaggtctcaaacatgatctgggtcatcttctcgcggttggccttgtgggttcaggggggcctcggtcagcagcacggggtgct

SEQ ID NO: 723615 - DNA, 106 bp, Homo sapiens
  misc_feature (4)..(4): n is a, c, g, or t
taanctctcccaccaggtgtggcggctggattgttgggtggggagaggtgagatgagcagccttgtgtgctttaagcccagccttcccttcccctcactggtctct

SEQ ID NO: 723616 - DNA, 236 bp, Homo sapiens
gtgaccgtgacgcaagggttggtcatccccgcgatcatcggacaatccgccgccttggtgcacgtctggccgcagtacgtcgtgcctgcgtacgtgttcgttccgaggcccgtctggcagccgttcgcgccgaccgcctcgccgtactttccgccgccctgagggccgtcgcagatggtcacgagacgcttgtccgtgatgtcttccgtcagcgtgcagaggttggtcgcggtgca

SEQ ID NO: 723617 - DNA, 357 bp, Homo sapiens
tcccacctgctgttgcctgctccctagtgtacaggttagaatataagggcccttagaatcttcctaggcagttcattgcctatatgaggctctccagcttgcatgaaaaagtcccttgtggaatttcctcaaattagggtttggcaatactgcaccgtagtcaataccttctagtgtacagctatgggtggtgaaaagagcaaggcctgggaataaagagacctaagctctagtcccattgtagctccaaacccacttgttacatttttggcaaaccacttgccctttgtaggcctaagattcctcatctgtgacatgagggtctgacaatgtaatttatatccctcttagttaaaa

SEQ ID NO: 723618 - DNA, 254 bp, Homo sapiens
gggcccccagaattaaaaaaaaaaaaaaaagaatccccctggggcaacttaaaccccttttttaatttcccccccccccctccccttttttcccccccctttttccaagggggttgggttggcaaaaaaaaacggggaaaggggggcgggaaaaacccgccaaaactggttttcccccaaggattgggggtcaaaaccccgggatttaaaaaaaaaggggggggggccttaaaaaaaaaaatctttctttctta

SEQ ID NO: 723619 - DNA, 1083 bp, Homo sapiens
  misc_feature (633)..(633): n is a, c, g, or t
taacccctccttagctttatgcgcgcagaaaaccaaattaacccccccccccttttaacggggtggtgcagggaaaaaaccaaaaacgccaaaaacccgtgcctggatgaccaccactgtcattgccccccgcaaatttaatccgccctgataaggagaattattgtatttccattcttgctcccatgtgagcatggaggattagaatatttgagtgagtagtacgccctcactgtgggtggagcacatggcacatttgacgcccccttatgtgataaacatcaagagagtggagatggaagaagtgccacttaggtccagagcacgggagcatctcatgagggagaccaagagggctgctggcgagctcacccaccagagaaagtgctcactaagaaagagcgaacgagatcgtgctaggtgcgtgatagagagaacaaaagcagtgcccatcaatacaaggggtagctacaaagagagagaggtatagcatccagaagagagcccacacaatgagaaagagagtgcgcctaccatagggataataagggccaattagaaggagcattcaggcccatgaaaatgtgagcacagggtgcgggacataacgcgatggtgtgtgtctctacaacnaccgaggagggtagatcacccaaatacaggagcaagtgagggtcaataggtgcgttgcgacccagcacaataacacgacacaacaagtaaggaagaagaaaaacaccacagccccgcatattaacaagcatacagaggagaaacaaaacttagaaccaagaccacacatagaaaaaaacgacgatggacgagagaatcacaccagagaaagacaccgaaagacaccacgggaggcaaaacccacctgaggggcgaaacaaagaatggcggaataagcgaaccagtcagaaacaggacaaagacaagacaaggagatcgtgaacaccccagcaaaacgggaaaagaagtgagatggacgagaccaagacgaaaacgaggatgatctcggacccccgcagaacccagaagctcgaggtgaaaatcaataacgagaacaccacgagagtgacc

SEQ ID NO: 723620 - DNA, 694 bp, Homo sapiens
  misc_feature (35)..(35): n is a, c, g, or t
  misc_feature (73)..(73): n is a, c, g, or t
  misc_feature (79)..(79): n is a, c, g, or t
  misc_feature (92)..(92): n is a, c, g, or t
  misc_feature (100)..(100): n is a, c, g, or t
  misc_feature (104)..(104): n is a, c, g, or t
  misc_feature (109)..(109): n is a, c, g, or t
  misc_feature (113)..(113): n is a, c, g, or t
  misc_feature (127)..(127): n is a, c, g, or t
  misc_feature (131)..(131): n is a, c, g, or t
  misc_feature (150)..(150): n is a, c, g, or t
  misc_feature (153)..(153): n is a, c, g, or t
  misc_feature (163)..(163): n is a, c, g, or t
  misc_feature (168)..(168): n is a, c, g, or t
  misc_feature (170)..(170): n is a, c, g, or t
  misc_feature (195)..(195): n is a, c, g, or t
  misc_feature (244)..(244): n is a, c, g, or t
  misc_feature (272)..(272): n is a, c, g, or t
  misc_feature (291)..(291): n is a, c, g, or t
  misc_feature (314)..(314): n is a, c, g, or t
  misc_feature (331)..(331): n is a, c, g, or t
  misc_feature (369)..(369): n is a, c, g, or t
  misc_feature (376)..(376): n is a, c, g, or t
  misc_feature (389)..(389): n is a, c, g, or t
  misc_feature (391)..(391): n is a, c, g, or t
  misc_feature (394)..(394): n is a, c, g, or t
  misc_feature (551)..(551): n is a, c, g, or t
  misc_feature (563)..(563): n is a, c, g, or t
  misc_feature (610)..(610): n is a, c, g, or t
  misc_feature (685)..(685): n is a, c, g, or t
acccacaggggaagttgggggcagacacccttctnttccggtacccttgaacatggtgtcagggtgtggctanctcganggacaccgaacanctccacangganggtantgcncaaggttttttgcntccnctaaaatgtcccgcacttnctnaatgcagctnaaacnangagcagctcccccaagatttttgtntgcttcatccctggatcaccatgtcaggtggtgtctgttcttaatatcnaagttcaggtttcacggtggcgtatggncagctcctccccatatgtntggttacaatatgtaaactgggnttgctcctcacctagcntgcaggaaacccttggtatctcacttattcaccttctnctgggtnttttgctcaacancnaanttctttttcacttggttgggtcccagcatgaacatggtggcatggcgggccctggcaccatggagaacagcctgctgccagtgatggcctggatctccaagacggcctccagcactgtcatgcccttgaccagctagtgctggtacaggacctgggnaacaggcatgtncttgggcgtgactggctcaggggcagaggacgaggttgaggaggaanctggatacccctgtccatggtgggctggggctggaagggtggctcagtggcctcgaagtgccgggaggactccanctggcacca

SEQ ID NO: 723621 - DNA, 800 bp, Homo sapiens
  misc_feature (252)..(252): n is a, c, g, or t
  misc_feature (431)..(431): n is a, c, g, or t
  misc_feature (564)..(564): n is a, c, g, or t
ggtatgaccttgaaccctcgacgaacgatgatggcggattctctggtaaggctgaagtggcgtgtgtggtgccctaggaggggccgtaagctctggttgccgttcggaaatccgagcttgtgctcaagcacgcgtgtctcagtatctcgaggcgcattgacgttcacgagaccggacgcgtatcccaagaattggtgtcgtgagtcgcaagcacattatcgacttttgctcacctcgatgctaggactattntctcggcgtccaagatggcatgcttgctcttcacgacttgggaatcatcttgcagaggacgggtgtgggtccgcgtcgttatgggctccaatggagtcattgcttgtccaggcatgcatatgattgttgatatccgtgagctcattgcttatgggacttatgtcgccattggactgcangcgccatcgattcctctccaatggtccacatgcgtgtgcccgtgagacgacatgtattgtatacctcgaacatcatggttccataggggagatggccatatgcaagataagcttcgcgcagaggtgcaagagnccttgtgtcacttgtctatgctgtgtaagactattgcctggagcgcttggcgaattgacacatcgtagtcatccgactagtagtgcgaatcatcgcgacaagctgtttgaccaaagcttgtggagatgctctggaccgtgtatttggacttttcaatatcttggatagaacttgatgtgtatagccctctttttgccatcctgcattttcgtctgtgcccaattaacgcgtcaaca

SEQ ID NO: 723622 - DNA, 606 bp, Homo sapiens
agcgggcgactcgcggatcgtcacacggtcaggccacgcgcgtcaacgccccgggctctgctaaaagtgcggggtcagattcctttcaggtgactgggttgggaggagaagtcgctcacgtaattgtcggagccgaaataaacagagactccgcgtcgggcgtgacttacccggaagtccccaaacagcactacccttcgctgaaacctcgggcgccccgtcaagccagcagaccacgggaaagcagtcacggccagaaagccgttggaacaaactccacaggatactctcgcgggccgagacaggactcccataagttcacgcgcactggcccccgagggattgcacagggctgaacgcagaagggcaacacggtggaccttgcaagcaggggtcgaggctggcgccccagccccggagccaaggagtacccgggcagcggaccctccccagaaagggcggagccgacgagcactcttcctaactgaccggagcgcgcagcctgctgccgaggccacggagcctgtcctgctccatccggtcctcctggcgccgggggtgctgaaacagcccgggggacagtaaagccgctccagggggagccca

SEQ ID NO: 723623 - DNA, 888 bp, Homo sapiens
catgtagattaccgtgttcgcgtgcgctcatgcttgtcgtctgtagcgcggcgtgttcctgtactgtttgtcagttggcgagtgtttgtggccttggtcctttccttagctttcccccgtggcttgcttcgcgcgcggtgctgggcgttgttaccgtgccgttgtcccctccgacatgggtccccgccgtgatcctgggcgcatgtttcccgccctggtcgttggcacccagctttttgtgcttgcaagctttcctcgccgccagccgcgtggtgaaccgcattgttacccaaaccctgaggttcacgggcccaacaatttcaatattcgcgcccgggattcaacacccaatagaattgttgtctgtagtcacaacctcctaatttctggacgcagctcccaccgctgcgaatataaaatccttctttctaacagagacgttccacaacacttactcgcccacccaataaaagcggttgttgaggagcttttttagcaaaacgctctccgataaacctctgtcccttatatccccccctcgtttaacagctccgggggaaatcttctgtggtatattgaacaccgcgtttgtctgaggcacaaaaattcaccttttccttccgacacggagtctccaacacatcatcttgtgccgaccagccctataatagaccctcctgaacataatttttgtacccaaccacaacacaattgggggcgtcacacatcaaagcaccccagcaacggttagccacaacaaataaaacccctccgttgtacgccccgaggaacaacccgctcacaggttgcattaacacacctgttccccccttttcccccttttcccccaccccccaacccttcccgggtttcccttttaaaaaaaaa

SEQ ID NO: 723624 - DNA, 424 bp, Homo sapiens
gcggaattggcgcagtcttaaaccacaggccacagagctggagctggatataccatgaaagacttctgaatccaggaagagagactgactgggcaacatgttattcaggagatggggtctcaccctgtcacccaggcttgagtacagtggtgctatcacagctcactgcagccttgaactcctgggctaaggatcctcctacctgagcctcctgagtagctaggactggtctccctctgttgtccaaggctggagtgtagtagtgctatcacagctgactgcagcctcaaccttcctggcttaagcaatactctcacctcagcttccctagtagctggaactacaggcatgcaccacaacacctagctaatgcttgtagatatagggtttagccacgttgcccacgctggtcttgaactcctgg

SEQ ID NO: 723625 - DNA, 179 bp, Homo sapiens
tcggacccctttagatgatctgcctgatggagacagatgaatgagagggagagttatcggggactccttcagatctggggaccgcttgggcccacattgtgcccgggtgccgttaatctgctggccttgcccacacaggtgcagccccgacggtatctgaagaagctccccctcatagg

SEQ ID NO: 723626 - DNA, 140 bp, Homo sapiens
aaacctgggcctctcgctcaacgaacatcccgctcaaccaataaggcatgctcataaggaaaggttaaaaaaattaaaaggaacccggcaaatcttaccccgcctattttacaccaaccccatgttcggttgagcggaga

SEQ ID NO: 723627 - DNA, 100 bp, Homo sapiens
cgcgatgactatcacctcctaaaggactagaggaaggcatcaaacgctgatggggaggctggaagactggcagccgcgggactgggcagatcctcaagca

SEQ ID NO: 723628 - DNA, 381 bp, Homo sapiens
  misc_feature (9)..(9): n is a, c, g, or t
attcgcggncgcgtcgacatagaaactagagcatagcttccataagattatgggcaaatagtccaggcacggtggctcacgcctgtaatcacagcactttgggaggccgaggtgggcagatcacgaggtcaggagatcgagaccatcctggccaacatggtgaaaccccgtctctactaaaaatacaaaaaaatcagctgggcatggtggcgggctcctgtagtcccagctactcgggaggctgaggcaggagaattgcttgaacctgggaggtggaggttgcagtgagcagagatcatgccactgcactgcagcctggtgaccgagcaagactccgtctaaaaaaaagtcgacgcgggcgcgaatttagtagtagtagtt

SEQ ID NO: 723629 - DNA, 141 bp, Homo sapiens
cttattgtggacctcttactttttgttttatttatttatttattttgagacagagtttcgcttttgttgcccaagctggagtgcaatcgcacgatctcagctcactgcacttcggcctgagcaataagagcaaaactcctc

SEQ ID NO: 723630 - DNA, 180 bp, Homo sapiens
cggcacgaggctgaccctgggccctgagaagggagcagcgggtggcctcagctctggttgggttgggctgttccccgctgagggttggttgagtctccaggctgagtgggagtccccagactttcaccagttcagagcaaatcttttgagtctttagaaggagttccttgtaaagaccca

SEQ ID NO: 723631 - DNA, 888 bp, Homo sapiens
cggacgcgtgggtcgacccacgcgtcgattatcctcctgcttgcaactaatagcaacagcccttcataggctatgtcctcccgtgaggccaaatatcattctgaggggccacagtaattacaaacttactatcgcgtcagtcccatacatgtggacagacctagttcaatgaatctgaggaggctactcaggtaaacagtccacagccctgcacacgattctgtataactttcacttctatcttacccttcattgattgcagccctagcagcagtccacctcctattcttggcacgagaacgggatcagaacaaccccctaggaatcactctcccattccgataagagtcaccgttcggcacgcctgacgtacacaatcaaagacgccctcggcttacttctcttcctgctctccttaatgacattaacactattgctcaccagagctcctaggcgaccagacgaagtgtacaccctagtccaacccgttaaagcacccctccgcagatgaggcccgaatgatatttcctattcggctacagaagttggtccgatccgtccctatacaattaggaggcgtccttgtgctgattactatccatcctcatcctaggaataatccgccatcctgcgtatattgccaaacaataaaagcagtaaatatttcggcccagctaaggcagatcacgttgattgactcctagccgggagaactactcattcttaactgaatcggaaggaaaacagtgagctacccttttaccgcctgggccaaggtggcattcgtacataggttaaagaaatctaagctatccgactaactcctatggaggaactatccatgggtaaaaacacaacggacaaccaagagacacgggggcgtaaatc

SEQ ID NO: 723632 - DNA, 789 bp, Homo sapiens
  misc_feature (437)..(437): n is a, c, g, or t
ggggctgcgcgcgtccctctgggtgagttgtttttatttttgggatccgtgcttctgaccccaaggttccacatctgccatctgtgatagaacctgctcgctcaccagtgcccaggctctcggggctcctggttgtcctctggtgcaccagctcctgctgtccttcacggttctgaaaagattctccattttctgtcttgtttcagggctgcaatctagatgttttctttctattttattcattctcttttcagctgaagtaatcttgtttaatgcagccaccaaggttttattttcagtgcctatgtttttaactctagaagctcaattagtttattttaaattaattttttaatttaaaagagatggaatctcacttcagaggggtaaaccttgtgtgatgtaggtggtgagctagtttcttcagcacagatatngtttgcttctgtgagagccatgggacaccatgggcctcagagagctgcagcctatgtgggaatcgagtccactctctcccaggtgccgctcatctcctggtctgtccatcctttcctcccaagaacacctcaatggtttctagctcttggggtttatattacgttttggggtcctactatttatttacttattttattttcgagacaggttcttcgctccccaaccaggtggagtggcgtggcacctcatgggtaaccaagctcaagcctcccgggttaggatcctctgccaaccccagtttggggcccaaagccctgctgcacccggttggatccaaaaaggggccaatcg

SEQ ID NO: 723633 - DNA, 518 bp, Homo sapiens
agttcgcacaagaagataacccactttatattacacatatcgcagacacatactaatgtaccaggaactacaaactaaggcaaatgaacaagctgacttgcatagatatcatctgccttcatggaagcaacaagaacttcaggccctgactcatgtaaaatgacaacaggattaaaaaccaaatttgatctcacatggacacaagcaaaaaatatagtaacaagattgtgctcagaagtaacgtcttaacacctgcccaatcaagaggcaggagattacatcctagaggtaaatgtcctgaagccattatggcacaaatgagaaaatcacacatgtgccttcatttggacaaactagtcatatagtccatgtgaccgttgctacttctacacacatacataatgggcacacctgccagaaaggagaaagtaccttcccatgttaaaagacatttattatctagtaatgcagacatgagcagttccagacacaattcacacagatcctaggcccggatc

SEQ ID NO: 723634 - DNA, 114 bp, Homo sapiens
tatactcagaacgaaagtcggagttcgaagacgatcagataccgtcgtatatcgacataaacgatagcgacgggatgcggcgggttatatccatagtaccggcggtaggttcgg

SEQ ID NO: 723635 - DNA, 124 bp, Homo sapiens
  misc_feature (28)..(28): n is a, c, g, or t
  misc_feature (41)..(41): n is a, c, g, or t
  misc_feature (60)..(60): n is a, c, g, or t
  misc_feature (86)..(86): n is a, c, g, or t
tttatgagtctaggaatcatatcaagancatctcaaaatanataaataatagaggcagtntctgctcaagaacgagaacacccgcnagtaattgtgcagcttcctctcattccctgctacttgt

SEQ ID NO: 723636 - DNA, 136 bp, Homo sapiens
ttaaagtcatatgtctgatatgagtatgcaactcctgcttactgtctggtccatggcatgaagcattattcccatcccctcactttcaatctataagtgtcctttgccctaaggtgagtctcttgtaagcagcagg

SEQ ID NO: 723637 - DNA, 1433 bp, Homo sapiens
  misc_feature (1148)..(1148): n is a, c, g, or t
  misc_feature (1151)..(1151): n is a, c, g, or t
ggagaagcatgtggcaccgacgaccgttcgtagcgtagcgagcttgcgcgtggcccctggaggagcatccatctgctgttgacgcgaggccccgccttgtaacccgcaagggacttaacatgagacgaagtatagacctcacgattatgttcttgaagacgcttcaaacacgcgccggggcaatagtacagtagtccatccaaggcccgtgacttgtcccgtcatactgcactctgcgtgccgacactcatctgagcatatgtacactgtgcactcattggtagggacggcgggtcacacgcggcatcgaggtagccccactcatagcggaagtgtgcctaaagccgctgcctcctcgacggcgcgattccacttgccgctcttgtgtagctttaggtcgtagtgctcgggtgtatctgacctcgagataagcgctcaattgtataggaactctcttcacgtggatgcccgtagggcattagcgaggactctctgcgacctacctgggcccagacgtcgagcgaaacgtcggtgcccgacgaacagtacagaggacgtaacgctggtggctatcgtacgggccttgggactttgccgctaagtgagggcatgtattggcctaattcggaccagacccatggccttcacatctttgtcttccttggggcagtcaatacgagaacataacaagaaagacctcgatcccagaaatcgtgatcgagagattcaattccatcgcggaatttggtggtagatagaagtcagcggtttcgctgggctaggtgccatggacaggagccgccatgttctccccaaagtcggcgtgttcgctttaccgttggggtgcctcagttgtggaccatttcgttttcgccagaggcaagttcacgaccagaaaaggaactccatccctttccgagacctttcccaggtctcgacgtcgaagaggtaggttagacaccgtgggggtaccaattcggtgacttgggaagaaccctgggttacttagaccctaagccaaacgcgtgtgcctggaatccgcgggagccggggcaattcgggggccaaatcgtcaacccggggagtcatgtaggcccacagcggatggggacattggcacgataacgtccgacaggaattcaggcgcngtncccactttggttgcatgccctcatggttacgagacagtggaaacgaagattagagggactacgagtccggctagctccactcgaggaagaccgtccaacgctaacatccgggatcgttgcggaattccgcgacgaggcgtccacaataacctcgtgttggccgtacacattgctactcacaccttgtccactgtgctggacttttagcgactttataacgcaccggcatagggaggtaatagaataaggttgcgcgagccccgttcccatacagattcacag

SEQ ID NO: 723638 - DNA, 600 bp, Homo sapiens
ggcggggcgcggtggctcacgcctgtaatcccagctctcagggaggctaagaggcgggaggatagctgtgagcccaggagttcgagacctgcctgggcaatatagcgagaccccgttctccagaaaagcggaaacaaaaaaaaaaaagccaagaggaccaaaaacaaaacaaaaaaaaaaaaaaagtggtggggggcgcgctctggggccccgggaaaaggctttcaagaaaccacatctcggggtgggacgcgacgcgggggggccccacaagtgagtgggtaacaggtgagcaacctgggggcaatagaggcggggttccacacaaaggagagaccccggggagcacagagacacagggggcgcggggagtctctcccacacaaataaaaaaaaagaggcgccgggggggggaaacaccggagagcgtggtttctcgtgagcacaacaatttcccacagcgagggggaggtatctacgagagagggagacaatatacaggggggagcagtttatataacaaagggggaggcgcacaagagaggaaggacccaagaattttcacaaatttaacgcccgggagtctggtgggtgggacac

SEQ ID NO: 723639 - DNA, 342 bp, Homo sapiens
ggtataccgtcaattcccttaccagaacggacaggcggactccacgggactgggaggggttcagctaagagtcgatcgaaggtgaccacgaggttaaaaacagcggatgatgccaggtgccaagaattttagatttttacttgggcaaatacgaggctgacggcatataaaccaaaagaatactttcagaataggggactctttaaaataagcaactgagtaatactttatccgaatacagaaactggagaaaagggatccgacctcagaaaactattctcttcagggacggacggtaattggcatagagttccctggggcgggcggtgttttgttttcttt

SEQ ID NO: 723640 - DNA, 806 bp, Homo sapiens
attaatgaacataatataacgaaacatatgtcaaacgctcgtcatgatataattgatgtatccattgtgtcgtatgggccagaactttatgattcaggacatctgctcaagccaaatgagcacagagctaatgaacatgtccatagggcgacatgtaagctatgaaagctaaattgtctcgtgcctacttcagacaggggctgtcgtgtcatgtctggagtctttgagtcacagaaactcagggaaagtctgtcgtggcatccaagaagatacatagcagattagggatgtggttggatcacaaggtcacattatatgcaagatgtttacttctgctagaatctcattatctgtattctagcttaccatactaccatcgtgtatctttaccaagaggatcctctgtgcgaagagcaatttcctggactgtctgtgaaaggaattttttctacatcctgaactatttttcctattatcttttcaccttgctttatattcatcctataatttgcttgtcatcacaatgaacgtatgttttgcgaatcatcaattctttctcattctccatttatcttgacaggtccttttggcccttattaacctctcaacttttattgctgtatactagtcagaccagaacatacgttccactacatcagttacttggcatcgatttcacctcagttatattattgccaaataataatttgtgtcagcatttgcacctattgggttattcatccaaaccccttggatctctttgagtctaactgataatctccactgggaaggtgggattgaatgtg

SEQ ID NO: 723641 - DNA, 126 bp, Homo sapiens
ggcccctcctttatggtgcgggaactttttttgtcttccctttttttttcttggcccggaattttttgtaaattatttgaagcaaatatggaaacttttcaataaaaataaagataggccccccga

SEQ ID NO: 723642 - DNA, 144 bp, Homo sapiens
  misc_feature (39)..(39): n is a, c, g, or t
ctttttcttttttttaaaaaaaaaaaaaaatggggcccntgggggtccccccccccccccccttttttaacaaaggttacttgggccgggaaaaatttgccgtctttggaattttaaaacctttaaataaattgggaaagggga

SEQ ID NO: 723643 - DNA, 632 bp, Homo sapiens
  misc_feature (567)..(567): n is a, c, g, or t
gggagagggggtctcagtcatccatgatacagggtgggtcgccaacggggtagtgaggtggaatgggaagaactagccatccttaagtggaccagctcaaatgctggtacctcccagaaatcttcccgggttcattctgggccacctcggtctcaacagccttgccttgcccgtggttctccctgacatggtccccaaggggtctttctggacatccgagagctgaccccatctctggtggacagcatcccaggggtccctaagcatgtaaggacaggtccagcggccaccatctgggccttccagggctcttccccaagcggtgtggcctcagggacctccacccaaccccatctcctcccttctctggctgccatcctcgggaggggacgcatccctcatcgggccacgttctctcaagcctcccgggcggtgcacgtgtcctttctttttcccttagaacttcctggtcctgggccaggcacaggggctcaggcccgtaatcccagcacttggggaggccgagaagggcagatcatgaggtcaggatttcaagaccagcctggncaatatggtgaaaccccatctctactaaagatacaaaaattcccaggtgtgggggggccgcctgt

SEQ ID NO: 723644 - DNA, 158 bp, Homo sapiens
gctagatggtagagtagggacagagagtcatcagcggtcggcttaaattttaaaaacgcagaatgggttcatccatctctccggtgatgggtctgagggcaaacaataaaaacaatggttttagaaaagggaattaaacacacacgaggggtaccgag

SEQ ID NO: 723645 - DNA, 230 bp, Homo sapiens
ccagctagtggtagtgagcagagcggatctcagtgtcaagagaacaaaaagaaaagcaaatactgtatgtacttactatgataagtgggagctaaacagtgggtacacatgaacacaaagatgaaaaccagtagacactggggtactccaaaactggggacgggacgacatcgggtataacggaactggaaacacctgccgtgtagtggtactagtgcgtcagatacacc

SEQ ID NO: 723646 - DNA, 389 bp, Homo sapiens
ccctggactatgtgttatggtccatgacaggataagcacagaacttgagagtaagcatttagaatattttatagcaatttgacatagtaattttatgtgttgaatctaattataaaaaaagggcttgggccaggggtggtggctcacacttgcaattcccagcacttagggaggctgaggcgggaggattgcttgagcccaggagtttgagagcaacctgggaccctgtctctacaaaaaataagaattagccaggcatgatggtgctcacctgtggtcccagctactggggaggctgaggtggaaggattgcttgagcctcggaggtttgagcctacagtgagctgtgatcatgccactgcactccagcctaagtgaggccctgtctc

SEQ ID NO: 723647 - DNA, 332 bp, Homo sapiens
  misc_feature (129)..(129): n is a, c, g, or t
  misc_feature (134)..(134): n is a, c, g, or t
  misc_feature (168)..(168): n is a, c, g, or t
  misc_feature (224)..(224): n is a, c, g, or t
  misc_feature (303)..(303): n is a, c, g, or t
ctccccacctgcatctgatcccgctggttcacttcctcaaacgataccctctcaaggagacctaccctacttgctgcaacatgcccgccaccacccagaatcccctgctccctgcaagttcccaaactnttgtnaccttttaacgtccttccttaagcttatcctgtntccctcactagagtgcaggctcctccagcaggacacagcccctaaccactgctttnctaactgctgcagggtgcctagcacacagcaggcacttttttcaggtgtgccagggtccagctacagctggtatggttncccagaggcagctgggggtgtgggggatt

SEQ ID NO: 723648 - DNA, 230 bp, Homo sapiens
acaatcagactggacgaagttgttgcacacgccgagtgtcatacgccgcaagtcgcagtggacgaagttgttgcgcaacaacttcgtccatcctgatctgatttgaagaagtgtgtggttcttcggcgtgtgctgcacacgccgaatctccacacaccacacgccgaatctccacactgcacacgccgagagcccagaccccttggtgcaccaggtcctgatggacgaag

SEQ ID NO: 723649 - DNA, 93 bp, Homo sapiens
gtgcaaatgccaaccaagattcatcgaacaggccacatcggacagtgttcacccgagccatcgaggcatgcgatctccactggcaggatagcc

SEQ ID NO: 723650 - DNA, 447 bp, Homo sapiens
tcctcgagacggattttttctgtgtttgccaggttggaatgcagtggcactggtctcaggttaaatgggaactcccacctcctggattaaaaccattcttcctgattcgcgcttgcaaggtatgtgggaatattaggcgcccacccacacaggcgtagcttaattggttttgcgatatatatagaaagaacaagtgggggcgcgggcgatcgtgggggggaggtggtgcgtggaggggtgacgcgagataaggaccggcgtcgcgtaggatgagagactgggtggagacggaagtggcggctcggaagggcgagagagaaataagaggaatatcggggggaggtggagaggggggaaggacgagcggtcgggtggagggggcaggggaggcaaacacgggacgacgagatgggtggagaaaggacggggcgagacagagaggggggg

SEQ ID NO: 723651 - DNA, 271 bp, Homo sapiens
ctttgaccatcaaaatgtaactctgtgttatgctgtttttgcactgctgggaggtgactgtatcatgggggtggttccctccatgctgttctcatgatagtgagtgagttctcatgaaatctgatggttttagaagtgttttggtagttcctctcttgctcacttcttctcctctgcctgccaccatgtaagacatgcctgcttccccttctgccatgactgtaactttcctgaggcctccccaaacatgtggaactgtgagtcaattaaa

SEQ ID NO: 723652 - DNA, 123 bp, Homo sapiens
  misc_feature (1)..(1): n is a, c, g, or t
  misc_feature (24)..(24): n is a, c, g, or t
ntacccaacccacgaagggcacgntgtgtcgcttctccccgcggaaagtgacaacgacgtgccttcgtcgctggtttcaggcctcagcgttcgccggcgaggtattcgtcgagggagagcggg

SEQ ID NO: 723653 - DNA, 248 bp, Homo sapiens
cgactagtcccaaccatactccactttttgtcgcttgtcagtctttaatcgtgggagggccttacgcacgcgcgcacgtacacacactcaggctttagatcttgttgaaagctgcgatgtcgacactctgtacgtgctcctcaaacttggtgatctccttcttcagcaagtctgtccccaccttgacgtgctccaccacacactgaatctgtagctttcggataccgtagcccacgggcaccagctcg

SEQ ID NO: 723654 - DNA, 349 bp, Homo sapiens
  misc_feature (12)..(12): n is a, c, g, or t
ctgagcgatcgntgcggagaacgagatgccggtgcccgtgggtccctacggcagtcccagcccagctgcttcgaccgcgtgaagatgggcttcgtcatgggttgcgcagtgggtatggcggccggggcgctgttcggcaccttctcctgtctcaggatcggaatgcggggtcgggagctaatgggcggcattgggaaaaccatgatgcagagtggcggcacgtttggcactttcatggccattggaatgggcatacgatgctaattagggctaggatgccctgcaatacctaaacttccccatccatttcgacccttgtacaataataaagttgttttcttctcgttaa

SEQ ID NO: 723655 - DNA, 142 bp, Homo sapiens
tgtcacactgaaggcctttcattgagtcagaggatctactgaggagattcttccatctctaacagatacatacgtactcagatatttctagaaactaagaaaatgccaggcttcagtgcctgaccgaggcttcagtgcctgc

SEQ ID NO: 723656 - DNA, 337 bp, Homo sapiens
gtcgacttgtgttttttttgttgacgacaggttcttactctgtcatccaggctggagtgcagtggcacaatcatagctcactataacgctcaaacttctaggctcaagtgatcctcccgcctcagcctcccacatagccaccacacccagctcatttttgttgtttttttgtagagactgggtctcactatgttgcccaggatggtctcaaagtcctggcctcaagtgatcctcccacctcagcctcccaaaccactgggattacaggtatgagccaccatgcctggtccaatttttaatcttttatactacattttttaactgtaccttttctatg

SEQ ID NO: 723657 - DNA, 309 bp, Homo sapiens
aaccatcacatgctctctgtatagtctacgaaaaacagagctaaaatcgatcattgaatactcttcagtcagccacatagccctcgtcagaaacagagattctcatctcaaatgcccctgaagcatcatcggagcattcatactcataatcgcccacgggcgttacatcctcattactattctgcctagcaaacacaacctacgaacgcagtcacatgtcgcatcataatcctctcatcaaggacttcaccctctactcccactaatagctcacagatgacttctagcaagcctcgtctacccgagcgc

SEQ ID NO: 723658 - DNA, 386 bp, Homo sapiens
  misc_feature (102)..(102): n is a, c, g, or t
  misc_feature (359)..(359): n is a, c, g, or t
  misc_feature (383)..(383): n is a, c, g, or t
  misc_feature (386)..(386): n is a, c, g, or t
ctaacccttttgtctccctgccctgagcataacccataagaatcaagatatttctgtttttatctgccccctcaaaaacagcctcatgaggcccaggtgtgngtgtcacgccctctaatccccagcactttgggaggctgaggtgggtggatcacgaggtcaggagatcaagaccatccctggctaacacggtgaaaccccgtctctactgaaaatacaaaaaattcgctgggcgtggtggcgggtgcctgtagtcctagctactcgggaggctgaggcaggagaatggcgtgaacccaggaggcagagcttgcagtgagccgagatcgcgccactgcactccagcctgggtgacagangtaggctccgtctcaaaaactatnttn

SEQ ID NO: 723659 - DNA, 271 bp, Homo sapiens
  misc_feature (189)..(189): n is a, c, g, or t
catcgccaaccacctgtagcgtgtacgtcatcccaacgctacgcatgttatctgatgcactaatggcaggacaacacagcaacctcatctcgccttaacgcaggcacacctgcttgcacacttttctattattttctccactatcgatttacccattcaactttgcagcggggtgtcttgtgttgtacngtcacgcgatgctatttaacttagcactccggaagggaatgtgagccgcgttcctctccgacataggttcaccataggggcg

SEQ ID NO: 723660 - DNA, 361 bp, Homo sapiens
cgatgtagagatgccccagtgagacagacttgtaaattaacaatgcttacccaaattccattattagacattgagtctgacaactgataggggattgagtgtgtaactaccatatgaagctagaaaatgcacaaacgatattccttatctgtaatttaaatacttaaaatttgcaattgtcagatcttgattaaactggttgtcttatttctgctcatcattaacggaaaaaaaatcagcatttctatctttgaaatctaagtgatttgaggattttaaaactgaattttatctgctataccagtcatttgagaaagtgtgattccaatgtaaagcatttagaaaggacaaaagtataatt

SEQ ID NO: 723661 - DNA, 385 bp, Homo sapiens
ggttgattgaacagctcaggatcgatcctactgctacgattgtgaggtttctccttccttacatttaatatgctcatttttacgctcttcacaatgtagtgcttccacgtacttcattaaccatgtctgaattacgttcagggcccctcttcttcttgctcctgtatccaagtagcaatctatgtatagctttgtccacagcttcaaaagcctttagtgctctgtcaacatcatcttgatctttgtcaatatgcaccaagatagattagctgccgaatacctctttttgatttcttcatctgttacttcacgatctatctgaacaacctcaaatgggttcagattgaagtaagaggaaccaggacgggtcagtctatccatctca

SEQ ID NO: 723662 - DNA, 362 bp, Homo sapiens
  misc_feature (1)..(1): n is a, c, g, or t
naaagcattccgtgttgagaggacacacacaggctcaatggagttgggtgtcatgatgaggtagcagtgtctgccatgggcgtagcaggaagtgatggcatgatctatagctgtgagcttggccctctttttcccgcttcctgccctgaccccctagggtgactcatccattcctgtaagtgaagatgtttgtgaaattgacttccaaactcacttagctggtcccgcccctcctctgagctgcagaaacccccatccaggtgtcctcttgaccctgcccatcttgccaccccttgatagccatgggctttgcttagaatgtcaatcattctctcaattcacacttattaggcacctattat

SEQ ID NO: 723663 - DNA, 386 bp, Homo sapiens
  misc_feature (27)..(27): n is a, c, g, or t
  misc_feature (146)..(146): n is a, c, g, or t
aaaggttagtggaagaaatattttttnattttagagtttattgtggtattggttatttttttttagtataggggtgttgtaggtggtagagtgaatgttttttattatgtggtttaatttttttggtttggttatttttttttttngaaatagtgtgtatgggttattttggagtgtaggtgatttgtttatttattgaagtagatttttgtttttttttatttttataggaatagaggaagaaaggttagatgtgtgtttagttttttattttttaattttttggtggggaggggtgtatttaaatatttattatatttttgtttttgagtgtttgttagagagaaagagaattattaaggaaaataatattatttaaatttgta

SEQ ID NO: 723664 - DNA, 166 bp, Homo sapiens
cccatagagagcctatatcattactatacagatatgtctgtgagaatcaagccatctcattataatcttgtctacctccattctgaagagggaggttaaggtgtcccttagtcctctgggagtagaagatccatttgtctttgtgtagagcaagcacgttttccac

SEQ ID NO: 723665 - DNA, 159 bp, Homo sapiens
ccccttttgggctttttggggggggggaaaaaccccccttttttggttgggcccggggtttttccccaaggcctttttttgcccggggttttttttggggcccttcccgtttcgcctttttcgcccggggggaaaaaaaaaaacttttggggcccctga

SEQ ID NO: 723666 - DNA, 709 bp, Homo sapiens
agtagctgggaagtggtttggtttagacgtaccgggaatagcatctgtcggcagagcctagatgtggggacaggctcatgagtgcaagacgtctaggtgatgatacctcagtgcactaccgcaaaaggaggagcaaacacagacagaggacgcaagaacgagaacagaacagaggagcacaaggggactgacaacgacgcggaccaacacaagaagcaccacagagagcacgacgaaaagacacagagggggacgaatcgacggtagaacactagggaaacaacgactggctgcaccgacgcacacacacatagaaaaccgaccagaggaccccggaaacggaccgcacgaaaaagaaggaaaaacaagaacaacagacaggcagagcgacaaagaacgagaaaaagcgaacaaacgagaaccgcacgacagatccgggaagatgccggaggtaacaacacccaacgtaaagaatcgagcagcatacagaacagcgcccaagaccacagcaaagaggccaggaaccggagaccagaagagaaaagcagcgacactcggacagacaggcgccaccatgccgaaaaacaacagaggaccaaggaaaagaaggcaccgacgaagacggaagagacacagagcaaacaaacaagaagagaagcgagagaaaaagacacacacaaggggcgactggaaaggagagaggaaacaa

SEQ ID NO: 723667 - DNA, 1783 bp, Homo sapiens
  misc_feature (13)..(13): n is a, c, g, or t
  misc_feature (16)..(16): n is a, c, g, or t
  misc_feature (18)..(18): n is a, c, g, or t
  misc_feature (20)..(20): n is a, c, g, or t
  misc_feature (24)..(25): n is a, c, g, or t
  misc_feature (28)..(28): n is a, c, g, or t
  misc_feature (30)..(30): n is a, c, g, or t
  misc_feature (41)..(41): n is a, c, g, or t
  misc_feature (1352)..(1352): n is a, c, g, or t
agacatacggcanggncntntccnntgntnttccggccgancccacctctcctcgaccctggacgtctaccttccggaggcccacatcttgcccactccgcgcgcggggctagcgcgggtttcagcgacgggagccctcaagggacatggcaactacagcggcgccggcgggcggcgcccgaaatggagctggcccggaatggggagggttcgaagaaaacatccagggcggaggctcagctgtgattgacatggagaacatggatgatacctcaggctctagcttcgaggatatgggtgagctgcatcagcgcctgcgcgaggaagaagtagacgctgatgcagctgatgcagctgctgctgaagaggaggatggagagttcctgggcatgaagggctttaagggacagctgagccggcaggtggcagatcagatgtggcaggctgggaaaaagacaagcctccagggccttcagcttgtacgccaacatcgaacatcctcagacccctactttgatgtggagcctgcttcaggtgcgaagcaggctcctggagtccatgatccctatcaagatggtcaactttcccccagaaaaattgcaggtgaactctatggacctctcatgctggtcttcactctggttgctatcctactccatgggatgaagacgtctgacactattatccgggagggcaccctgatgggcacagccattggcacctgcttcggctactggctgggagtctcatccttcatttacttccttgcctacctgtgcaacgcccagatcaccatgctgcagatgttggcactgctgggctatggcctctttgggcattgcattgtcctgttgcatcacctataatatccacctccacgccctcttctacctcttctggctgttggtgggtggactgtccacactgcgcatggtagcagtgttggtgtctcggaccgtgggccccacatcttgcccactccgcgcgcggggctagcgcgggtttcagcgacgggagccctcaagggacatggcaactacagcggcgccggcgggcggcgcccgaaatggagctggcccggaatggggagggttcgaagaaaacatccagggcggaggctcagctgtgattgacatggagaacatggatgatacctcaggctctagcttcgaggatatgggtgagctgcatcagcgcctgcgcgaggaagaagtagacgctgatgcagctgatgcagctgctgctgaagaggaggatggagagcaccctggctgccctactacatgctcttcctgctctatctgcattttgcctaccacaaagtggtagaggggatcctggacacactggangggccccaacatcccgcccatccagagggtccccagagacatccctgccatgctccctgctgctcggtttcccaccaccgtcctcaacgccacagccaaagctgttgcggtgaccctgcagtcctctttcccgcagctgcagagaggaggaagactattaaaggacagtcctgatgacatgtttcgtagatggggtttgcagctgccactgagctgtagctgcgtaagtacctccttgatgcctgtcggcacttctgaaaggcacaaggccaagaactcctggccaggactgcaaggctctgcagccaatgcagaaaatgggtcagctcctttgagaacccctccccacctaccccttccttcctctttatctctcccacattgtcttgctaaatatagacttggtaattaaaatgttgattgaagtctgg

SEQ ID NO: 723668 - DNA, 980 bp, Homo sapiens
ctcaagcactgtttttattccaaagactgccatccagggccatgcagcaaacaagcaacagggaaatatcccactatgcaatcctattttgagatgatatttaggatgagagaacatgcattagttacctaccagcttgacaggaatggatttccaaatctgacacaccatagcctgaattctcaccagtttgctcctggaaaggcccgctcatgcatgagcccctgccactcttctaaataagcttccaggcattacctgcatgctgtgttcctgtggtgggatggcagtaatctctgctaagataaacgggagcttctgtggataaagcataaacgcagtgaagtgtgtgtggctggaagatttaatgcctctacagtgcttagatacaagttgagcttggaattccagaggtagagcactgctgattggagacatattaagtaaaatgtactgtggaaatgagataaaacctttattcttgctaatgattgtcattgtatgtattcaggtgtccaacaaaggattttagaataaagtgtgcctttaaagtttcccaccttcttaaagctcccaatgaattgcaaagggcctgtttggaatggactgtattaaatctacttcaaatgaaaacctttacactgagtgaaatatggttcaacaattcttaacacaaggcctttacacttgtgtagcccattttggtttggcctatcttgtcactagaatgctgtctgagcttggattatttatgccctaagatttacttaaaattgaagggagtatttccattcatcaacactagttttgatagatgcttaaaaggtgcagtgaggttgatgatcctgaatacacaaattattgatcaccacatcaagttggatttccctaaagatgtatggctttttgaccttgtgatttacactaatgattatgtcttaataaaagtcataaagctaaatactttatacgtgtattaa

SEQ ID NO: 723669 - DNA, 158 bp, Homo sapiens
ccccccccgggggggggggattttccccccgggggggggggaatttttgggggaaatttttttggggcccccccccttcccccccaaccaaaaataggggggttttttttttttttggggttttccccccctttttgggaaaaagggttttttttgga

SEQ ID NO: 723670 - DNA, 742 bp, Homo sapiens
  misc_feature (3)..(3): n is a, c, g, or t
  misc_feature (72)..(72): n is a, c, g, or t
  misc_feature (95)..(95): n is a, c, g, or t
  misc_feature (112)..(112): n is a, c, g, or t
  misc_feature (116)..(116): n is a, c, g, or t
  misc_feature (123)..(123): n is a, c, g, or t
  misc_feature (134)..(134): n is a, c, g, or t
  misc_feature (142)..(142): n is a, c, g, or t
  misc_feature (187)..(187): n is a, c, g, or t
  misc_feature (217)..(217): n is a, c, g, or t
  misc_feature (255)..(255): n is a, c, g, or t
  misc_feature (281)..(281): n is a, c, g, or t
  misc_feature (299)..(299): n is a, c, g, or t
  misc_feature (364)..(364): n is a, c, g, or t
  misc_feature (367)..(367): n is a, c, g, or t
  misc_feature (404)..(404): n is a, c, g, or t
  misc_feature (424)..(424): n is a, c, g, or t
  misc_feature (446)..(446): n is a, c, g, or t
  misc_feature (466)..(466): n is a, c, g, or t
  misc_feature (473)..(473): n is a, c, g, or t
  misc_feature (495)..(495): n is a, c, g, or t
  misc_feature (532)..(532): n is a, c, g, or t
  misc_feature (552)..(552): n is a, c, g, or t
  misc_feature (554)..(554): n is a, c, g, or t
  misc_feature (558)..(558): n is a, c, g, or t
  misc_feature (608)..(608): n is a, c, g, or t
  misc_feature (617)..(617): n is a, c, g, or t
  misc_feature (634)..(634): n is a, c, g, or t
  misc_feature (662)..(662): n is a, c, g, or t
  misc_feature (705)..(705): n is a, c, g, or t
ccngttccacctccaccccacgaggcctggaccatggacgccagatggtgggcagtggtggtgctggctgcnttccccatccctaggggcaggtngggagactcccgaagancctncggaatnatggaaccagntatagttnttccaatttgtagtgaatgcatgctggactatgccacttatatgntacctggctacctcctggtgcagatacttnaggcggaagaactacctggagaccggtaagggcctctnctttcccctggtgaaagcttattatntttggcaatgagcccaangcctactaataaggttcccctggcgccccgaacaaaggcggcagagaccaccccgatgtggcagnccntaaaactgctcttctgtaccacagggctccaggtgtnttatctgacttgagggtgtnctgacaggaaagagtgatgacncgcagctatgagggccacanccacatnaccgggtgagcgctttacggantcgcagttcctggtgctaatgaaccgagtgctggcantgattgtggctggcctctcntntgtnctctgcaagcagccccggcatggggcaaccatgtaacggtactcctttgncaacctgtncaatgtgcttagcagcnggtgccaatacgaagctcttaaattcgncagcttccccacccaggtgctggacaaggcctctaaggtgatncctgtcaagctgatgggaaagcttgtgtctcagcgca

SEQ ID NO: 723671 - DNA, 1540 bp, Homo sapiens
  misc_feature (13)..(13): n is a, c, g, or t
  misc_feature (16)..(16): n is a, c, g, or t
  misc_feature (18)..(18): n is a, c, g, or t
  misc_feature (20)..(20): n is a, c, g, or t
  misc_feature (24)..(25): n is a, c, g, or t
  misc_feature (28)..(28): n is a, c, g, or t
  misc_feature (30)..(30): n is a, c, g, or t
  misc_feature (41)..(41): n is a, c, g, or t
  misc_feature (970)..(970): n is a, c, g, or t
  misc_feature (976)..(976): n is a, c, g, or t
  misc_feature (1078)..(1078): n is a, c, g, or t
  misc_feature (1197)..(1197): n is a, c, g, or t
  misc_feature (1213)..(1213): n is a, c, g, or t
  misc_feature (1218)..(1218): n is a, c, g, or t
  misc_feature (1227)..(1227): n is a, c, g, or t
agacatacggcanggncntntccnntgntnttccggccgancccacctctcctcgaccctggacgtctaccttccggaggcccacatcttgcccactccgcgcgcggggctagcgcgggtttcagcgacgggagccctcaagggacatggcaactacagcggcgccggcgggcggcgcccgaaatggagctggcccggaatggggagggttcgaagaaaacatccagggcggaggctcagctgtgattgacatggagaacatggatgatacctcaggctctagcttcgaggatatgggtgagctgcatcagcgcctgcgcgaggaagaagtagacgctgatgcagctgatgcagctgctgctgaagaggaggatggagagttcctgggcatgaagggctttaagggacagctgagccggcaggtggcagatcagatgtggcaggctgggaaaaagacaagcctccagggccttcagcttgtacgccaacatcgaacatcctcagacccctactttgatgtggagcctgcttcaggtgcgaagcaggctcctggagtccatgatccctatcaagatggtcaactttcccccagaaaaattgcaggtgaactctatggacctctcatgctggtcttcactctggttgctatcctactccatgggatgaagacgtctgacactattatccgggagggcaccctgatgggcacagccattggcacctgcttcggctactggctgggagtctcatccttcatttacttccttgcctacctgtgcaacgcccagatcaccatgctgcagatgttggcactgctgggctatggcctctttgggcattgcattgtcctgttgcatcacctataatatccacctccacgccctcttctacctcttctggctgttggtgggtggactgtccacactgcgcatggtagcagtgttggtgtctcggaccgtgggccccacanagcggntgctcctctgtggcaccctggctgccctactacatgctcttcctgctctatctgcattttgcctaccacaaagtggtagaggggatcctggacacactggangggccccaacatcccgcccatccagagggtccccagagacatccctgccatgctccctgctgctcggtttcccaccaccgtcctcaacgccacagccaaagctgttgcggtgaccctgnagtcacactgaccccnctganattcttggncagtcctctttcccgcagctgcagagaggaggaagactattaaaggacagtcctgatgacatgtttcgtagatggggtttgcagctgccactgagctgtagctgcgtaagtacctccttgatgcctgtcggcacttctgaaaggcacaaggccaagaactcctggccaggactgcaaggctctgcagccaatgcagaaaatgggtcagctcctttgagaacccctccccacctaccccttccttcctctttatctctcccacattgtcttgctaaatatagacttggtaattaaaatgttgattgaagtctgg

SEQ ID NO: 723672 - DNA, 1548 bp, Homo sapiens
  misc_feature (13)..(13): n is a, c, g, or t
  misc_feature (16)..(16): n is a, c, g, or t
  misc_feature (18)..(18): n is a, c, g, or t
  misc_feature (20)..(20): n is a, c, g, or t
  misc_feature (24)..(25): n is a, c, g, or t
  misc_feature (28)..(28): n is a, c, g, or t
  misc_feature (30)..(30): n is a, c, g, or t
  misc_feature (41)..(41): n is a, c, g, or t
  misc_feature (1086)..(1086): n is a, c, g, or t
  misc_feature (1205)..(1205): n is a, c, g, or t
  misc_feature (1221)..(1221): n is a, c, g, or t
  misc_feature (1226)..(1226): n is a, c, g, or t
  misc_feature (1235)..(1235): n is a, c, g, or t
agacatacggcanggncntntccnntgntnttccggccgancccacctctcctcgaccctggacgtctaccttccggaggcccacatcttgcccactccgcgcgcggggctagcgcgggtttcagcgacgggagccctcaagggacatggcaactacagcggcgccggcgggcggcgcccgaaatggagctggcccggaatggggagggttcgaagaaaacatccagggcggaggctcagctgtgattgacatggagaacatggatgatacctcaggctctagcttcgaggatatgggtgagctgcatcagcgcctgcgcgaggaagaagtagacgctgatgcagctgatgcagctgctgctgaagaggaggatggagagttcctgggcatgaagggctttaagggacagctgagccggcaggtggcagatcagatgtggcaggctgggaaaaagacaagcctccagggccttcagcttgtacgccaacatcgaacatcctcagacccctactttgatgtggagcctgcttcaggtgcgaagcaggctcctggagtccatgatccctatcaagatggtcaactttcccccagaaaaattgcaggtgaactctatggacctctcatgctggtcttcactctggttgctatcctactccatgggatgaagacgtctgacactattatccgggagggcaccctgatgggcacagccattggcacctgcttcggctactggctgggagtctcatccttcatttacttccttgcctacctgtgcaacgcccagatcaccatgctgcagatgttggcactgctgggctatggcctctttgggcattgcattgtcctgttgcatcacctataatatccacctccacgccctcttctacctcttctggctgttggtgggtggactgtccacactgcgcatggtagcagtgttggtgtctcggaccgtgggccccacacaggcgaagctagctcctctgtggcatgcaccctggctgccctactacatgctcttcctgctctatctgcattttgcctaccacaaagtggtagaggggatcctggacacactggangggccccaacatcccgcccatccagagggtccccagagacatccctgccatgctccctgctgctcggtttcccaccaccgtcctcaacgccacagccaaagctgttgcggtgaccctgnagtcacactgaccccnctganattcttggncagtcctctttcccgcagctgcagagaggaggaagactattaaaggacagtcctgatgacatgtttcgtagatggggtttgcagctgccactgagctgtagctgcgtaagtacctccttgatgcctgtcggcacttctgaaaggcacaaggccaagaactcctggccaggactgcaaggctctgcagccaatgcagaaaatgggtcagctcctttgagaacccctccccacctaccccttccttcctctttatctctcccacattgtcttgctaaatatagacttggtaattaaaatgttgattgaagtctgg

SEQ ID NO: 723673 - DNA, 559 bp, Homo sapiens
ctcaagcactgtttttattccaaagactgccatccagggccatgcagcaaacaagcaacagggaaatatcccactatgcaatcctattttgagatgatatttaggatgagagaacatgcattagttacctaccagcttgacaggaatggatttccaaatctgacacaccatagcctgaattctcaccagtttgctcctggaaaggcccgctcatgcatgagcccctgccactcttctaaataagcttccaggcattacctgcatgctgtgttcctgtggtgggatggcagtaatctctgctaagataaacgggagcttctgtggataaagcataaacgcagtgaagtgtgtgtggctggaagatttaatgcctctacagtgcttagatacaagttgagcttggaattccagaggcacggaagccaatgacttgggcaaatgcccctaattcaggatcaactcagatgaccaggtttcccctacctagagtgctacttattgcagtgaaaacttttcttctttccaaaaacctttaattaaacgtttaataactccctga

SEQ ID NO: 723674 - DNA, 235 bp, Homo sapiens
gatcttatgtgctttgggacggggacgggccattaactcgtatcagtgttgtagcctcgtgtgggcgtggtgatagtgcaggtccccattaatgcccttaggtgctcccagaattccatcatggtaggaacgcggtaggacctgcctcagacaactcgcgcagaatctacgcgggccaccagcagtgttccactaaagctcacctcctgtcctcagtaatccgtcccaagcacag

SEQ ID NO: 723675 - DNA, 115 bp, Homo sapiens
  misc_feature (3)..(3): n is a, c, g, or t
ttngtgcactgcagcggccctcttgtacgctgtgtggtcgttcttcacactgcccttcatgttgcttcacctcgtccagctactggtcgcaactatgtgggatcgacattgtgcc

SEQ ID NO: 723676 - DNA, 468 bp, Homo sapiens
accttacattagcttgtggacgtgggtgcgcctaaatggttacggcaggtgcctcatggtatagaaatgaacgtcgctggggctgcgagacactaagcaaagagagtggagggcaaaaacaagcgagtcattcttctggttgagaagaagaatatttttgcaagtaagagtgaagagtgaaaatcctggattcatataacaattaagccatcgaagtatcgcaactctttataccttctatgcgtctgttacctttcccgcaaaatgaaggatatgactcagttactaggtctgtagccagtgacactgggctgtacaagtgtaaagatgattagcatcctctggaacctgaacaattctgcagctaaacttcataataacacaagcctacatgtgcttataagtttgtgtgaagccaaagctatatgagaaagtggttacccagccctatccctggctctaatggca

SEQ ID NO: 723677 - DNA, 522 bp, Homo sapiens
ctggccttgcacttaatcctcttactttagctgcctggagttgttgggtgagtcaccagacaggacaaagacagaaaatgttctttaaacataaaaatattgtggggtggatacttttgtgagctaaattgctaaatgagtatgttggtttttatctttccccaccccatgctatttaaagaccattcttaagcatctgtttaatgctctgctgacagcagccgtacccacactgaggggcatgctgtcactggttgaacagatagtgagcctgggtcaataaaaagaaccaccagaatttgggtacttaattaacaaagcaaacaaaaaccctaggacagtaagcctccacagatctctgcagtcagaagctcctagaggcagaagaaaagaagcacagagtctggagttccctgaacaaaagatgccatggagcaggggaagttgtccttgtggattgtgtgtctcccatttaggtttaccctgagtgggtgaaataaatgtggcttaattgttaaaaaa

SEQ ID NO: 723678 - DNA, 894 bp, Homo sapiens
catatagttgaaagcttaataaagcacttgaatcgattgaatatgttcagacattcacaggatgaagaactagatatgagcaagaagaaagacagacaacatcagaaactgaacagtgtaccatctatattgcgtagtaaccagatttcgcagagcatgctgagaatgccttggaagaggatgacgacatgtggtttaactgaagatgaacgacaagagcgaaggaaaagcagttgtggcaccaggtggaaaaacctaagccagaagatgattttccagataagttatgaccaagtttagtggagactaaagaaagccagacacagaaagtgaagacaaggaaaaccttcccaaaaggacatctcctggggggcttcaaatttactttctcccactctgccagtgcttgctaatggaacaaacagtaaatctgtagtggctcagataccaccagcaaacttctaatggatcctcttccaaaagcacaaagcttgcctacgtcagtaacagccaccaaggggaacgttggggtcggcttagtggattatccagatgatgaacgaggcagatgaatgacgcaaagactcgtcccccagggaacaaggacctcgtctggggctcataaaactatgtactccagggggcacccctcaaaccagggtgggtctgtacaaagcgtggcactggtacaagcggaggctgaacaaatcctggagtcagaaaggcctctctcaagggaacttagtagagcatatatcaaggaggtaggcacacgacacccaataacgccagcagcagtgagcctaaaaaaaaatagcggccccggacgtgtgcgacaaacctcacaggggcgccacaggggcaacacacctcgcgcaccgcaccggcgaaacc

SEQ ID NO: 723679 - DNA, 1582 bp, Homo sapiens
  misc_feature (13)..(13): n is a, c, g, or t
  misc_feature (16)..(16): n is a, c, g, or t
  misc_feature (18)..(18): n is a, c, g, or t
  misc_feature (20)..(20): n is a, c, g, or t
  misc_feature (24)..(25): n is a, c, g, or t
  misc_feature (28)..(28): n is a, c, g, or t
  misc_feature (30)..(30): n is a, c, g, or t
  misc_feature (41)..(41): n is a, c, g, or t
  misc_feature (1120)..(1120): n is a, c, g, or t
  misc_feature (1239)..(1239): n is a, c, g, or t
  misc_feature (1255)..(1255): n is a, c, g, or t
  misc_feature (1260)..(1260): n is a, c, g, or t
  misc_feature (1269)..(1269): n is a, c, g, or t
agacatacggcanggncntntccnntgntnttccggccgancccacctctcctcgaccctggacgtctaccttccggaggcccacatcttgcccactccgcgcgcggggctagcgcgggtttcagcgacgggagccctcaagggacatggcaactacagcggcgccggcgggcggcgcccgaaatggagctggcccggaatggggagggttcgaagaaaacatccagggcggaggctcagctgtgattgacatggagaacatggatgatacctcaggctctagcttcgaggatatgggtgagctgcatcagcgcctgcgcgaggaagaagtagacgctgatgcagctgatgcagctgctgctgaagaggaggatggagagttcctgggcatgaagggctttaagggacagctgagccggcaggtggcatcagaatcgttggggccaaggcgggcccttggggcggaaacaacaaacgaacaaaaaaggcccctccaaagggggccttcagcttgtacgccaacatcgaacatcctcagacccctactttgatgtggagcctgcttcaggtgcgaagcaggctcctggagtccatgatccctatcaagatggtcaactttcccccagaaaaattgcaggtgaactctatggacctctcatgctggtcttcactctggttgctatcctactccatgggatgaagacgtctgacactattatccgggagggcaccctgatgggcacagccattggcacctgcttcggctactggctgggagtctcatccttcatttacttccttgcctacctgtgcaacgcccagatcaccatgctgcagatgttggcactgctgggctatggcctctttgggcattgcattgtcctgttgcatcacctataatatccacctccacgccctcttctacctcttctggctgttggtgggtggactgtccacactgcgcatggtagcagtgttggtgtctcggaccgtgggccccacacaggcgaagctagctcctctgtggcatgcaccctggctgccctactacatgctcttcctgctctatctgcattttgcctaccacaaagtggtagaggggatcctggacacactggangggccccaacatcccgcccatccagagggtccccagagacatccctgccatgctccctgctgctcggtttcccaccaccgtcctcaacgccacagccaaagctgttgcggtgaccctgnagtcacactgaccccnctganattcttggncagtcctctttcccgcagctgcagagaggaggaagactattaaaggacagtcctgatgacatgtttcgtagatggggtttgcagctgccactgagctgtagctgcgtaagtacctccttgatgcctgtcggcacttctgaaaggcacaaggccaagaactcctggccaggactgcaaggctctgcagccaatgcagaaaatgggtcagctcctttgagaacccctccccacctaccccttccttcctctttatctctcccacattgtcttgctaaatatagacttggtaattaaaatgttgattgaagtctgg

SEQ ID NO: 723680 - DNA, 445 bp, Homo sapiens
cgcacccggcccattaagtggatttttaatctcacacgagctcaaggcacagctgaagaccttttaaattctgtgaaagatagtggatattcatagctagtttttaattccagacccttaatttctcttatctgtaagtcagccttgttgacttctgtctaacatttagcacctttacaaaattattcaagtcagtaaatatatatataaaaaacctatttggctttgtttcaagatttgctcatttaacctttaataatcctctttaaaatggggatgatgatgtaacagaatccctgtaacttacaaagtactatatgtagacgagggggaggaattcaacaacaatgcctgtcataaatcaggcagtgcattgggatacttttttgtgggttttcattaaccaggtagttcacatcattcagcactcaaatgtcataaatca

SEQ ID NO: 723681 - DNA, 1184 bp, Homo sapiens
  misc_feature (371)..(371): n is a, c, g, or t
  misc_feature (403)..(403): n is a, c, g, or t
  misc_feature (419)..(419): n is a, c, g, or t
ctcaagcactgtttttattccaaagactgccatccagggccatgcagcaaacaagcaacagggaaatatcccactatgcaatcctattttgagatgatatttaggatgagagaacatgcattagttacctaccagcttgacaggaatggatttccaaatctgacacaccatagcctgaattctcaccagtttgctcctggaaaggcccgctcatggtaagctccttagagtttgttagtagtggggaagccttgagtttcaggagaacgtgtttggatggcattttaagaagccattccatttttggtagagtagaaaaagtctgcatctgagtctgtagtacagtctgttctctggatgaacacaatgtncgctctcacatttttctggatatttatttcgncaaatcagcagcatgncatgagcccctgccactcttctaaataagcttccaggcattacctgcatgctgtgttcctgtggtgggatggcagtaatctctgctaagataaacgggagcttctgtggataaagcataaacgcagtgaagtgtgtgtggctggaagatttaatgcctctacagtgcttagatacaagttgagcttggaattccagaggtagagcactgctgattggagacatattaagtaaaatgtactgtggaaatgagataaaacctttattcttgctaatgattgtcattgtatgtattcaggtgtccaacaaaggattttagaataaagtgtgcctttaaagtttcccaccttcttaaagctcccaatgaattgcaaagggcctgtttggaatggactgtattaaatctacttcaaatgaaaacctttacactgagtgaaatatggttcaacaattcttaacacaaggcctttacacttgtgtagcccattttggtttggcctatcttgtcactagaatgctgtctgagcttggattatttatgccctaagatttacttaaaattgaagggagtatttccattcatcaacactagttttgatagatgcttaaaaggtgcagtgaggttgatgatcctgaatacacaaattattgatcaccacatcaagttggatttccctaaagatgtatggctttttgaccttgtgatttacactaatgattatgtcttaataaaagtcataaagctaaatactttatacgtgtattaa

SEQ ID NO: 723682 - DNA, 578 bp, Homo sapiens
ggaaggtcttgccagcacgaggaggaacctgagcgagaccaaaatcgcgctatgcgctgacgcaaatgatccagacaggagagcgggctaaactcccagtaccgtggaaatactccaaatgttgcaagagcacattcacactctactcattcaggaccaaggccatgcacagcatcttactcctgaggacttactgctcagtcatatttttgtagacgaactgtgagacttaagtaactccagtgaaggcagccttagatatgcttaacactaatgaggacaatattgttgcatacttctacaaaaaagaaaccaacaggaacattcctgatggagccaacgtgtaactagatgacttagctaatgatctgcatatgtaattgagtggctatcattgaaccaaggcctctacctagtgtgtgcgcagggcacggctataaagtccaactatgtataaacaattgtgacggttgatgttacgtgttcactaaccatcaagttgttacaactcttttacagagttagtgttaccagctgaacaccaaggtatcgtgtaactacactccgtttgctttttc

SEQ ID NO: 723683 - DNA, 1388 bp, Homo sapiens
  misc_feature (926)..(926): n is a, c, g, or t
  misc_feature (1045)..(1045): n is a, c, g, or t
  misc_feature (1061)..(1061): n is a, c, g, or t
  misc_feature (1066)..(1066): n is a, c, g, or t
  misc_feature (1075)..(1075): n is a, c, g, or t
aaggcggagtctcgctctgtcgcccaggctggagtgcagtggtgcgatctcggctcactacaagctccgcctcccgggttcacgccattctcctgccttagcctctggagtacctgggactacaggtgcccaccaccacgcctggctaagtttttgtatttttagcagagatgggagccctcaagggacatggcaactacagcggcgccggcgggcggcgcccgaaatggagctggcccggaatggggagggttcgaagaaaacatccgatcagatgtggcaggctgggaaaaagacaagcctccagggccttcagcttgtacgccaacatcgaacatcctcagacccctactttgatgtggagcctgcttcaggtgcgaagcaggctcctggagtccatgatccctatcaagatggtcaactttcccccagaaaaattgcaggtgaactctatggacctctcatgctggtcttcactctggttgctatcctactccatgggatgaagacgtctgacactattatccgggagggcaccctgatgggcacagccattggcacctgcttcggctactggctgggagtctcatccttcatttacttccttgcctacctgtgcaacgcccagatcaccatgctgcagatgttggcactgctgggctatggcctctttgggcattgcattgtcctgttgcatcacctataatatccacctccacgccctcttctacctcttctggctgttggtgggtggactgtccacactgcgcatggtagcagtgttggtgtctcggaccgtgggccccacacaggcgaagctagctcctctgtggcatgcaccctggctgccctactacatgctcttcctgctctatctgcattttgcctaccacaaagtggtagaggggatcctggacacactggangggccccaacatcccgcccatccagagggtccccagagacatccctgccatgctccctgctgctcggtttcccaccaccgtcctcaacgccacagccaaagctgttgcggtgaccctgnagtcacactgaccccnctganattcttggncagtcctctttcccgcagctgcagagaggaggaagactattaaaggacagtcctgatgacatgtttcgtagatggggtttgcagctgccactgagctgtagctgcgtaagtacctccttgatgcctgtcggcacttctgaaaggcacaaggccaagaactcctggccaggactgcaaggctctgcagccaatgcagaaaatgggtcagctcctttgagaacccctccccacctaccccttccttcctctttatctctcccacattgtcttgctaaatatagacttggtaattaaaatgttgattgaagtctgg

SEQ ID NO: 723684 - DNA, 527 bp, Homo sapiens
tgtctaggtgttagtgtgctcatgctatggggttcacgcttctagtttatttctatgacgagaactagacagcgtttttatgcacacgcgcgtgcacacacacacacacgcacacagcagttttacgtactttttttttttgggagagggagtctggctctgtggcccaggcgggagtgcaagggcgcaatcagtgcagacctccattttcgggttacaggcgattctcctccctgggcctccggagataggggggataacgggcagatgcggttctcccagtaagtttgggtattttaagtacgaagggggtttcacaaggtgggccgaggcgggtctccaagtcgggacctcggggtgatccacggcctgggctttctcatagggcggggacataacgggcttgagccaccaggcggggccccattctattttttggtcactatgatggggactattctagaagcctaatatagggggaatcatacgggattggtcctttggggaagggttaatttcattcatca

SEQ ID NO: 723685 - DNA, 110 bp, Homo sapiens
tcccgagttgtgctgtcgcaaggccaaaaatcacattcgtctttctctctcctactcctcatctaccattctcctcaccaaagaccctgggaccagacacaacctggcga

SEQ ID NO: 723686 - DNA, 81 bp, Homo sapiens
gcgggcggacccgagcccccagcccgctggcgccgctgcccgccaggccccgggggcggcggccaagatgtccgtgcctat

SEQ ID NO: 723687 - DNA, 166 bp, Homo sapiens
ttgctgctcgatgagaagtgacagaaccatggaaatggagtttgaagacggtgaagtttctaagggtgcagcgagagtatcacggaagcgtttccacactgcaccgataattttggcttcaataataagacatcagtcatccagtgatttaaaaggttggcggccg

SEQ ID NO: 723688 - DNA, 153 bp, Homo sapiens
cctcctcccttcccatgcttgtaaccagctttggggcttgcacctccgcaaagtaaggttggcccttggagtgccatgtttgggtctccggccagggcctagggctagaccatgcacccaatgggtgcacaattaattacaggtctacaaaaa

SEQ ID NO: 723689 - DNA, 124 bp, Homo sapiens
tggatgctattgtcctaatgatggtaaaagggtagcttactggttgtctccgattcaggttaaatgaggaggtctgcggctaggagtcaataaagtctgtaagtgaccagcgcaaagcgccggt

SEQ ID NO: 723690 - DNA, 492 bp, Homo sapiens
cgagggtgggttccaccacagagcaccccggtgggcgggaaacagtggcatcatagacctaactactcttttaagactggggagttaattcttctggtctatagttactatagcagaagtcacggtggtcaaaactctcatcaagtgaatgcagacaaaattagtctatcccggtgattacgggataaattatccgcagggtgtgtgtgtgtgtgtgtgtgtgtgtgtgtgtgtgtgtgtgtgagggaggaggggagcctcccagaggggactggggtaaatctgagtttctaagccacaagtggaattagaggggcgggggagatctaagtgcttcttctagaggggaaacgcgtgagaaacccagctcccggccgaggtcgctaaaacccaaggggtgaccaggcatcggggccaagcctgtaatcccagcactagaggagggcgaggggggaggcacacgtgagcctggaagtgggataccagtctaag

SEQ ID NO: 723691 - DNA, 126 bp, Homo sapiens
  misc_feature (74)..(75): n is a, c, g, or t
cattgcaccatggttgtctcggagtccttcacctgacctttttagtcagctcagatctttttgtagtttgagannggacctattcaaggagctatcagggttaaaagctgccacttgcccaaagct

SEQ ID NO: 723692 - DNA, 1484 bp, Homo sapiens
  misc_feature (168)..(168): n is a, c, g, or t
gcagtcgcaagagcctctatggtgaagttggatgtggcgtaggaaatgcgccccatgatgggagcatatcctggaagtaccagcgataatgtggctcaggagctctatacttgcgagcgatagagacacgagtcgacctggatttagcaatgtacggggtggacgctngcacgaatcatgggacaggcaatcgctgtcacctgacctcgaggcaaggaaggcatgactcattttgacgtttgcatatcagtacgacttgggaaaagaatagtcgacttcaccccctcgtcgtagatctagcgaagtgtacccatgagaaggcagcttgatgccgggtagttgcgtgtggtaccggcagatcgagcacggtgccgttgacatggaaaagccctgtccgttgaacatcacgcggctctaccgttcccatagtaggcctacttcatgacgcttcgtagggatcttggtgacccttgcttgcacctagggaattttcgtagcacattgttgccagaggcacccaagtagtcaattcgcatgggcccattatatgcgagaacggcggccgccatgtgtgctggttttcgcttggggccaagcccttggggcggagggggaaacggttgtctttaggacagggggccctaatcgtggccgccgggtttacccccaaacctattgcccttttggtgccattcctgcacattgtgtggggccagggttcctgccctgttagatcgttgtgacactaacaccggaacccgtgagtccccggtaattatgagaggcgggtcaaccggtctcacaaaagaggcacccgtttgtgaaagaacgcggaatcgggtgcggtcggacactttctgtgggtctgggtggctgaacgcccgagttggtccttggtcggcggattgttgggacacccccgaatgggtttgccaacgttcggttattaatcgccaaaaccgcgggggtgtgttggcccctgtggttgggtttaaacgggtacacaaacgggaagctccggaacaggcccaactgtccctggcatagattatggttcccccgggagatgtctgcacaacacagtggtgaaccacttgttggcgccaaattttcccgtgcaccgaaaaatattgtgctctgaatgatgtactgatgtgcattgcacagttagcggtcacacccagggtgttggcattccccccccggggggtaacagtgaacggcccccacatatcgcccgggttgttggaaatgtgtggaggggcccggccgcccggggtaccacaaaggtgggcctacgggtaatgtgagttaatctcagccccccgagagctacacggatatgctccaacgatggcggttttttggacattagggacgaaacctccggggcgggcattgtaattaccacacttccgcctgtgtgcaggacggaattctggtacaaacagcccaactttggtggtcacgacaaaacgtttaaa

SEQ ID NO: 723693 - DNA, 463 bp, Homo sapiens
aaaagaccaagaatagccgggagtggtggctcaagcctgtgatccaagtactttttgagaggtggagacaggaggatcatgtgagcccaacagttcaagaacaacctgggcaacatagtgagaccctgtttctacaaacatttcaaaaattagttgagcatggtggcatgtgcctagtcccagctcctcaggaggctgaggaaagaagattgcttgagcccaggaattagaggctgcaatgagctatgatcatgccactgcactccatcctggggagcagagctagactctgtctcacaaaaaaaaaatgtgtgggtgccaagactcaagaccgtgggagctggtcgggcacagtggctgacgtctataatctcagcactttgggaggccaaggcgggtggatcgcctgaggtcaggtgttcaggaccagcctgggtgacagagcgagactccatcccccccc

SEQ ID NO: 723694 - DNA, 161 bp, Homo sapiens
aagaagggagccacaccaggcaaagcataggtagcaactcctgataagaagggtgctgccatcccagtcaagggggcaaagaatgacaagaatgccaagaaggaagacagtaatgaagaggaggatgatgacagtgaggaggatgaggaggatgacgagga

SEQ ID NO: 723695 - DNA, 260 bp, Homo sapiens
  misc_feature (23)..(23): n is a, c, g, or t
  misc_feature (74)..(74): n is a, c, g, or t
  misc_feature (180)..(180): n is a, c, g, or t
  misc_feature (182)..(182): n is a, c, g, or t
  misc_feature (212)..(212): n is a, c, g, or t
  misc_feature (252)..(252): n is a, c, g, or t
gaggaggaactgagcagctcctntgaggaggaaggagaggaggaccgggatgcagatgaagagggagaaggagntgaggacaccccaacttcagatcctgggtcctgcctaacagcccgaaacccgtatgcctgctcggggaggatgagtgctgagccccacctggtaccacgtcccccncngcagctttgcttctgggctgagctggaggngtcttccctttgcccccctgattgtgaataaagattgtcngctttgta

SEQ ID NO: 723696 - DNA, 377 bp, Homo sapiens
ctttctagctcttctctctgactttcactgtgttgacctaatgttatgatgcttgcctttgtagacacgatatgacggctcacagtaatggaggcagcatacttaaatcaacaggagattggcttgtctttcccagaagcatcttcttatctctctttagtccaaagatgacttttccctgtgtgtccctgagtcagtcactggtagaggggatgaacgtgccgagattttcatagattgatcctgtgtgagtagaatggatgcttagaagccactcagtattcaccacgatatctctattaccagaggcgaagaattacacggatacttggcaggacatttgccttataggctaatcaccaaagtcctaaggcctg

SEQ ID NO: 723697 - DNA, 316 bp, Homo sapiens
tctgaacttaggggggagtgcagtggcgtggtctcagcttaccaccacatcagtctcctgggctgaagcaattctcctgcctctcgagtagatgggattacaggcacccgccaccatgcccggctaattttttatttttagtagagacagggtttcaccatgttgggcagggtggtctccatctcctgacctcgtgatctgcccgcctctgcctctgaaagtaccgcgattacaggcataagccaccgcgcctggccctgatttccatttcttttatttctagtcacttacattcatgcctaagttcagagccagg

SEQ ID NO: 723698 - DNA, 657 bp, Homo sapiens
gccggggcgcggtgctcacgctgtaatcccaatctcaggaaggctaagaggcgggaggataagctggagcccaggagtcgagacctgctgggacataatagcgagaccccgttcctccagaacaatggacacaaaacacacccaatcgggaccaacacacacaaaccctaactcataaaacacaaaaatctgttggcggacacccgcggacccaagaaaaaagttttaaaaaccacatatgttgggggcacacgccgccccacataatgtcacaagtgatacaccggtggccaccagcgcgggtcccacagaggactcccgggggcaccagaaacaaagcgcgatgagcatctaccgcacagaaaaaaaaaaaacaccggcccgcggggcaacacaacgcgcgggctccttggacaaacaacaccccaagtgaggaacctacggagaggacaacagacgggggggggctcacaatcacaaaggggggttcccaagggcgcaccgtcgaaataacaaaaataggccccgtagggcgggtgagcacaaccgtcccacgacgagcgcagagcctgcaccgccgtacggcagacgaaggcagagcacggcatcaggggtcacacggtcgaagcacaccggagccacacaggcaggcaccgg

SEQ ID NO: 723699 - DNA, 348 bp, Homo sapiens
  misc_feature (5)..(5): n is a, c, g, or t
ttcgngccggggcactgacgtatcattgcataacagaagactgctgatttcggggagggagcacatacaagtttcctgatagctcctattttcgtttccttttttttttttcccttggaaaaagtctccctcggtggcccaggtgggagtgcaggggggcaatctcagctcccggaaacctcggcctccggggctcaagcaatttcccgggttcagcctcccaagtagcggggataacagggggcacacaaccaggcccagctaatttttaaaatatatttttagcaagagagggggttccactaatgttgggccgaggcgggtttcgaaactcgggaatctcgaggt

SEQ ID NO: 723700 - DNA, 751 bp, Homo sapiens
aagcggctgtacggcccgggattttgggcatggggagctgctggctgtgtggcggtcaggaggccgggcagggtctgagggaccgacggacgcacgggcgtgcggcctgggagccattgagcgcggcccttgggcccgggggcgcgggccggggtgggcttcccacggcacgacatggagacctgtgtgttgcgatgtgctcccttgggctcggcttggaccgcgatggtgctgtggccctggcctcctaatcggtggctgctgtctggtggcggtagctggtgggtggctgctctcccccctgcccgcgactcggatcacccccacccctcccctgccgggccagtgccgggcggcgttgttggcgggggccccggtggaggcccggcctggtgcggcgcccgccatgaatgggctgtcgctgatgtgagctctgctgcctcttctgctgcccggcctgccccgagccgcatcgctgccaagctcggcttccgtgcctgcggagtgccgatctactcccttggtgcctgagcccgagcctggggccttggttggggccaggggccggccccttgggggagcctgagagcctcctcgggcgcaacccggggggcgcctggaatgcttgaccctttgacgggagcggttgacgaacttaccaggtacaggccatgccgcgaaggcttggaggaccatcagagggtctttacaccgaagcaaggaggcgcccgggggcaacccgagttctcca

SEQ ID NO: 723701 - DNA, 170 bp, Homo sapiens
agcaaatgaaatccccgtttgggtccctttttaagcttgtacccccccccccagacttataattttaaatgtattttcctttgtttaagctgctgcttcctctgtttcattggattgggccagttatcaggggcttttgggttcaaagtaataaagaattcccaaactga

SEQ ID NO: 723702 - DNA, 1989 bp, Homo sapiens
  misc_feature (112)..(112): n is a, c, g, or t
  misc_feature (117)..(117): n is a, c, g, or t
  misc_feature (1854)..(1854): n is a, c, g, or t
  misc_feature (1870)..(1870): n is a, c, g, or t
  misc_feature (1876)..(1876): n is a, c, g, or t
  misc_feature (1887)..(1887): n is a, c, g, or t
  misc_feature (1911)..(1911): n is a, c, g, or t
  misc_feature (1919)..(1919): n is a, c, g, or t
  misc_feature (1923)..(1923): n is a, c, g, or t
  misc_feature (1935)..(1935): n is a, c, g, or t
  misc_feature (1939)..(1939): n is a, c, g, or t
  misc_feature (1942)..(1943): n is a, c, g, or t
catacctcacagaccacttatcacctcgatcagccgatctcaaggccctaccgccaggtgagcttcccggacgacgacgaggagatcgtgcgcatcaacccccgggagaagntctgnatgacggggtacgaggattaccggcacgcacccgtcaggggcaagtacccggacccctcggaggacgcggactcctcctacgtgcgcttcgccaagggcgaggtccccaagcatgactacaactacccctacgtggactcctcagactttggcctaggcgaggaccccaaaggccgcgggggcagcgtgatcaagacgcagccctcccggggcaagtcgcggcggcggaaggaggacggagagcgctcgcggtgcgtgtactgcagggacatgttcaaccacgaggagaaccgccggggccactgccaggacgcgcccgactccgtgagaacttgcatccgccgggtgagctgcatgtggtgcgcggacagcatgctctatcactgtatgtcggaccccgagggagactatacagacccttgctcgtgcgatactagcgacgagaagttttgcctccggtggatggctcttattgccttgtctttcctggccccctgtatgtgctgttacctgccccttcgggcctgctaccactgcggagtgatgtgcaggtgctgtggcgggaagcacaaagcggccgcgtgactcagtttccctcccttctccctccatccgcagccacaggggaactcgtctcttacatactctcatcttctcccccgctcccttccactccaaggagcgaggagggcaagcggcctcccagctccctggtacctcgaggcaccattccagccagggacgctgccgggtagactctccactccccctgccgcccacactgcagcagccacatccatacacacacgctcgcacagtgttctgaggaaggaaccttcgccacagactcctgtactattaacaatctgtaaccaagctaactgtctcatccatgtgttgatttcctgtttcctcctcccccgcctcttccagttcaaaggagtctgcaattggaactgctgattttcggtgggttttgtagttgatttttccaagagcgtcgaagactctctttctcttggttcaccttgcctgtcgctagcaagcatctggttcagcggaaatgggatgtgagaatgatgaaacccgacagaagtatctcagcctgcagtcagttattatgtataggaggtgagctagttaacaaacttgtaccacaaaacaatatcgctttaacttttctaaagccaaatttcccatgtaagctgcagtttctatctttagcccatcatcattttctgcccccccaaaatctgttgaaatgattcactgatgcaaaacattcacccgtaatagactgagaattgagccttaacttcagattaacttgtgagaatcaggaaaattccttcaactgcattgcatcctcttggaccagggctagaatggggatttcaggtttctatgagcctccccattacccctaaagtagaacattttttaaattgtgttgccaccacttctaaaaatttagcaatattagaataggatactagtgaagtaagaaattttgcttgttgttttgcaaaccaaatagtttcctcaaacacaaatcagtgttcccacgaacaagttccaattgagaaacactaaggttatggtgaataaaaccatagggagcttcttccccccaacccctggctattttatattaatggggagaggggatttttaaatgtcataaatttgaagagtggtgggttgcattttcttcatgggtttatgtttttcgtttcnttttgggactcaattncacatnaccaaattccntcattatacttgggggaaaaaacnaagggccntttntaaaacccttcnatgnccnnaaagtggtctttttttcttgccaactttccaagaccccagactttg

SEQ ID NO: 723703 - DNA, 388 bp, Homo sapiens
cacagtattcccatagcaacaaacaactagaccatagaaatgtctattgggaggtgtctcgtagaagcaagacatacctagcaccacatactgcccggaaagtcctcctattccagtgtccatgtagacctccagtccttaatgtcaccatgcttgtggacaatgcatccaaataaggatacccctcagggctcagatagacattgcaattttgcatagctatccagattcccttagctatgtctatcttgactgtcttaccccctctatcggggtcacttgcaatagttaatcaaaggttgaacactgcgtaggaaagggagatgatccagagacatgtggcaccaggcatggcttccccttggcctctctgtacactgccccagga

SEQ ID NO: 723704 - DNA, 1940 bp, Homo sapiens
  misc_feature (112)..(112): n is a, c, g, or t
  misc_feature (117)..(117): n is a, c, g, or t
catacctcacagaccacttatcacctcgatcagccgatctcaaggccctaccgccaggtgagcttcccggacgacgacgaggagatcgtgcgcatcaacccccgggagaagntctgnatgacggggtacgaggattaccggcacgcacccgtcaggggcaagtacccggacccctcggaggacgcggactcctcctacgtgcgcttcgccaagggcgaggtccccaagcatgactacaactacccctacgtggactcctcagactttggcctaggcgaggaccccaaaggccgcgggggcagcgtgatcaagacgcagccctcccggggcaagtcgcggcggcggaaggaggacggagagcgctcgcggtgcgtgtactgcagggacatgttcaaccacgaggagaaccgccggggccactgccaggacgcgcccgactccgtgagaacttgcatccgccgggtgagctgcatgtggtgcgcggacagcatgctctatcactgtatgtcggaccccgagggagactatacagacccttgctcgtgcgatactagcgacgagaagttttgcctccggtggatggctcttattgccttgtctttcctggccccctgtatgtgctgttacctgccccttcgggcctgctaccactgcggagtgatgtgcaggtgctgtggcgggaagcacaaagcggccgcgtgactcagtttccctcccttctccctccatccgcagccacaggggaactcgtctcttacatactctcatcttctcccccgctcccttccactccaaggagcgaggagggcaagcggcctcccagctccctggtacctcgaggcaccattccagccagggacgctgccgggtagactctccactccccctgccgcccacactgcagcagccacatccatacacacacgctcgcacagtgttctgaggaaggaaccttcgccacagactcctgtactattaacaatctgtaaccaagctaactgtctcatccatgtgttgatttcctgtttcctcctcccccgcctcttccagttcaaaggagtctgcaattggaactgctgattttcggtgggttttgtagttgatttttccaagagcgtcgaagactctctttctcttggttcaccttgcctgtcgctagcaagcatctggttcagcggaaatgggatgtgagaatgatgaaacccgacagaagtatctcagcctgcagtcagttattatgtataggaggtgagctagttaacaaacttgtaccacaaaacaatatcgctttaacttttctaaagccaaatttcccatgtaagctgcagtttctatctttagcccatcatcattttctgcccccccaaaatctgttgaaatgattcactgatgcaaaacattcacccgtaatagactgagaattgagccttaacttcagattaacttgtgagaatcaggaaaattccttcaactgcattgcatcctcttggaccagggctagaatggggatttcaggtttctatgagcctccccattacccctaaagtagaacattttttaaattgtgttgccaccacttctaaaaatttagcaatattagaataggatactagtgaagtaagaaattttgcttgttgttttgcaaaccaaatagtttcctcaaacacaaatcagtgttcccacgaacaagttccaattgagaaacactaaggttatggtgaataaaaccatagggagcttcttccccccaacccctggctattttatattaatggggagaggggatttttaaatgtcataaatttgaagagtggtgggttgcattttcttcatgggtttatgttttcttcatgggtttatgttttcgtttcattttggactcaatttcacatcaccaaattcctcatatggccttgttttttcccacaagtataaatgag

SEQ ID NO: 723705 - DNA, 770 bp, Homo sapiens
  misc_feature (635)..(635): n is a, c, g, or t
  misc_feature (651)..(651): n is a, c, g, or t
  misc_feature (657)..(657): n is a, c, g, or t
  misc_feature (668)..(668): n is a, c, g, or t
  misc_feature (692)..(692): n is a, c, g, or t
  misc_feature (700)..(700): n is a, c, g, or t
  misc_feature (704)..(704): n is a, c, g, or t
  misc_feature (716)..(716): n is a, c, g, or t
  misc_feature (720)..(720): n is a, c, g, or t
  misc_feature (723)..(724): n is a, c, g, or t
ggacggatatgatgtgacacagatggttttggttggggctatggagtgcacagagtggtgagaatgcaagtaggctttggcccaactatggaaggaagctgagctgcagtttctatctttagcccatcatcattttctgcccccccaaaatctgttgaaatgattcactgatgcaaaacattcacccgtaatagactgagaattgagccttaacttcagattaacttgtgagaatcaggaaaattccttcaactgcattgcatcctcttggaccagggctagaatggggatttcaggtttctatgagcctccccattacccctaaagtagaacattttttaaattgtgttgccaccacttctaaaaatttagcaatattagaataggatactagtgaagtaagaaattttgcttgttgttttgcaaaccaaatagtttcctcaaacacaaatcagtgttcccacgaacaagttccaattgagaaacactaaggttatggtgaataaaaccatagggagcttcttccccccaacccctggctattttatattaatggggagaggggatttttaaatgtcataaatttgaagagtggtgggttgcattttcttcatgggtttatgtttttcgtttcnttttgggactcaattncacatnaccaaattccntcattatacttgggggaaaaaacnaagggccntttntaaaacccttcnatgnccnnaaagtggtctttttttcttgccaactttccaagaccccagactttg

SEQ ID NO: 723706 - DNA, 847 bp, Homo sapiens
ccaggacttgaactgccatgtcctctgaagaaggaaagctcttcgtgggagggctcaagtttaacaccgacgagtcaggcactggtaagaccacttcaggctagtttcggacctatctctgaggtgtgtgcgttgtcaaggaccgggtagactctagcgtgtccaggggttgtggtttcatcaccttcaccaacccagaggcatgcttcagttgccatgaagagccatgaacggagagtctctggtatggtcgtctacgcatccgtgttggattcatgctaggcaagtctgtctcggggaaccagaggacggtggctttggggcccatgggcgttggtcgcagctactctagaggtggtgcgggaccagggctatgggagtcggcacggtatttattgacagtctgacctggaggggtatggatatggatatggacgttccagagactattatggccgaaaccagggtggtcctgatccgctactcatggaggaaacttacatgagactgagtcatgacggagcatgaaatgagacatgcacatattatcgatactcatacggaataatttctgatccaggatcgtgcttccgaaatggctgtagtttataaaggtttttggagctgcactgaaggcatcttatttctatagtatatcaacctttagtttttagaattgacctgccaatgtagctgaagaccttttagacagttccatcttgttgggtaaccttttttctgtctatttatacgacagattatgggacggttgtagaacctgagtattggcttgttaccagttttgagttgagctcttaggttattggaggctagcataatggtctgg

SEQ ID NO: 723707 - DNA, 382 bp, Homo sapiens
cgacattaggaggttcgaactccggcctcggtatcacctgcctggcctgaaagtgctagtggatagatcattaacagaattatttagtttatgttttgagcagttttatatacattactgatgttttacgcatttcaagaagtgattgcagtccaggcttgtgtatttgctccctcaggtcctcctttgccttttgaagtctcagcagtcctgttgttcgtgcagtgtgatcttactatgtcgttcacaattgatgcactattttattttatttggttttgttttatttttgagacggtgtctcagttagtcgcccaggctggagtccagtggtgcactttcggctcactgccacctccgcctcccagatacaagcaattta

SEQ ID NO: 723708 - DNA, 259 bp, Homo sapiens
gaaggatccccataggtggacagctgagtctaggtgttgaagcccagtgctcccatgcaagccattggtcttgctggtttcagcacgggaaggcctgggagccctaggagctggggaaaggcgcattgccgggtcctgggtgattccccagccccagatccccagctgtcatcactggggcaaggcgacattaaactggtccctgtgggtcaggtctgagtggggcaggcactcccctccccattgctcccacaggggc

SEQ ID NO: 723709 - DNA, 349 bp, Homo sapiens
acagactagaggaaggactggggacgacgagaacagggcagctggcaaggtctgagcattgggagtgggtctggacctcgtgacattactccatctgctaccccacgcttccttaggctcccaccctctggctagcttgagaggaaggacgatggtcaaggtacatgtctcttctcctctgactctgggaatgagcatttttctcactcccaccaggctgacctctccttcatcaggcagtgtatcccatatgccaaaatcagcaggacagtcagacatcaacacactccccaaggctgaaaactcagagctggcacgtcagtcaccatggtcagtaaatgtttttagg

SEQ ID NO: 723710 - DNA, 142 bp, Homo sapiens
ttgttgtcacatgagcaggcgctcgccagctagctctggccttcttttcccatgggtaaagcaaatagaaatgcatgatgataattcatgtgcggtatgtgggaggaggaaataggggacatctggaaaaaaatcttggcat

SEQ ID NO: 723711 - DNA, 381 bp, Homo sapiens
gatttttttagatggcaggctgaattaaacactatcgtgagttatctggggtagagactttttctccaacagtctttgaaaatgtcatagagcagagcctctcggactgcttctcgaaagaataaaagatggtcttatagaacccaaggagatcttggcagcgcttggcgcagctcacatgaacctgtgaggccagcctagctgcctgccagatatgaatgcctctcagaccctgcctgaccccaaaccaaggtgaactccacttgaagcaatattgggagcccaatactggcaggaggggaacacagccagagacactgtgcccactgccatgtccagcacccaagtgcatatcaggctgcaccttccctgctcagtccc

SEQ ID NO: 723712 - DNA, 1322 bp, Homo sapiens
ctctgccggccgttgttgggtgttttttcgtggcttacacggggtggttggtgtggacgtgtggtgttgttgtgtcggggccgagcggccttttgtccgccctcctcttgcttcgttgggggccgtggcacagcgtttgtgttgtccgcccacccgtggtccacaggcgcccatttgttgcgcccctctattggcttgggggaaccgcgcggcagttttttgggttgttttggggagaaagtgtgtgggtaacgggttctcgccgcggcctgtggtgcgcacggcactcttttttggcggccgcgggttgctaaatgctggcgttgaaaggaaagtgtttggggagaccccgtaaatggggaggggttaaccaaaaagtcctgccggcccccggtggtatgaggttctttttaaggccccattgtcccgaggtggaccccccccccctcgggtggaattttaagagtttttaaagggacaataatgttattagtgaggaattggggatgtccagtgtgccccaaggtggagcgcccctttatagcccgggaccccccggtacttttagcgctgggcctctatttcttaggtgagtgtcgcccgatatagggatatttttggttgtgcccaaactcttgtagaagattgataatatggatattgggcccaaaaagtgaaggtgcttctcggagtgtagggagactctgggagccctctttcctccgaggattttatatgtgttagtccccctcgagtaggtgagagtttgtgtttagatatgtcttgtgtggagaacccgcaagagaagggttcctttttttgtgttgttaaggatttttcacgggagaaaaaccttgggggttaaagtcttgagaacccactctcttttgagaaaggtaatttgtctcttccccttgccacgggtccaccccctaatcacgtccctgtgagaaaggtgggtttcttcttaatggagaagcgctttggttttgccttctcctaccaaaacacatgcgttaatgtcccttaaagggaatgtgttatgagggttatcctgttggagatttcttcttggttgttcttggtctttacaccacggaaaccttggtcttaatggacccttaatacctttgtttaggatgaggagtcttttgtgtcccctggaccagtagtcttgacacgtatttctccccttcttgtcccctatgtaagccccacgttgcctgtatcttgagaccacgtttgagctcttttttgtaatatacgcttataaccctgttatttttgtgcttataataacgagatgccaggaccccttgtga

SEQ ID NO: 723713 - DNA, 775 bp, Homo sapiens
  misc_feature (548)..(548): n is a, c, g, or t
  misc_feature (775)..(775): n is a, c, g, or t
aagaagcaggtacaggcagacatgcagccaggctccagggcctggacaggtgctgccatgccctgtgacaggaggaccccgagccccctgggcccggtgggaggggccatggtgctgcctgtccaacatgtcagcctgaggtgcggctgaggctggctccagcagctggtgtttgtgaccctgtggcattccgttggggagccttgtgatggccaccgtgtctctgacccttcgtccattgtgagcggtcccaccgagggaggctttgaggctgccatcgctgaaaaccattggacacaccatggggactaaatgttacagtttgggtcactggaacttataccatttggacaatgactcgtggtggactggtgggaggccccccacaatcccggcgttggggtgtgaggcaacggtggccgtttttcagaggggtgccacggtggattaccactggtaaccgtttgggccgaagggccacggtgggggcaagccggaaaccatttactcccgtgggaacgcagcattttctccgcttttccggacanacacgcccgcgcgggtttgtcggaatgtttcccccccgggcgggaaaacccttagggccctttgggtagggacgggtgaggccctattaggatatcatgccagaatgtcggcccttcgcggaagcccgggtgggcattaaaaatggcctcctggcttggcattaaaatgcggtttgggcaccgaccgcgagaatgtgcggaagccaaaacggcccaaaacgtgatan

SEQ ID NO: 723714 - DNA, 684 bp, Homo sapiens
  misc_feature (203)..(203): n is a, c, g, or t
cacatgtcactgatggtcaaattccacaagtcctttcttcatactgttgtggacaatctcagctgggtcattatgggcaggtggttcaaccagccagcgggagccctcctgatatcgtggatttgtacatgtgaatcttgtcaggggtcaagttcctccagtgacctgtactaccgacttactgctagagcaggagatcttgncacgtgatgaactccgtcgattgaattttttgtagtcagtagatgcctattagaaaaaatcggtctacgtaacctgtgcgtttcaggttttcagattactttagtaatccttcttgcggaatctagaggcgtgctgtgcttgaattctgatcgtctgttcgtccaaggggatcaaagtggcaactcattatataccccgatggacacgtggatgattcttggcttagacattattcgatctgacgtcgtataacgttgggtcgacgtgacgatgacatagccctgcaccttggccagagtgtccacagggcgagataggcatcgggaagcaggagcatcttcttggcagccaggctgggccatcttctcctggacacctgctgtgtaccaggaacttcgtcacctccttgaatgctggcggttcatttcatgatcagtgttaagcattttcctccatgggaaggaagcatgggatatagaa

SEQ ID NO: 723715 - DNA, 455 bp, Homo sapiens
  misc_feature (368)..(368): n is a, c, g, or t
  misc_feature (377)..(377): n is a, c, g, or t
agcatgcctgcagtgagactgtagagtagagcatcaggctgggagggaggtcacatatcgctgtgagcaactgccgcacggtgtgcccggtatggtgcggtcacctacatcaacgaggtgaccacggagatccgggttgctgactccacgaggaagccggtcctactggacaagaataagagccttcaggtggctctgacatccaaacagcagagtctggagactgccatgtcgtttgacgacaggaaagcatgatgcgatgtgaggaacggattcctaatgaggaaagtggctgttttcttcagcaacacacccacaagagcatccccacagctcagagaggctgtgctcaagctctcagatgcggngatcacccncttgttccttacaaggcaggaagaccggcagctcatcaacgcttttgcagacaataacacagcagtggggcatgcgct

SEQ ID NO: 723716 - DNA, 578 bp, Homo sapiens
aggatgtacttcgccgagagtcgtctgggttatcctgcttcaacagtgcttggactggaacccggcgctacgttccaccacccctggccggccgtcccatagaccatggccctccgatcacctcttcaccgcaccctcgtgactgccccaagtgtttctcgccgccgattccagaggaccgagcagaacagcgacgacacgccgccgcctcctcacttagtcgcccagcgcatgacgactcgtgtcaacccacgcagtgcagcgcacagaacataccaaccaggacatcaagaaggctgccaagacaagccgccagaatacaaagctagggaggcctacaagcgaacgtcaacaaagagtacaccagatcccaatgtcgtagacataccgagaggcgacggcggagtgaaaggaagggctcaagcaaggaaacacacgccacaacaaaacaagacgaacaaccaacaaccacaatgcagggaagacggggaaccaaggccggaagaaaacaagaacgaaagcaggcagaaagcgacgaagaatggaccaaaaaccacccacacagagacataaggcac

SEQ ID NO: 723717 - DNA, 321 bp, Homo sapiens
aaaaaaaaaaagccccccggtgtggaccccccccaagtttcttcctccctgtcccctgagggcacactgaccgtggaggcccccatgcccaagttagccacccagtccaaagagatccccatcccagtcccctttaagttgggggcccagtttgggggcccaaaaattgcaaaatccaatgagaatccccccaagtaaaaccttagcccggatgcccccccctcctgcccccacgggatgtgcctccccccccccctgtgtgtttttttaaaacatttattttttgtttttttcaaaaaaagttcaaaacacccccctgta

SEQ ID NO: 723718 - DNA, 295 bp, Homo sapiens
  misc_feature (247)..(247): n is a, c, g, or t
gaatcagctcgtaccctctataagggccaatctgtttcaatattcttagaaagtgtagtctgtatatcatgtagtactgagagtttgaggaaaaataaatgttgatcagcagaccacgtatttcaaaattctgaatcttctgggcacaggggttgtaactcatgccttccaaaggggacgagtgcaggtgggacggggccatgatatggaggaaatggtgtaaactgaatgtatttctttattggcntgttattcctgtataacactctattatcttggcctatatccgaggggt

SEQ ID NO: 723719 - DNA, 411 bp, Homo sapiens
gccagtatggagtgagtgctgcatcttggctcactgcaagctctgcctcccgggctcacgccattcttctgcctcaggctccgagatagctgggggtacaggtgcccgccaccacgcctggctaattttttgtgtttttagtagagacagagttttaccatgtaagccaggatggtctcgatctcctggcctcatgatccacctgcttcagactcccagagtgctgggattacaggcgtgggtcactgcccccaagagcaagtaccttttaaacattcgagacatttagttgccatcctcaaacccgtttgggtgtgtggagagaatgttgggtcgtgacatggttgttagttctctaaagatgtcagccatcactcatcactgtgtgatgggcacacattatgaggggga

SEQ ID NO: 723720 - DNA, 106 bp, Homo sapiens
  misc_feature (11)..(12): n is a, c, g, or t
  misc_feature (39)..(39): n is a, c, g, or t
cctgcccccannctcccagcctatccccccaacagggcntgctgggccacccgcagtccatggcttggctgtggctccagctctgtagtccctgctcctgctggca

SEQ ID NO: 723721 - DNA, 232 bp, Homo sapiens
  misc_feature (232)..(232): n is a, c, g, or t
ccaggtcctatacagaaggcagtgcaagacattgtaggggctctctgaacagtacacgatgtgggacggagcgatccaatggtagaaagaacgtcgtataagatcggcccattattgttctaaggtagacattattgaggagaagggccatcaaaagcgtagagaatgtgctaagacaagacgagaggttccacacaccaaataagtcaacatctgttctcctgtcgagcgn

SEQ ID NO: 723722 - DNA, 404 bp, Homo sapiens
  misc_feature (15)..(16): n is a, c, g, or t
  misc_feature (135)..(135): n is a, c, g, or t
  misc_feature (320)..(320): n is a, c, g, or t
aaccatccacaacannagctcaccagcagtgttgtccatctggaacataactaaaaaccaggaattatgcaaaaagttccctgagtaggcaaaatagatgttattttaaattcatgcacctaaagctcataaganctcaaggttttagtatttatataatcaacatttcccacttaatggcagtaatccattacctgaaaatcagatgttctacattttaaaagctgaccagaaactatttcccattatttggaatggaaaaaaatataatgtgttacacatcagctttaaaccaacaaatttcttaaaaagtaactaanacacagaaaagtgtgtatatgtaagtaacggaactaccattattgttatggtaaaatgatcaaaccatgtttgctgatcatcta

SEQ ID NO: 723723 - DNA, 260 bp, Homo sapiens
ttttttagagacaggatctcactgtgcgcccaggctgaagtgcagtggcacagtcacggctcactgtaacttcaaactcttgggctcaagtgatcctctggccttggcctctcaaagtgctgggatgacaggcatgagccactgtaccaagctgacatatttttgtttgtttgttctcttttcttttcttttttttttttttgagactctgtctctaaaaatacataaataaaaacaagtacaaataaaaagggaaaaat

SEQ ID NO: 723724 - DNA, 470 bp, Homo sapiens
gggaatggagatcttgtttcttatcttgacagcatgggaaatatataaagccagcttgatattacttgtgatttaaacaacatttgttgccatcaaaatgaccttgtcacagtatgtttcacatgtaagtgctgttttgcctcataattgtaggttgaatttattagaaagcattattaagtttgcagcaaaagctaatttccaaagctattcagtgtttgaaaatagtttgagggtgattctcctcatccataacgaattcagcctcctgagtagctggggctacaggcgtctgccaccatgcccagctacttttttgtatttttagtagatacggggtttcaccgtgttaagccaggatggtcttgatgtcctggacctcgtgatccaccgggcctaggcctcccaaaagtgctgggattaccgggcgtaccacccacggcccggccccactctgaagtaatcttaag

SEQ ID NO: 723725 - DNA, 656 bp, Homo sapiens
actggggcaccaccccaggttttgggcaacccccccgcccgttttccaagccgggggtccttccctcatccaacaggtgggtattgaccccggcactgagattgacccccaggccaggttcccggaaaaggccggaatggactgggtcccaaggacccccttcatttgggccacaatgggctcgttatggcccaggtgcgcaaaagctttttcagttcttgcgggtagagccacacaactcactggcaaaagcagttgggcgtttcagcctcatgctgcatggcctggtgacccccagcctcccttagttgttaagcctcccttgcccaggggtgggatggcattaaaggccagcatacagccctaggttggggcagggtcacggctggcctttacctgctcaggcccccatttttggggtgtttgggggtcagggagcagggagccctgcccgtggtttacagcgtgtggtagtcaaaaggtttagctgggcccagggcaggtattgcgcctgcttgggttttcccacgcctggagcatgcccctgagattgtgaccccccttgaggggaattttccaggtccctttttccctcaaatttggatctttttgtttttgaaaaacattgagaaattcaattaaaggcttttggaata

SEQ ID NO: 723726 - DNA, 909 bp, Homo sapiens
gcaggggtcctctctatctagctccaggctctcgcctgcgcccactctctgcgtccgctgtctagccgaccgatggccgggcctcctgtcgcgccccgctgctcctggctgggcatcctggccggggtcgcttgcgtgagccccgcgggcgggtccgatgtctcggaagccgacgcgcctggtgggaggcccccgtggtaccgccagagtggatgacgcgcgtgtgcgtgagtgcactcggactttgccgtgggcgcaatgcaacgaaacaccagctagcgactatggtactcactagtgcgcgacgcttggtaggtggtgtcgcagctcgcgacaagccaaagtcggtccctgtgggggtgatgctacctttcttgggaccgtgtagcatggagcgctgatcatagtgtaccataggacaccagctcatcttggagaaagtgtcccgttccactgaccatgagcaacttcctgtaataaggacaggcattcttgatacatgttcacatggatcgtaccagctgttgcactatggacacgcggccaccaaatggaacccttgtccgaagattgcacccttgttgcagagaccgaggctaaggcggtctagttaccgggcgccgtgctgctgctagccactactcaagcttttatatggagtgtacctcgtaccatggccatggtgtaattgaaataagtgggaaattgcgagggagctatatggatagggacttaaaagcactaagggaaagtcaggaacgtaccaagataatgagaacaaataaactgggatttatatacacagtgattgactaaatgataaggtatagagacactacttaatgaatttaagattatgaaaacacaaggttaagagatagaacacgaagcggagaaaagtctaatgaa

SEQ ID NO: 723727 - DNA, 1102 bp, Homo sapiens
ggccagaatccccggctaaatgctccttgattcttaacccacagaaatgtgtaagaactatgtgactcctgacatggtggaaacaacaacaacagcaacaacaacaacagcaacaacaacaacaacttaaatgctgaggagtgaaagtgcctggtagaagtagcctcttaccctatgctaatggatttcttcaacagggggaaataaaactctcttaaatgttacatctttttgtttctaagaatagacagaaacaatactgctctgaattacacttcggatgactaagccaagtgcttactctcttcagtaatattatctctgtggtttgcagcaacactcttacattgtatgtaaagaggggtagcagccatggcattctcaaaagaaagaaaatgcaatatgaagatcatcagtcttggtgccaataccataacaggttgtaggggactggagctggtctgagagccttaggatagcaccaaggtgtggccttggccagataccttcagttgtcctaggaccttattctgatcccatgtgacagctagacctccatgaatggaaactgaatgaaacaaagccaacattcccaaacacccaagggtgatgggggattgacaaagtcctccccagcaaactctcctctgagtctagtcaacctggaagcacactactcactcttacctggggaacagaggcctggtgttcatcgtgccttcggaacaaaacaacatctgcaggacaagaaaggccttagaattgaggtcaagagtcataaggattggaacttaccttatgagatcccggacagatcccagaaatgacacaggattcccttcacgtggccacttgagaacggagagaaaccacatgatgagacagttggtgaaccttcctggtccaggggaattctccatgggaaccacgcggagagtacactctggcactgtaggagcccaagacaggcatggtggtcatgttacgaacccacgttgggatactgctggcccacaacagttcacctactttatgcctcggtgctagccccagcgatgctagaaggtggtctccaccatagtgtcgccgcatgtaatcagag

SEQ ID NO: 723728 - DNA, 600 bp, Homo sapiens
aggaattcggcacgagggaaagtctggcctgttctagaagcagcctgtgcaataccacactggtgctctacgctgacgcgtaggagctgaataggagatgtgggaagctccccagtcaccgggaatcactccagattgtgcaaacccagaggcacacgctggtcactcggaccaatgccagggctggctgactgactgctaggactttctcacagactttcttctctagacgcactgaaggcctcacggagccatgtggtggcggacttgaatatgctcaggactgcagtggacagcctgtgtgcgtactactgcaagatatatgccaccgagaacagtctggactcagacacggggttactcgatgacctgacgaatgatccgcatatgttcgctggtgcagtggctgagatacacagattggtctcaatgaattgagtgtacattgcgccgaattatagtcccagttgttattgcccaatgagtggtcctttcccatgctgtccataaccacccagtatgtggcccctcttgacctattgtacctcctgcacaacaaggccattgcatatctactccccggttacttaatttccatct

SEQ ID NO: 723729 - DNA, 173 bp, Homo sapiens
cacatttgggtgacaagtaaggataggcatatatgtattaagaatgtctctggcagcacctaagagtagaaagaattttcctgttaaatgggtacctcaaggacagctgtctccttgtaaaaggcagaggaattactaaacttttgggggaataaaacgaacctcaatattta

SEQ ID NO: 723730 - DNA, 965 bp, Homo sapiens
agcggaaagggtacagaagccctgggaaggacgggccgggctctggggccgagcccttgtggtccgggccatggatgtgcgccggctgaaggtgaacgaacttcgcgaagagctgcccgcgccgtggtcctgtacacgtcgaggccgtcaaggtccggagtgttgcctgagcggacatgcagggggcggtggaggccgaagagccgtgacgacgagcgggacgctcagacgccgatcgcacgaaccggggcgacccgggcacgatcgaacgaggagatgccagtggtacgaagtacttaaccacggcaggaacccggagttctagcggagtacccgcaaggatcagtctaacatcacagacaagatcggacgtcacgagctgacagagcagggagaccatcgtgggacatcttggtaggacccgacgatgccatgggcctacttcgtcaccaagactactgaagagatcgaggaaggaaagtagagacggcgacaacggaggaccacgcgcatcgcaaagacgtttgcgcatactctcagcccttgaaacaggacttactactaagtccttcggatggcactagaccacgcgccgagggagtttcgccaagaagtctgagacatgaaggcgctttattcgtagggaaaaacacggcgcgacaggagtggttactttttgagactacctggaaggacgggcttatgtgatgcggttggcctgcgctcgttcacgtccatgacccttgctatgacttgtacatggaagggtactgataagaatgtgaacctcttcacattgaagttatcccccttgagtttgtcctttttggactatcccttaattaaaacgtgtcggatccattcccattttccagagcgctggacctccgttgcaatcggtcagttacgtgggcaatccttcctgtgttcccgaatttgcacggaggcatttgtcaatacgcagt

SEQ ID NO: 723731 - DNA, 325 bp, Homo sapiens
ttcacagggtgaagttctctctctactctttggtgaacagtgttactaacagacatgaaaaatatcgttgtataaaccaaaacatcctaagtccactttgcggcagtttacacctcaagcgttaacctctttttgtgagaaacttgaccgcacagagatttggtacgaagttcacagaaaaaagtaatctgccacctgaggtgtatacaacttggggatccgtgcacgttaacgattactaggactatgcagaaaccagagagtttaagaaaaccgcattggacacaaaccaaccacccccaaatcccactcctcccctcccctc

SEQ ID NO: 723732 - DNA, 171 bp, Homo sapiens
cgctcctatacacctatagcacactgagctggctgacccttatatccattctcgtagtctctaacacgccctatgcgccaggcgcgattcgtgcagatgcacacacctgacatggcgcgttgtagactataagagttccgcggccgaacgacataggctatggacatggtc

SEQ ID NO: 723733 - DNA, 640 bp, Homo sapiens
cgcaacgcctgacgctcagactactgactgacttttacgaagccgccttgtagacataaggcgcagccgatcgccctgcgtgacctgcacgtggattacacgctgggaccgagctacgtgctagtcagactggatatcagcctggcactgatctctgggatcaccgactgacgtgagcgacgacggcgtcagcgtaccgtcgtcctcacgacctctgaaccgacagacgccaacggctatacatgacagcatagctgtgacacgccggtatggagttaccagagtcgactgacacatctcgggatgacgtgacacatgcgtgcctagcgctagatgattcgccaagagcctgagcttagagatgcactgactagcgctgcaaacgcgttaatgaatgaacccatgagagagagttattacagtaacacacctagtaggccactgaagagattgcacatgagaaagcgacagagctgagcagacaggtgcctaaagacatggcagacaactaggtgcctattgatgttgcattcgaacgatgtgtgactcgaaacaagaacttgtgagccgtataggagcattgaagacatgcagactcgcttattacctggcatagtctagaacactgtactacgtgctg

SEQ ID NO: 723734 - DNA, 656 bp, Homo sapiens
  misc_feature (14)..(14): n is a, c, g, or t
cggcacagtggttncgctacgttagcaggatgctctgatctcctgaccttgtgatccacccgcctggctcccaaagtgctgggattacaggtgtgagccaccacgcccagcctatacctatatattttaatttaagatgggggtcttgctctatcaccaaggctggagtgcagtggcataattatacctcactgcagcctggaactcccaggctcaggagatcctctcacctcagcctcccaagtaactggcactacatacaggtcaggtgtgcaccacagcgcctggctcaaatcataattttttttttgagacagacttttgctcttgttgcccaggctggagtgcaatgatgccacctcggctcactgcaacctctgcctcctgggttcaagcgattctccagcgttagcctccctagtagctgggattacaggcatgtgccatcagtcctggctaatttttttgtatttttagtagagacagggtttcactatgttggtcaggctggtctcgaactcctgacctcagatgatctgtctaccttggcctcccaaagtgctgggattacaggcgtgagccacctcactaggccttacttctttttcctttttgtgttttgtgagacggagtcttgcatctcgctctgtcgctca

SEQ ID NO: 723735 - DNA, 816 bp, Homo sapiens
tctagcgagatccttcaagcaatcactatgtccccagcacgaaggtgtgtcccttccttcatatgagtgacatggaatcatggtatcaaaagtcatctaaaagcgctaaaggaggcacgcattcgtcacccgttggcacatagcgggtttcgtgggcgaacttgttgcggtatgtgattatataaactgaagagcagcggtgaaatacgtatatgtgtccatgtcattcgtgatccacatgcgtgtggcagtccaaggcttgtcgtaggagcaatgactgttggtatgggctattccatgtatcgggaattctgggcaaaactaagccttagaagcagagcaggctgtctatggtctagtcggaggagccttgcttccagtgtaaatgtcttatattaaaacgttacctattctcgtggcaccatacactaatctgtatgggtacgcatggtaaccatggccatgccgagctattggcttcctttcttgcaggcttgatatgcttggtgaccgacttatagtgactaagtttactcaactaggtcatcacaggaagtcacgcttagctttcatacatgtgatctacaatgcagtggatggtgttgcacatgcccacccctctcaactttttccgatgaacttagtcttcaacagaccaataccggcaatcctgacaggactccctgttgctgacgaaggcgcgcaaataggatgtagctacagaggcctatagcccagttaatcacctttgtctgcggttcgtggaggcggccggacacacggcccacaggtcgcaaactgtgagcccaaaaaata

SEQ ID NO: 723736 - DNA, 882 bp, Homo sapiens
ccttcttccgagcctctcctctggccgccgcgcgggaagagggcgagatggcagatgagatggccaaggtcaggtcgctcggctggtggcgacacgatcttggggaagcatcatccgcagggaaataccagccaaaatcatttgggaggatgacggtgccttgctttccaatgaacattccccctcaaagcaccaacacatcttcgcgtggtgatcacccaagaacacatatatcccaagatttcgtgttggcacgaagatgaatgatgaacagtcttctggggcacaacctccacttgatctggtgggccaacgaccactggtgctggctgactctggggccctgaaacttacaggggtcaatccggacatgtgcgtcgtctagcacatgaaaaggtcacagattgggctgcgcacaagtcctgtcctaatcacgggtccatctccagtgtcctgtgggacgtgtcggcaaaattgcattggggcctcccggggttacagccacggttcgagggcgataatttcctctttctttagcggcaacgtggatctcaacgttcagggccactttcccagggtcatgttccacgcggttcaccccacaacttttattttcggggccgtggtggttaccttggcgacgacggactctccacacacgaacaaactacagttttcaaacaacccggcaacttccagttatttcacacaccgaacgactggctcggccgtgggcttattcacaacacagcacagcacaagccaccacacacatacaccacacacctcatgtttccgacgccacccgggcccccccgaagaaagcacttctctcacacaaaccctccgcactgggggcgaccaccacacccggtcgagcca

SEQ ID NO: 723737 - DNA, 856 bp, Homo sapiens
tcgtcgtgatctctacacctccctcgcggttccaacgtgtttaatggccctccctaactctgtcctcccctccattcccaggggtcctcctggcttcccctcctggaaatcgtgcacctctgaatgctggcaggtcatttacacccccaccggggcccaagccccccgccatggatctataaactaaggcttcgccccgcacagaactcccctgggcaacgccacccccacaatgggaaaatgtcccaccactgatccaccaagcgtaaatccgaatctcccaagactccccccctgtgccagcaagacccaccacccccgccacaagtgggccaaggatacgacacgacaccttcgtccgaagaagacatttattgccgccccgaacacactcggaaaagctcagtcacatccctggccactcagaagtatgcccatccaacccccatgagaaacccgtctcaccccccggtagacattggccagtccgttataaagtccggaaacccaaccggctgctggagaggaagtggagaaaataaggaacacctgtacacccgcttggtgggactgtagaactaggatcacacccatgtggaagtccaaatgctggtgatactcctcagggatctagtactaggatacccgttgaccccgcccatccccttgctgcggtataaaccccaaggcattgtaaaacaagctgctgtaaaggcgacacacacaaagaatactgtggcaccaatcaccactagccaagacttgggacccacccccaaagtcccaccaagatagactaggttaaaaaaatgtggcacaaaaaccccccgggaaactaagccgccctaacaaatga

SEQ ID NO: 723738 - DNA, 864 bp, Homo sapiens
caaaattttaggattttttttttttcttcattacagattcgtcttttttttttttcttataaaagccgtaacccagtcagacaatttcaccttcatttaggcccctgtccgggtttactttaacggggagctttggcctggcctggtgctatttaactggtaaaggctagagcaccaaagtttctggccttctggattatagagaaatatgtttcacctctgattaccctgtctggtagtaattcttgatgatagccagtgaggttctaaaagttggcagtatttctcccttgatgggaatgtgttgagtgagggtaagggaaagaatatcttattcttttatgatgggggcaattgggctaaggtgcattttaaaattccctctactaaatgggtgtttccagagatagggaaaattttttttggcacagttttactcccacttggggaacgggatgctgtaggtggaaccatttatagcctcagatcgatctttcctaactaaaatttttaaagcctcttgtgtgacctcctcttacacaagattctctggtttagagaatcagatcacagatacctctcagggtgtggcaataataaatccgttctacaatagttgtagaaatgtcttagtggtactgcgggaatttccctaaatatccatagttaggaagccaggtcttatgggcatctgctgcgggccgccgacagcagggaaagacgccccccaccccccaccacaccacccaaccggcgcttgacgaccttgcaggacctgcacaaggtcacgtcgcgcgatcactcctaggacgcttgaccatatttcacgtgtttgatatatatccccccgcacgtactactccc

SEQ ID NO: 723739 - DNA, 251 bp, Homo sapiens
atcatccatccagccctcatccagctggagtcaggcctgcaatcagcaatgaaaagtttttattttcttcacggttagaagagggacagcctcttcacggttctgcacctctatcccattaatctggataatgcggtctccctcatcggatgcgcccatccgttggctgcaatgctggttagggtcaatctcactgtatataaatccctatgtcgtcttcatcgtccgtccagcgcaccaggaattcgccg

SEQ ID NO: 723740 - DNA, 848 bp, Homo sapiens
  misc_feature (17)..(17): n is a, c, g, or t
  misc_feature (26)..(26): n is a, c, g, or t
tcattggttggtccccntgatggtanggctatagtcgaccaggcccccgagatgatcatggtgtacgcaaaagcatcacagtgattacttcggacgcttgtgaactggagcgatgtgcaatgcactttcacttgtggcaaaaatttcgtggacttgagcattgaagagtacattcgggtttacaatgctgtctgggagtatatttattgatgaatattcaggagaatcattatatctgtgaaaaatctcaagagtgtcttaaagttgactggagagtaaaggactcctacatgaaaagaataaaaggaacggcatgtagtagatctctactgggaatggagaacccctacctcaattggtacatgtaatgcgaagtgatgggacattctctatatgaaaccagagaatctatgcaggattgaatattagatcggaaatggaccaagatatcaatattgatacaaatgatatcatgtgagcagattaaaagtgacaagaaaaagaatataaaaggaaggtataacagaaaatggctgaagaatcagtggggaataatgaacatgggagaagaaagaggatggaaagggatgatgtcgcagtttggaagtaagtaacagggtaaagtggaaagacatagaagagggagaataggacacataaggtggagcgacaacgtcagagaaaaggaagagaacacgacagagagaccagcaccagaacacactggagaaaaaagtacgaaaacaagcaaaaagaaagaaccaagacgccaccaaaagactcgagaaaaaagcgtaagagactcggagaaacgacagacaacacggaaccaaagggaaagacagaaa

SEQ ID NO: 723741 - DNA, 181 bp, Homo sapiens
attgaaaagttaccccaggtttggctaaagtgacataggggccaaaggagtgatggggaaaaagggtttgggctggcctcccctggctctttaagctcccctttggttaaaaactgggttttttgggcagttttttttaaaaagttggagtaaaaaaagggttaaaaaggaaaggccaata

SEQ ID NO: 723742 - DNA, 84 bp, Homo sapiens
cccacgcggaaggcaactgcctgagaggcgcggcgtcgcagcgcgcccagagctgaggaagccggcgccagttcgcggggctcc

SEQ ID NO: 723743 - DNA, 691 bp, Homo sapiens
tatgctgtgtcctttgcttccgagactcgcgtccaaggagatgctctcccgcggtctgtgctgctgcaatttagagtcctgttcccttctctccagttctccagtcccgttaccaaggagaggggagcaaactggttttgggcaagggctttggccattcatgtcaatgctggttgtgggtttttcaaggtgccatagccacccccaaatatgtttgtttaaagcgtggggttttgtaatctctgccacccgttgtcaatgggagtcttgtaaagttgccgaagggtaggttcatctccaggttctcgggattcccatccgtccttggcgatgcctgccagcagtgggtgggcagcctgagctccatcgggctcgcctgcacagcactgcgagtatcgttctatgatgcatccctgtgactacagccgtgacgacatgtcctacagagttaccatatgtggtcctctgcacttacactggaatggctatccattttagttgcgttatgtaatttagatcacgcggaagtgtgctgaatgttttgcagtgtgtaggggtttgagcaccgttgttcattcgtccttccgttgttatcctcccgattccctctgcatgaagtgattctgttgacaataatgtatagagcgcgatctcttcagctggtttatctgcagaaatttctctggtaact

SEQ ID NO: 723744 - DNA, 482 bp, Homo sapiens
tctagaggatctcccgtgtgtgtacatgcagagagcagctgggtttcccgcccagccggccaggtgaaggaagaggcacgtgctcctcagagcagccggagggaggggggaggtcggaggtcgtggaggtggttgtgtatcttactgttctgaaggggcaagtgtgtttgttggtttgtagtgtatcttgttttactgatcggagcatcaactacttgacctgttgtaggcagctatcttacagacgcatgattgtaagagtaggaaggggtgggtgtcagggatcacttgggatctttgaacatttgaaaaaattacacctggcagctgcgtttaaagccttcccccatcgttgtattgcagagttgagctggcaggggaaggggcttgagagggtgggggctgaaacccctccccgggaggattgcccatctgggtcttccatcttagaacttgttacatgacagataagatactcactg

SEQ ID NO: 723745 - DNA, 160 bp, Homo sapiens
tttgggggtaaaaaccccccccccaaaaagtgggacagcccggggcctttttttaaaggaccccgggtttttttaattggggcccggaaacccaactggaatcaaaccccgccttttaattgttttttttaactttttaaataaaacctttgttccgtta

SEQ ID NO: 723746 - DNA, 563 bp, Homo sapiens
ctccacctcccagccgcctgccttggcctcccaaagtgccgagattgcagcctctgcctggccgccaccccatctgggaagtgaggagcgtctctgcctggccgcccatcgtctgggatgtgaggagcccctctgcctggctgcccagtctggaaagtgaggagcgtctctgcccgggcgccatcccatctaggaagtgaggagcgcctcttcccagccgcatcccatcgaggaagtgaggagcgcctctgcccgaccacccatcgtctgagatgtgaggagcgcctctgcgcacagatcggcccgtcgtgggatgtgaggagcgccttctgcgctggccgcggatcccatcatgggaggtgaggagcgtcgtctgacccatgcacgctcccgatcgtgaggaagctgagggaggacgccgtctggcccgcgccgcctgcctccgatcatgggcaacgctgagagacgcgtcatccggaccacggcgaggcaacacgattccagggaggaaagggtgaggggagatcagccacacccggcctggggcagccgaacccgagggg

SEQ ID NO: 723747 - DNA, 338 bp, Homo sapiens
tcatagctggatacgggtgtggtaggctcacacctataatcccagcactttgggaggccaaggtgggcagtcacctgaggtcaggtctttgagaccagcctgaccaacatggtgaaaccccgtctctactaaaaatacaaaaattagcttggcatggtggcgggtacctgtaatcccagctgcttgggagtgtgaggcaggagaatcgcttgaaccggggagaccgaggttgcagtgagctgaaaccgtgccattgcactccagcttaggcaacaagagtgaaactctgtctcaatcaatccatcaatcaatcaataaaatagaggtcatgctgacta

SEQ ID NO: 723748 - DNA, 241 bp, Homo sapiens
  misc_feature (51)..(51): n is a, c, g, or t
tcgacggtaccaacacacaccaggccagaacttagcaactgaggctgctanctgagaagtacgcactgttcttggcttcatggagaccatgctccatttctggtgttgaagtctttgagagaacaggatcatgggctgagatggcaacctcctccccatgccatctgcagagcctgaagaggaaaacacaaatacaagttgaggccatcttctttcccctagggccctaaacctctaagcc

SEQ ID NO: 723749 - DNA, 318 bp, Homo sapiens
tttgactctctgggtaatatagaagtgaattgcttaggctgggcacagtggctcatgcctgtaatcctaacactttgggaggcccaagtggatgaatcacttgaggccagtgtcaagaccagcctggccaaaatggtgaaccctgtctctactaaaaatacaaaaattagccaggtgtggtggcgtgtgcctgtggtcccagctactcgggaggctgaggacagagaatagcctgaaccgggaaggcagaggctgcagtgagccgagattgcaccactgcaccactccagcttgaacaacagagcgagaatccatctc

SEQ ID NO: 723750 - DNA, 150 bp, Homo sapiens
gagtcggcccctgtttgtgtcgtaagataatcggaggtaatatgacattatcaataaaacgatgacacatggtggggctatgcatctagccctgcagcaacactgtgaaagtccattgtcatcctcccatgaaggcaagctgttcgtagg

SEQ ID NO: 723751 - DNA, 1308 bp, Homo sapiens
ggacggctgctgcgcccgcggctccccagtgccccgagtgccccgcgggtccccgtcgtagcgggaagtgggacccaggccctaggcagaacccaggcgccgcgcccgggacgcccgcggaagagagccgactcccgtcccacgtcccatttcgcccctcgtgtccggagtccccgtggccagatctaaccatgagctaccctggctatccgcccgcccccaggtggctacccaccagctgcaccagagtggtggtccctggggtaggtgcttgccgtactcctccgtccgctccagtcgatgcccccacatcgggctggataacggtggtcacctagtgcggaggacagattacaaccagagatctatctctcgtgggcatggcggacaatagtgtctgggacagtttggcaggatgccagacgatgccgcaaagcgtgtacccttgggtgcccctgtgggctggtttagccaaacaaaagggaccacactggccgtggatggaggctaggggcccacgatactgaccgaagtccaaaccttgtccccgtccgcatatgggacatggtatctcgaactaacctattggaggcataaaacacaaccgctccagcgaatggccactccacgtatttccggtcaaatattcccaaggggagcctcgcttgtggcccgagggcgatagcccccattaggtctcgctccccctggcatgaagcgagagtcactcaaagaggaccgctaactcggtagggaacgtgaactcaggtaaagagttacacgatgcgtcaaggtcgtccaggatggcaagagtcctcatgagagcaaagaagaggacacagatgacgagaaataaagccaaggaaaaccacggggagccgggagcaggggaaaccacagcggagaggacgcccaagacccaggccaggaagcacacggagcgccgagtcacactagatggttccccgggtattaaccccccaagcgacaagtgcagagggcaccggagaacaaacgaaaaaaagagaaaacagacagaaaaagaggactaaactgggtgacgtgggaattgtgtccgagcgagagggtgagaaatcaaaatatcaagaaggagtaaggaagaatggtcatcgaatggacacgaagtggagaaacatgaggagaagtggtgagcggaaaacagatctaaaattatcgaacgacgagtggaggcgaagagcaaatacgccggagagcaaaagatcgaacaaagatgagagaggatatatgcaaaaatgtgcgcgccgatctcgtgtcgcgaatgaaaaa

SEQ ID NO: 723752 - DNA, 1308 bp, Homo sapiens
gagtccgcgccccgcactccatggagcagctgctgcgcgccgagctgctgcaccgctacccgtgcgggccttctggcggccccgtgctgccggctgcatcagctgacgggcctgagcctacgacacggacgcagggcccagtgttcgtcaaagtcaacctgcgaggactgcagtgcccggcagatgttggaagggggaggtggccaggccttggatggccctccgagatgcacgggcctgcgtgctgtggtgcctgaggcccatgaagtgtcatcgacctgcctgggaggtggggcccagccttatgtgatggagcaatttgaacgatgaacgagcttgagcagtcaagcatcaaaacttggacgagcaagatggcacgcatttgcatctttacaactcagcaagctcagggagcacggtcgcaccgcgaggcgcgagaaacacaggtggtgcccgaaagcaaggtgaaggcgtgctgacgccctcagatactggtggcacaaaggtacgggcattccacaactggatggacgctgacttgcgtggcttccaatcccgcaaaggtggcactgagtgggcagggacttgaccttgggcccagacaccgtatataacgccccccgagaccacccggggaatccaagaggcccgcacagctatgggcaccccatccaataggaggaacaggtgacctaattgcattgacaccgaagaaggggcacggagaacacaacatgggaaccacgcgagaatcaccacagggttcgacatgaatacaccctggggaaatcatagagtatctattggaagcggccctaaaagaaggacatagagagcaacccagacagaatatggcatccccacgagagaggggacatccatcgatagcgcacacgagcagaaacacaccgtttggcgccttgactatggcaccgaacagataggcaggagcccaaacataacttatatacatcaacgcacgcggaggctgttaccaattatcccttaatatcgggcacaacattaaccagaagacagatattaaggacaccatggcgacaacctcgcgcccatattgagcagggatgaaggaggcagagaggggtcaccacccaacagaaaatccagtttatccttattaacgccacggagccattacaccaacacccgagcacaacagatgtacctgcccatagacgggaccaacactgagcgataatcaaacacacagcaggcgactgagatttagatccaaacaccacagcatgtttaagacataacatcttataagccactcttgagaaaaca

SEQ ID NO: 723753 - DNA, 407 bp, Homo sapiens
  misc_feature (24)..(24): n is a, c, g, or t
  misc_feature (205)..(205): n is a, c, g, or t
  misc_feature (210)..(210): n is a, c, g, or t
  misc_feature (404)..(404): n is a, c, g, or t
gtgtgtgggccccacccaaggtcncctgccttggttaagtttaaatggtccagcctccataattgtgccagaagacttcccttaaatgccctgcaatcattaagttcctccctgtcctggcccaggcatggtgcctcatgcccataatccccagcactttgaggggctgacgtgggtagatgacttgaggtcaggagttcgaganccagncctgccaacgtggccaaaacccatctgtactaaaaatacaaaaattagctggcatgatggtgtgcgctggtagcttcagctattcgagaggctgaggcaggagacttacttgaacccaggaggtagaggttgcagtgagccaagattgtgtcacttcacttcagcctgggtgacagagaagggctctgtctaanata

SEQ ID NO: 723754 - DNA, 141 bp, Homo sapiens
caaaaggaacaccatttttaattctgaaaagtagcataatgtcaagccataagccatgggtccaccaatccatacggcttgtttccaagccagccatcccttctgtggttcttttcgccaacccgaatagtagtagtaggc

SEQ ID NO: 723755 - DNA, 300 bp, Homo sapiens
cccagcacttattacttgtatcaccattccacatacccatattggccacctcaagatgaaaacagataagtcccctcaatgtttactggctctactcccctaatattaaacataaaaccacattggaaatatagaaattcaaatagaagttacataaacctgtcataaatcgtatactaaaaactatttgtgggacagcatggatcacaaatggtctactgtgtaaatcttagaatgaggcagacaaaagttggaaggccggtttattttcccctccttctcctgcttcagattcgtctc

SEQ ID NO: 723756 - DNA, 828 bp, Homo sapiens
tactcgctgacatgggacccacttaatgatatgatacagtgttgaaaaatgatggtgttattcagaccacatgtgaaacactcgtactccaattggttagcggtccccaagaatgaaacatatagccaaccagtgcaacatgaagaaagtagcaacaaggctattcctcccgcagaacgctgacattcagagactccctctggagagtgaatctcagatcagtgaaaccagagtgcaatgaatgaaagaagaggatatagaacttgggatgacgattccagaagttcacatctgagatcatatataaactaagacacatggagagaaacttacgaagaacatattaatggctcattcgagaatcatttaggtggtcaaggctacaccggaccacgggattagttttcgtgcaagcacaaaagagctacgttcagtcagttgttcgctccatgacttgttgcgttcacagtcagtaactaaaacttgcatgttcacaggtagaaagttctcctaccgattgaagtcacgtgagactatgaaacgatctggatttggcgctggggaccagatgttcaagattggattagggtcgtttattacagcaatcacaagtattccgaagaacaagaaagcctaggagactactgtcgagctcatgacttcccgcaatccttaaacttacgactgcaccagatatcctacatgagtattaacgtgagccatgcggtaagtggccggaactttcacccttgtggcaacgtgtccgctactaggtattaaacccctgtttccacagctcgtgttcacaccggactggtttaatgcctc

SEQ ID NO: 723757 - DNA, 543 bp, Homo sapiens
aggactcgaacggctcaacggaactttgaaatattcagaaaactatgctataaacagatgtgctgacatccaggatttgttgttccatttatagaacacaggcagagcaaatttagcataattcataagggccctaggattttcagaatagtaaatgagcattggcttcaacttaaagtcaccagctgtataagcccctaacaagagagtcagcctgtcctttttttttttttgaaacaaaatctcactctgtcacccgggctgaagtgcagtggcccgatctcagctcactgcaaccccgtgcctcctgggctcaagtgattctggggcctcagcctcccgagtagctggaactacaagattgcgccaccacgcctggctaattttggtgttttaagtagagatggggtttctccatgttgcccaggctggtctcgaactcctgacctcaggtgatctgtgatctgccctcctcggcctcccaaagtgctgggattacagttgtgacccaccgcacccagttgaaacaagttccgttgaagc

SEQ ID NO: 723758 - DNA, 142 bp, Homo sapiens
  misc_feature (2)..(2): n is a, c, g, or t
cntcttggtgtggcgcgtggggtcttaaacgaatatttccacaatgtctgtgaactggacctggtgttcaacttccacaatgagcctcgcaaagagccacacaaagagccacgcaaagggccgcacgatgagccgcaccaag

SEQ ID NO: 723759 - DNA, 651 bp, Homo sapiens
aacctaatatcacccacgttccaccggacatgacatatgataccaccaatacaacacaatgaaccatgaacatacacatacaccaagaaaagaacaacagggaacaaaaaaagaagacacacgcgagaagaagagacagccagcacgagcacagacaacaagaaaacgaagacaagaaggaaacaaaaaaacagcgacacaaacaggagggaaacaaggaaaaaacaagaaagaaaagaaaaaaacaaaaagaacaacaaaacaaaaaaaaacaacaaaaacaaaaccacaaagaaaagagacgaacaaaaaggcaacaccagacaacaaaaaaagacacaaccaggaagagaaccagagaggaaagcacaggagaaaaaaaaaacacaaagaaaaaaaagagagaaaagaaaaaacaagaaaagcaaacaaaagagtgaagaagagggaacgcacaacaggagaaaaaaagaccaaacagaaaaacgaaaaaaacaagacaaagagaccacaccaacgagagaagccacggacaaagcaaagcacacacgcgacagacaacatgatcgacacgaaacaaacagagaacaaagagaagacacgccacaaaagcgacgagaagacgcaaaaacaacgagaagaagaccaaac

SEQ ID NO: 723760 - DNA, 352 bp, Homo sapiens
gtggaatgaaacagttcagagaggatatgggaaagggaaaaaaaaaaaccaaaatgtgatttccaacgagattagagattggttcttaatctacatggtcatgttacccatttgatagcatctatctcaggggtataatgtaatctcttggccaggattcatgaaagttaagattggctttgataggaaacgttatgcggaaatatggactctagagagggtgggcggtatataaaagcagcagagcaatttgcatttctaatacaccctgcttgagactgatgtcattagtgtaggtcaggccacggctggtggaggctactcaaaatacgtgggtgaccaataacccaga

SEQ ID NO: 723761 - DNA, 139 bp, Homo sapiens
gtgaagctgtgatagtgtaactggaaagctagtttggtgaaattcctttattattttttgtgaacatgctgatctttcccggacaatgaactgaagggtaatttactggactctcgtgtacagcttcatcaactttaac

SEQ ID NO: 723762 - DNA, 1085 bp, Homo sapiens
cgccaaggccacaatcgaggtaatccaacagtacagcagagacaggctcatctatactggaagtactgcaagcaacatgcccagcagcagcaagaccaagcctgtgctacagctctctaagagcgcaactgagtagtataggcgtggtgagaccccacactacatatagctcaaaactagacccacctacagtccagggacatgtgttaaaggctgctggggaagaatatggagaagggtcagcacctgggtatcctcttacacgcaaagaacgtgatcgacaaaagcagaagagcatgtccctattgagccagcagcccttctatatcgctggtgctaccatgtctgaaagggcaggatagaacaacgcgagggactccttacctccctctacagccaggtgcaaccagattgtgaataattggcgagatgaccagtacttagatgatagcaaaccaaagcagcatatgcatgaggcactcaaactgcggctcaacctaggtgagggggcatgtaagacacggagcagacgcagcacccagcagaccacagagagtgagaccaatgctccatcctgggagatcatcaaacagaaggcacatgtcgacaatgcagacccagcaaatgagctcattcaaataaagtgataggaacatgcgaagagacagagcccatacaaaaggagaccatagagcctagcagaccatgaccaagacaccacgcaaagggaagcaatggagggaacacaagccgggcataacatagaccccatgagcaaggaagaggcagaagaagacgaaggaagaagacagccagacgaaacaggacatggacaaaaggatacagccaagcatgaagacacaaatgacccaacgacgaagaacccgaaagatgcacaccaccgtggtgtaaacccacacagagagatccccgaggagcgaaaaccaaagggaacacacaagaaagagaggacacagaaaaacaaaccagaaaacaaaggagggacaacgggtacaccacaaaacaaaaaaaatgcgcccagggaccactaaagagaagaaaaacaaaaaagaacaaacacatag

SEQ ID NO: 723763 - DNA, 317 bp, Homo sapiens
  misc_feature (5)..(5): n is a, c, g, or t
  misc_feature (102)..(102): n is a, c, g, or t
  misc_feature (232)..(232): n is a, c, g, or t
  misc_feature (234)..(234): n is a, c, g, or t
  misc_feature (308)..(308): n is a, c, g, or t
cagangagaccgtctcaaaaaaaaaaaaaaaataccatctcccaccggtcagaatagctattatcaaaaatacaacacatgctatcaaggctgcagataaanaaaacccataccccgttggtgagaatgtaaattagttcagccactgtggaaagcagtttggagatttctcaaagaacttaaaacagagttaccatttgacccagcaattccataactgggtatatcccanantgaaaataaattattataccaatatggacacatgcactcatatactcatcactgcagtactcacagtaggcagngtcgtggga

SEQ ID NO: 723764 - DNA, 818 bp, Homo sapiens
gcttccccgatggccactgcgtgagctggatgcggctgtccattcctgtgaccatctcattgacaatggacatcggctccatagtcgtgacccactctgcgtcgcgttctacaggcatgtgggatggcggcactggcgctgagagtgggcggatgaacgggtgcggaaactgctcaagccctgagattctccaagactctacagacttgagtaccgttgttgatgacagtcgcagaagctacgctgtggaatctatgacactactacaacaagacgccacgagctgagtggatgatgacttcctagggggtgctgagtttgttccctaggacagatgtgtccagccaggtactgacttcatcgcccttgatgctgaagcctgtgaaagacctggtggatcggggcagaccaatcacgtgtctcaagctcaggaattaaaggacaatcgtgtagtagccatggaggtagagggcagaaacctagataagaaggacttcctggaaacatcagatccatttcttggagttcttccgtccagagtgatgggaaatgggctacctggtgtacggatctgagggtcatcaacgaaccaaagctgacactcctacgatggaaagcgtctctcatgtgcccggttcagcatttgtgtggttgggaaccccaagaaacatccattcaggtgctactgcgccgattatgacagtgaccgggtcacaatgacttctcatcgggtcaccttccacaccaggttggcccaagttgcaggcaagtccggttggcctttgcatggattcatccctggaagcagcgtacacagg

SEQ ID NO: 723765 - DNA, 193 bp, Homo sapiens
agtgcagtgccatgatctagctcgctgtaaccccaaaactctgggctcaagtgatcctcacacctcagcctcccgagttactgggttacaggcatatgccatcatgcccggggaatttttgtatttttggtagagacaaggtttcgccatgttgaccaggctggtctcgaactcctgggattgggctatcaaa

SEQ ID NO: 723766 - DNA, 644 bp, Homo sapiens
catcaatttagcaccaaaataatgatatatacgtagccagtatagtggaggtacaagtagtggtaacatggatacatgtaaatatattcgtgtctgtatatgcagtaggggactggcaagtattcagacagatttgaacatctgtattcctttaattacatttcattagataattattataatcttaaaaattacaagttaaattatagtcaaatctaaagttattacacaacttacattatttttatatttctttaggccatctgaaggaggaacattaaatggtgagtccgtatggtagatttaatttgaaaattaaaggtcataattaaagcatttaccatattatcgtaggtaagacatgttagacttcaagttttaaaaagccagggaagttgaaagacttcgctcatctttaatatagataatttagacacatgacccacctataaattattttgccctcttttctgttaccactccccagcacccaaacccagagtactgttaatacactaggctctctggctgtggcctccatcgtaaataacacagtggcttactttatgtgggttgtggtataacataagcagagtcatgcagttataactgttaagagattcatcactattaactgtattagg

SEQ ID NO: 723767 - DNA, 198 bp, Homo sapiens
ccctgtctgattgaccctggacagtgattgagcctctctgccttagtttcccctgctgtgaaatgggtataacggcagacatccacctcctaacgttgtgagcattgactggagtactggggctgaagtgctaggcacgaggccagtgtaggtgagcgaaggggtccttggacttgggctcagcattcctcgcaacag

SEQ ID NO: 723768 - DNA, 1051 bp, Homo sapiens
  misc_feature (614)..(614): n is a, c, g, or t
  misc_feature (696)..(696): n is a, c, g, or t
tgtgtcgaacgtcagccagctgtatgtgatctgcgcgctgctcgtagcagcccacttgttgagatcaggtccctgtcatgtgtcgtcaggtgtaggctccgtcggtgcggtcgcagtgtgacacgcttgtggcggcagagcgtgtccgtctgtgtgaggctggccacggtttctgtctcggccctcgaacccatgatgtcttgtcgtttctcgtgatgtgccgttgggacaacttccctccatggggtaggcacaacttggggctctctgtgggggcttttcaccctgcgacacagttgttcaagagcaacacaccattggcggggaagataacacgacgccacttccttttagggagtaaacagatgtgtgcgataggaaagggcgggtaagcaccgccacctgtgggttgatcgccgtggctgcccagtttgttgtggccacgaaaccatcgggcgtgtttaacagtgtttacagtcggtgtgatggtcagtcacactacgaagggatatccccacgcgttgtgtatcaatcaatttccaggcattaattaacaaacgggtgtggaacacgatagcgctgcgtctgcagacatagtggtattgtcataattnattgtgtggcacgcgactgctttactcggtaggctaggtatgtttgtttcaagggagtccctctttttggcccgcgggcgtntctagcaaaaatataaggtggaagtacgtgatcttctctgctctcatcataaatgtttacgtcgcatgacacccaccgtaggcgtgtcaatatgtgtaataacagccgaaagtttcatgaatatttccccccacattttctataattattccacttctcttggaaatatcttgctcaaatatgaacatatatttgtgaacaaacgtctcaacaacaccacaacatgaagaatgtcatatcaggtatatattattcatccaaatcattttcttgaccccattctttattaatatattgcaccccccgctcttttaaaaaaaagtacaattcaaaattttgtccctaaacataacaa

SEQ ID NO: 723769 - DNA, 407 bp, Homo sapiens
  misc_feature (153)..(153): n is a, c, g, or t
  misc_feature (156)..(157): n is a, c, g, or t
  misc_feature (226)..(226): n is a, c, g, or t
gcggcacgagggtcttagttactgaacaattagaaaaaggacatatagctctaacgtttcccccctggaattctccactctttgttattattattattatttttcttgagatggagtctcgctctggcctgggtgaaacagtgagactcccgntcnnaaaaaaaaaaaaaagtttgaaaggcattgtctgatttgagaaaccttttcctgtaaacgctgggggggnatctcgtactatcgctgaccggttagtgtaaaaagcaacagtcttcccctaaagaaggtggcagaagtccctccctttcctcagcaagtgaggagggtctagggccctcagaaggttttggaagaagtcacttgctacccaaaagagtctatctggggattgtaagagtaaggatagattt

SEQ ID NO: 723770 - DNA, 1087 bp, Homo sapiens
  misc_feature (410)..(410): n is a, c, g, or t
  misc_feature (412)..(412): n is a, c, g, or t
  misc_feature (442)..(442): n is a, c, g, or t
  misc_feature (448)..(448): n is a, c, g, or t
  misc_feature (450)..(450): n is a, c, g, or t
  misc_feature (462)..(464): n is a, c, g, or t
  misc_feature (514)..(514): n is a, c, g, or t
  misc_feature (547)..(547): n is a, c, g, or t
  misc_feature (565)..(568): n is a, c, g, or t
  misc_feature (585)..(585): n is a, c, g, or t
tgagagtgatgggaggtctccttgcgttggatgctgtgttccagatcatcctcccgtggtaattgaccccgtgaagtacacccagaccttcacccttcatgccaaccgtgctgtcacttacatctataactgggcctacggctatgggtgggcagccacgattatcctgatcggctgtgccttcttcttctgctgctccccaactacgaagatgaccttctgggcaatgccaagcccaggtacttctacacatctgcctaacttgggaatgaatgtgggagaaaatcgctgctgctgagatggactccagaagaagaaactgtttctccaggcgatttgaacccatttttggcagtgttcatattattaaactagtcaaaaatgctaaaataattggggagaaaatattntnaagtagtgtatagtttcatgttatctttantatgtngngaagtgtgtctnnncactaattacctatatatgccaatatttccttatatctatccataacatntaactacattgtgaagagaatatgccgtgaaanttaacacttataaggtannnntgaggttccaagattantaatctgatcaagttctgtatttccaaatagaatggactcggtctgtaaaggggctaaggcagaagaggaagatcaggtacaacaagtggttattgacaaacattctaaggagaatgcaaaacaacggttattttcaaggcttcgaactatttaaggaagcacaaatcatttccctacatgcatatcatccgtgagactcctcattaatatcctgaatcattcatttagctaaggttcatgttgactcgatatgtccatctaggaaggtcacaattctggtccaaacctgttgcctagtggtaggtctcccttaagtgggactaatagatgaaattctccttaaggcccataggtagggggggcaaggctcttaaaatcgggtggtcgcgtttttgtcaccccgctcaccgtgacagccgggcatcacaaacagaccgtggcggaaacaagctgcacacaacaaagaaaggtaggctgcaaagggtgagaatacctcggggg

SEQ ID NO: 723771 - DNA, 205 bp, Homo sapiens
gaagggatgaaagattgcctcaagctttgccccaaacggacaatgtagagatccttccacattcttacctacgtggaggtgctagaggtagagtaggatatttagctaactatgagaaacagtatccagattactaattcacgaagccacgagaaccttatagccaactagacacactacagggaggaaggtcccgtcaaggttt

SEQ ID NO: 723772 - DNA, 165 bp, Homo sapiens
tgaggatattagggcagtcgcccaggtatccattaacagaaactcaggtaatcagattgtggactatccctacattggagtctcgtactctactgaaagtaacgggagtacattattggtccatgggacaccacagattaggagttgggagacttcctctgtcaa

SEQ ID NO: 723773 - DNA, 359 bp, Homo sapiens
ctaggggaatatgacagaaaagcatcccataggctttaataaactttttaaaatatataaaactgaaaattaatagccatttaccctgaaagagttttggggggactttgtcacttgcatagtaaaagcatgggcctcattgttcagaagattagctttaggtcctattttcaaaaacgaaatgggaggataagctggaaaactgtagttttttttgcagaaaaaaaaggcccacaataaaaaaggttttgaaggaatcccggaaaacaaatttataaaaaaaaaaactatatgggcaggaatttttaacccattgacttgaaataataaaatttacaagaaagcaaataaagccttta

SEQ ID NO: 723774 - DNA, 1079 bp, Homo sapiens
  misc_feature (24)..(24): n is a, c, g, or t
  misc_feature (50)..(51): n is a, c, g, or t
  misc_feature (53)..(53): n is a, c, g, or t
  misc_feature (107)..(107): n is a, c, g, or t
  misc_feature (118)..(118): n is a, c, g, or t
  misc_feature (143)..(143): n is a, c, g, or t
acactgacccagatcacagctggnctggacccagtggggagaatccagannangacccggaggaccctccgtgggcacctggcaaagatctatgccatgcactgggngaccgactcanggctgctggtcagcgcctcccaggntgggaagctcatcatctgggacagctacaccaccaacaaggtccacgccatcccgctgcgctcctcctgggtaatgacctgtgcgcgtacgcgccctcagggaactttgtggcctagtggaggggttaggacaacatactagctaccatactacagcctcaagacccgcgcagggcaacgtacagggtacagccggagagactagcactggacacactgggtacctagtacgtgtagccgcttcctggatgacaaccaagatacatcaccagctctggggataccaactggtgccctgaggagacattgagacaggccagcagacagagggtaaagctggacacaggtggagatgtgatagtcccctgaaccctggaccccgatggccgacacgtcaggcgtacagagcggcacgatgatgcctactatcaagacggatagcggacgctgcgggaatacactgatgccgaccagacccccatcggacaagaatccgacatcaaggccaggggacaaacaaccaacaaaggcaagcctaaaacaaccggcactgacgaagccaccgagcgccactacgaccgcgggccagaacagcacccacatgactccatgacaaatcacaggggaacaccaatgagcactcaaagacagagaacgcagcgacgcgagtcacaagccaacgcacacaccagaatgacgaaggcgccaagacagagccacccgtcaccacacgaaatcaccgcggcacaagcagccagcagtggcagaccctggaaccaaccacgcagggacacagaccccacggaggaccgcgagctcaacacctcaagaagaaaaacaccagccaccgcgcggaaatacacaaacatctgcacgaatggctgagcacgtgcaacaacgaacagcaggcaccaccaaacccacccaacagaagac

SEQ ID NO: 723775 - DNA, 166 bp, Homo sapiens
cgaatacgcctaatagacctagcccagatagcagaccatagagtactaagagtagacatcagtactactacccggaattgcccatggaggcagatgagggtttaatgagcagagaaaacagtcatgcacaatcatacccagagaatttactccagaatgtgccctg

SEQ ID NO: 723776 - DNA, 449 bp, Homo sapiens
  misc_feature (1)..(1): n is a, c, g, or t
  misc_feature (67)..(68): n is a, c, g, or t
  misc_feature (85)..(85): n is a, c, g, or t
  misc_feature (93)..(93): n is a, c, g, or t
  misc_feature (121)..(121): n is a, c, g, or t
  misc_feature (207)..(207): n is a, c, g, or t
  misc_feature (368)..(368): n is a, c, g, or t
  misc_feature (388)..(388): n is a, c, g, or t
  misc_feature (395)..(395): n is a, c, g, or t
naattttccagagtcccttttggcgatcttggctgaggaagagttgctcgaagagctctgtgtctcnnactggagtgacccacangtctttgnaaagagccgtgctgggatcgaccctgcngaagaaatggagttgctgttggaaaactactaccgattggctgacgatctctccactgcagctcgtgagcttagggtgctgcttgntgattcacaaagtcttattttccttattctggaccagccccgaaacgtgctgatgaggttgaatctacagctgaccatgggaaccttctctctttcgctctttggactaatgggagttgcttttggactgaatttggaatcttcccttgacgaggaccatngaattttttggctgcttccnggaattntgttcatgggaagtggcctcctctggaggcgcctgctttcattccttgggcgac

SEQ ID NO: 723777 - DNA, 286 bp, Homo sapiens
accacgccaccggagaaggcagactattttacattagacaatcagttcatcaattattgcattatccagtcacatccagacaatctgtaaattacacttctgctgggtaatgttgcaaggctggccatagctgctaccttggagcactttgcagggagcccttctggccatgcttcagctgtgtttctcttcctgctttgttgggtttgagctcaggagggaaacccagaaggagagggcagtcacttattgttccctctccgtgcgtgtggaccatacgactgcg

SEQ ID NO: 723778 - DNA, 127 bp, Homo sapiens
gttctcttgtgtatcccatgtgccagagaagaggcctctggtatgaagtgaccatcacatttggaaagtgatcaaccactgttccttctatggggctcttgcccttagtgtctatggctgtgaacac

SEQ ID NO: 723779 - DNA, 1074 bp, Homo sapiens
gagggctcccttgactacctttgtacctcttctttgaacacgtgacgcttgtgaccacatttatcataattagtacataaccagctgcatgagtggccttgaggacgaaccccgcagggagcaagcagtacagtggcattcccagggggaccagcagcgtacccaaggagaaccgagtgcatgaagcagtatcagtcgtctgggcatcatgcgtagggatgtcgcatgtgcgtcactgttgccaactccttcccagccagccaggtttgcgtggagggccaggctgggtgtcctcgacaggacgtgagggctagcaccccaagttccaaaacgccgtgagaagagagaagtggagggggaggcgagttctgtgaattaaaggctcccatcaggtcactggattaggaactagaaaagactggatggatatgtctacacatacacataatagtcacctgacaataacatacacacaagagtgcagaatacagacaacacatagatacagagaagcgcaggctggaccgcctagcaacagtagggacttgttggggccgggggacaaaccgttggtgcgggcgctgctcagcgcttggggttaatctgcaaacacatgggaggggggcgcattggcctggtgggagccccgaattggacgcggttggtgaaccgcgaaaccggtggagaacgccctgggcgaaaggcctttgggttatccaaaaccaaccacccttctggggttaggcactcgcggttaggcaaaagagccacgagccccgaacgccaagcgaaagagacccccccacataggctcaccgtggacggaacctccgtcctgtggtccccttgtccatgttgttggaaaggaccggccaccgtgtgcggacggcattttgggtgacaaaccacagggggggcccccccacttaaacatggggaccccatcattgaaaaaacctccaccccaatgggtgaagggtcccatcaaacaagttttcccacttatcccttttactggcctcattatattttacacattggtgcaacgtttgtttacccagctttcatacttcc

SEQ ID NO: 723780 - DNA, 344 bp, Homo sapiens
  misc_feature (340)..(340): n is a, c, g, or t
aagaggtctttattgcccaccagccaccaacagtttcccagccacagacagggtcctctgggtctctgtaacccactctcaggaccatgagatgcagctacagtccagctgtctcctcccaggggatcaaggtgcgtctggggcatctgatgcagcagaaggccctcacagggactgagcagcacttgggtggaggaggacaggagagggctcctcttggcacatattagggaggtcacccctgaggagtagggtgggatggaagggactcttaagtggggatggtaccaattggcaaaaagttatcattgaggatgaccgatgattaaagggacaattnacac

SEQ ID NO: 723781 - DNA, 84 bp, Homo sapiens
  misc_feature (60)..(60): n is a, c, g, or t
gctgtgtaaagctgcctttgcaagcacttcacatgattcactgaacagagcagacagaancccctgcccttctgtcgtcttctc

SEQ ID NO: 723782 - DNA, 173 bp, Homo sapiens
gatcactacgagcctttttatatgagcactttaatatacgctattggagctggaattacccgcggctgctggcagccagcactgtgcggtgcgaatggagtggcgtggaaggatttaacagtggactcattccaattacagggcctcgcaaagaagtcctgtatatgttattt

SEQ ID NO: 723783 - DNA, 822 bp, Homo sapiens
tatcacaacagaagtaaaatgttgcttggtcacctggtgtcttttattaaaaatttactccccccatttctcacagaaaataacagtcgggagtcattgtcacaatatattagaattgttagcaaccagattcatgtaaggactaagtggctcctcatgaattgctttaagactctgtactgctcattttacactccatcctctctgtagttggctgggtagtggagggggtaagctgaactcatagttctctgacaataactggaaaggtttttctcttaaaataacaatggaatgggtataatggggattgaaaactcaaaccttggacactaagatagagaagatggagtgtatgtagaagggctgttaaaaattgtcaaactttggtggctattattggtggaggctcaacacttgtgagggttaatcaccataattttcccatttgtcctgcattttgatctctgaaaagaaagctggctttgcccatttcttaattaaaaaaacttgttgtaaatccagtgggtctaatgggatctatatgaagttacgccatgttttgtatgcccttctcccaacaaaatactgtataacctagttgtgctggtagtagtttaatctcccacccatcttcgtaaggctaatgaaattggtgagtcccccattatatctctatttaatcatgttccatctgaagggtattccttaacccgcgaatcattttcttcaacagaaggggtgggaaatacttcaccttgttggataaagagtcttctagacaaaaacaaaaaacttggggctggcaaattccaccattgg

SEQ ID NO: 723784 - DNA, 848 bp, Homo sapiens
  misc_feature (17)..(17): n is a, c, g, or t
  misc_feature (45)..(45): n is a, c, g, or t
  misc_feature (60)..(60): n is a, c, g, or t
  misc_feature (64)..(64): n is a, c, g, or t
  misc_feature (68)..(68): n is a, c, g, or t
  misc_feature (71)..(71): n is a, c, g, or t
  misc_feature (74)..(74): n is a, c, g, or t
  misc_feature (114)..(115): n is a, c, g, or t
  misc_feature (120)..(120): n is a, c, g, or t
  misc_feature (127)..(127): n is a, c, g, or t
  misc_feature (144)..(144): n is a, c, g, or t
  misc_feature (163)..(165): n is a, c, g, or t
  misc_feature (208)..(208): n is a, c, g, or t
  misc_feature (244)..(244): n is a, c, g, or t
  misc_feature (248)..(249): n is a, c, g, or t
  misc_feature (279)..(279): n is a, c, g, or t
  misc_feature (292)..(292): n is a, c, g, or t
  misc_feature (294)..(294): n is a, c, g, or t
  misc_feature (306)..(306): n is a, c, g, or t
  misc_feature (321)..(321): n is a, c, g, or t
  misc_feature (331)..(331): n is a, c, g, or t
  misc_feature (340)..(341): n is a, c, g, or t
  misc_feature (343)..(343): n is a, c, g, or t
  misc_feature (357)..(357): n is a, c, g, or t
  misc_feature (360)..(360): n is a, c, g, or t
  misc_feature (396)..(396): n is a, c, g, or t
  misc_feature (398)..(398): n is a, c, g, or t
  misc_feature (400)..(400): n is a, c, g, or t
  misc_feature (415)..(415): n is a, c, g, or t
  misc_feature (420)..(420): n is a, c, g, or t
  misc_feature (422)..(422): n is a, c, g, or t
  misc_feature (425)..(425): n is a, c, g, or t
  misc_feature (470)..(470): n is a, c, g, or t
  misc_feature (696)..(697): n is a, c, g, or t
  misc_feature (699)..(699): n is a, c, g, or t
  misc_feature (702)..(702): n is a, c, g, or t
  misc_feature (708)..(708): n is a, c, g, or t
  misc_feature (774)..(774): n is a, c, g, or t
  misc_feature (822)..(822): n is a, c, g, or t
gtcgcgccgcccgcccnctctgcgtgccgccgcctgccatggganttcatgtggaaaccntctncccnggnggngggcgcaccttccccaggcgcggccagacctgcgtggtgnnctacnccggggngcttgaagatggatagntatttgattcctcccgggnnngctgcaatccgctgtgtggagttgtgatggctaggcataggcnggtggtggtacgcgttgctggggagaaggggttgcncagnngagtgtgtggtcagagagccaaactgtctntgtctcctgattntncctatggtgccnctgggcacccgaggnatcttcccanctcatgccnntntcgtcttcgatttngancttcttttactggaatgacaggaatggcctcctccntntnttttttttttttttnttttntnttngtgggatctggtgcctccagtcttgtgcacatgaatccatatggngcttttcctgatgttccactccactttgtatagacatctgcccatgactgaatgtgttctgtcactcagctttgcttccgacacctctgtttcctcttcccctttctcctcgtatgtgtgtttacctaaactatatgccataaacctcaagttattcattttattttgttttcattttggggtgaagattcagtttcagtcttttggatataggtttccaattaannanatngtcaantattaacagcacaagtggtaggttaacattagaataggaattggtgttggggggggggtttgcaanaatattttattttaattttttggatgaaatttttatctattatatatnaaacattcttgctgctgcgctgcaaa

SEQ ID NO: 723785 - DNA, 251 bp, Homo sapiens
acgacgagagggacaaggtgagcaacttgtcagttgtcctcctggagtcctatgagctgacctgtgatcagtctcagattagggagactgcacctgcatcacgtgatctctctcacattcgactgtaggcactgatcattggatatgctcgccgttctcagccgctgaggactggagaggagggctgtaacgccttcagtcagtctctggggatgaaactcttaaatgctattgaaacttctaaaactagg

SEQ ID NO: 723786 - DNA, 882 bp, Homo sapiens
[303 bp omitted]tgggagtgctagaagcaaggaagcagcaagtctgggcacattccagaggccacgaggggttttaggccctggaccctggcatgttccaagactctttttatattatgtcagactagcaagccctgcctcagcttttccccaacatggaatgctattctaaaagcacccatgtattctttttttttttttttttggggaagggagttcccctctgtggcccaggctaaaggtgcagggtggtgtctggctcctaaaacctcctgcctccggggtccaggtgattctcctgactcatcctccaagtggctggacacacgggtgccaggcaccgtgccgcttattttggattccgcagacgggcgtctctgtggcccggccgttcaaatcctgactcggtgggtttccccttacccccagggggattcgggttaccgtgacgcgccccgtttgttgactgctgtttgttcacgcgcctctgggtggacacgcgttccggtttagatgcgtgttttcgaaagggtgtacccgtttcggaaggttcgtgggacatgccctcactcatctgcgttgcgtcactgg

SEQ ID NO: 723787 - DNA, 728 bp, Homo sapiens
agcgggctggggccgcatcttggcaagaggcgaagcggcagcggttcctgtcaagggggcagcagtgtccagacgctgctgtgtgctccctgttccccagacccatacccctcatccccagatggagccggacgtgcggagcgcgccccaccaccgaccatcaccactggtgctcgttggcagacagcgtgtctgcacaaagagcaggaaaggctccttgttatctcgacatgtttgtggaacatgacccgcaactcggacttgacgggctctattagcagcttgttccaaacgctcactgaacactggacaaacaagcatacgtttcgttgaacacagagacgtgtcagatatgtctaccagcctatggacgcaactgtatatggtactgatcactaccaaaaacagcaacatttagaagatttggagaccctaaggctcttctcaagagtgatccctgactattgccgagccttagaagagaatgaaatatctgagcacatgttttgatttgattcatgcttttgatgaacttgtcgcactgggatagcgggagaatgttaacttggcacagatcagaaccttcaaagacatggattctcatgaggacgacggtgtgcagagccgtcagagagactcaagaaccgtgaagctaaggctgagatgcgtcgtaaagcaaaggactcacaacaggcccgaagagatgcagagagacacgggacaaacag

SEQ ID NO: 723788 - DNA, 421 bp, Homo sapiens
tttcggcacgagaccataagggcgtcatacagcttgattatgtcccgaacctggatatttactcattgatgcctgacagttaatctactgctagatgaagcaatatcgctgctatgcgtgtgttgcctaatagcatgtcacaatgctcactagaacggtgattgactacgatagcttgtgtgcatagcacccacatctatgtaacaacgcttagtaagcctaagtggatgctggaagtgactggcactgtatcgtagcatcagtatgtagacctcgcgcaacgatgcatattattttagaagtgatgatagattgagctactgaccgttcttcattgaggatagatgattgtatgccatagactacatagacatgtcggagtcagcacgtactcttgtatacaggcttgtagttaccgtgc

SEQ ID NO: 723789 - DNA, 372 bp, Homo sapiens
ccagctggctgcttcctcaaggtgcatgtttgtgtgacttccggaattaggggttgagtgatggatgtgctagtgtattagccagagctggggagagtgccacaagaagctgcaccaccagtgacctggaggcagtgcgattgtgtctagtgctttcctcagtgaccagcagggagcgattggggtgtctctaagctgagaagaagactcagtttccagtaatcatccctgctggagtgtggagcatggaggcagggaggccagtgaggaggctgtggccatgtgtccatagttaggaccatgaaggacattattgctaatgcagtgtccacgggaagcactgtgaagggggttatggaccgaggatggcag

SEQ ID NO: 723790 - DNA, 237 bp, Homo sapiens
cgatgcccaattgtgcttcaaactccgtgcgctttgcgaaagtgcggaatttcctgaagggagaaaggtggacaactctgcgggaaccggccgggttgcaacgggggagtactggagagcgctaccagggcgaagcaaatgatataaacatagtccaaacgtgttaagccacccatgattcgagcgtgagatgtagtgtcatgctgctcagggggaccgtgcttatagaaaaaaaaa

SEQ ID NO: 723791 - DNA, 287 bp, Homo sapiens
gatagaccagtctgatcttcacggcaccctcacctgtgacaccaatgatccaccccaatcgcagacttcacacagtattctcccccacgccgtcctatgaccaaatggcccctgccagtgtgtgggccacagcagcagcgtatgtgtgacaagcaacgtacgcgccccagcggacatgcaagtgctgcttacgccaagctcacgctcccattctctatagcccaatgccatgtcccagatcgctcttgccaacatggggactccatctacgacgtctgaccctgcat

SEQ ID NO: 723792 - DNA, 1049 bp, Homo sapiens
agaagtatgtcgacgtgcgaatgttgactgagtgacaagcatactctgaaccgaccgaattgtgacagcaggctgcgtttacaagctagtatctagtgttgagttgactcctagaaacgactactcgagtgaccaaagtagaagctgcgcagtggctagtgtccctctgttaccagtgaattgggcgaacacggcctcacattgctatgctaagtcatgtcgttgagactgacaggtagagaacgattgatcggccggtctggtaaatagctgctgtatggccctacattctattatgtctgtttatgctgccatggtagatggtggtgcctggcaagactcgctctgtgtggtttgagaggttgtactcgaaagctactcccaaccatgtctgaagctcgcgtatctgcattgttctcgctgaagtaatagacgaaacagaaaaagtttgacgcgtggaatgctacctcataagcagctggtccaagaaagtgcctgtctggagcatggctaggctcgagctgatggtcatgccccagtagaacgcgtcataaaaagggctaacacttgcatttcactattatcccgtaagtacccttgtccaacccctaatgtcgtataactcacgatggcatgggacagaaagcaggatgctctagaaacatggtgaagcttttccaagtgttcggtcgagtataaatgattttaaggtcagttacataacgacttgagtttgcattgcatacagcgatatgcattctggtcaataatcccttaacagagagagaaaacgggagcacacttgttctcgatggagaatccaacgtaatctggtttttccttatatttgcagtgtagtgcaagtagtacagagttgatagaattttgtagaaatacagtaatctgtgacataaatggaaaacaagaatttgaggcacattaatttgtggtcaacatgacattttgagaagcacattgaaaaaagtttaaattgagaaatacccctctaaggaagggggcggggccggacaacataggaagacatttcc

SEQ ID NO: 723793 - DNA, 117 bp, Homo sapiens
caggtcgacactacccatgtgtgtgtcttcatgctataaatacgtttctggaaatgtgttggtagaaacagatttcttttcttttgttcggtgggtcaatggagtgacatttcacta

SEQ ID NO: 723794 - DNA, 544 bp, Homo sapiens
tttgttataaagagtttattataaaaaatcacattttttgaatgacaaggacacatagaacctttccacatgtggaagctttgtctactgattccaagagtcccactatatgtatgggggcttatgtaggagcgcttatttttaatgccagcaaacttttgattggaaagcaccgtacacttttctttttaaggataagtcttttgccaagatagatattataagcttttaaatttcaaaaaagtgagaatttccacatctcgaatcttacaccaagagggaattagcagagtatatactaattggaaaaacatttttatgaaagaacaggtttttagaaggcaaactctatgcttaagaaagtgatcagctctctaattatgccattaactatgagattgagatcggacgtttccacatccacttaggtgggttaaggtagccaataggctagtgatacctttgcgagcaagtgcgaaacaagccaaggttatcgcaactgctagtagcggattcctgcattcttgtggaatcactagattta

SEQ ID NO: 723795 - DNA, 149 bp, Homo sapiens
cgtatgtgaactgctccgtaggctatcgagcggtccagcacatgcacatctaccccattgtcatcttcatccactacaagtagcgccaagcacatcaaggagcagagagaccccatctaccttagggacaaggtgactcagaggcattc

SEQ ID NO: 723796 - DNA, 341 bp, Homo sapiens
  misc_feature (1)..(1): n is a, c, g, or t
ngtcgaactcgcaatctaaataaagttctctgtatatatgtagtgctattacagcccgctcgttcaggttctttgtcaatcacaacagtagtaaacgactataaaaataatattaaatccatttcccctcaattgatatattccttctgggtgagatttccaaatccttggggtgtctggttaggcttttggtcggtgggtgctacagaaggaaagccagaggttaaagaaaaatgcttggcttttttccaattggcaactgcaagaataaaagttactgcactgaaaatgagtacaagcaccctcgaggaggaaaaaaatcttatcaccgagaagaaaat

SEQ ID NO: 723797 - DNA, 297 bp, Homo sapiens
gcccagaatctgtgatattcagcacagcggatccaatgcatctggggcttcagcagatcagtcgcaatcctaacgagaacatatgactgtgctgacatcgtacacgtgtgtgtggtatcctttgcctggaaactggaatgctgaaggaaatgaacagtgttagaattttcatctagtatcacagaactgctctggctcttacctgtataaaatgttgacgccatcatcgaagtaaaaatgttacttaaacttgctttcttgtaaaatggtaaaaaaaagaccttgttgttttgaaga

SEQ ID NO: 723798 - DNA, 929 bp, Homo sapiens
  misc_feature (18)..(18): n is a, c, g, or t
  misc_feature (20)..(20): n is a, c, g, or t
  misc_feature (24)..(24): n is a, c, g, or t
  misc_feature (27)..(27): n is a, c, g, or t
  misc_feature (29)..(29): n is a, c, g, or t
  misc_feature (31)..(31): n is a, c, g, or t
  misc_feature (33)..(33): n is a, c, g, or t
  misc_feature (39)..(39): n is a, c, g, or t
  misc_feature (837)..(837): n is a, c, g, or t
  misc_feature (863)..(863): n is a, c, g, or t
  misc_feature (906)..(906): n is a, c, g, or t
aacattacggctaggtanangctnggntngntngagccnaggcgtctcccgcgtccgcgattcctcctccttggtcgccgcgtccttggctggcgtcagaaaaatggctacaaacttcctagcacatgagaagatctggttcgacaagttcaaatatgacgacgcagaaaggagattctacgagcagatgaacgggcctgtggcaggtgcctcccgccaggagaacggcgccagcgtgatcctccgtgacattgcgagagccagagagaacatccagaaatccctggctggaagctcaggccccggggcctccagcggcaccagcggagaccacggtgagctcgtcgtccggattgccagtctggaagtggagaaccagagtctgcgtggcgtggtacaggagctgcagcaggccatctccaagctggaggcccggctgaacgtgctgggagaagagctcgcctggccaccgggccacgggcccacagacccagcacgtatctcccatgcgccaagttggagcccccagccaagaagccagccacaccagcagaggatgacgaggatgatgacattgacctgtatggcagtgacaatgaggaggaggacaaggaggcggcacagctgcgggaggagcggctacggcagtacgcggagaagaaggccaagaagcctgcactggtggccaaagtcctccatcctgctggatgtcaagccttgggatgattgagacggacatggcccagctggaggcctgtgtgcgctctatccagctggacgggctggtctggggggcttccaagctggtgcccgtgggctacggtatccggaagcaanagattcagtttgtggtggaggacaanaaggtgggaacaaactagatggaggaggagatcaccaagtttnaagagaacgtgcaaagtgtcgat

SEQ ID NO: 723799 - DNA, 670 bp, Homo sapiens
  misc_feature (632)..(632): n is a, c, g, or t
tgatgtcttagatttgtctctaatccgttttgatttaattttttttagatggcaagagatagaggtctagttttattcctctgaatatggatattcagtttttgtaacacaatttgttgaagagactcccccattatattgaggcaggaaaatagagtctggaggcagaaaacataagaccacttcacacttcacctttccatagggcatgggccataaataactttgtaactttatttcatcctctccatttacatagggcatactagggggtatttaaactcccatggagtgtattttcattttcaataaatcacttcatgccttccttgctttgtgcgttttgtccaattctttgttaaagacgtcaaggacctggacacctacaactggtaacgtatattttggccagccaggaggaagaagtaagcccaaagtttgggattcatttttctctctttcctttctgctccatacaagagctttctcttttcatttccaacttggaacacttggtgggcagcacctaaacgtggaggcaactgcaggtttctggctgtggcctgtgaaactaatgggtttccgtgcagaagatgctgactgccacctcctggtttgcttaaagaacctgngtctttttcaattttttttcctttatttctcaagctct

SEQ ID NO: 723800 - DNA, 196 bp, Homo sapiens
gagacccggtaaagcccctcggcctgccccacatcgtcaacggcccggctccgacatcacaggagcaggaaggcccgtcaccgcacatgtgaaccacgactaacagtgcgaagggagtccatccagcagacagcggagcagcggttgtaccagagaacgtatacaggccctgaagaccgtctaacggatgctcatc

SEQ ID NO: 723801 - DNA, 877 bp, Homo sapiens
  misc_feature (18)..(18): n is a, c, g, or t
  misc_feature (20)..(20): n is a, c, g, or t
  misc_feature (24)..(24): n is a, c, g, or t
  misc_feature (27)..(27): n is a, c, g, or t
  misc_feature (29)..(29): n is a, c, g, or t
  misc_feature (31)..(31): n is a, c, g, or t
  misc_feature (33)..(33): n is a, c, g, or t
  misc_feature (39)..(39): n is a, c, g, or t
aacattacggctaggtanangctnggntngntngagccnaggcgtctcccgcgtccgcgattcctcctccttggtcgccgcgtccttggctggcgttgtgtgatgtcctgtggcccccgccggaaggagtctgggcgctgacagagacgcccgaggtggccgggatgggctgggctggcccgggctgcgccagaagctcgcgccgttatgggactgatgtgcacaatgtgctgccagcgctgggcttagtgggcctgtgggccaagtgctggcacttgtgtggctgatgctgcagagagtgctgtgtggctgacgtgagtgccacgtggcctggcttggagtggcgtcctgcgggacgggggctgcctgtggatgcactgtctcacggctgcatccctggtcgtggaatgcccctcggccaggctgctggtggcctaagtgcctgtgtttgcttgcctgtctccgtgggagaccagacatctgccccagctgtttctctggcctgcagaccttcgtacaccacgtctttgtcaatgcaccagttacttgcacgcatcagctgagcacggacggggataggcacggacgcaacacttttggaacttagacgctacagaaaaatggctacaaacttcctagcacatgagaagatctggttcgacaagttcaaatatgacgacgcagaaaggagattctacgagcagatgaacgggcctgtggcaggtgcctcccgccaggagaacggcgccagcgtgatcctccgtgacattgcgagagccgaagaggactcaaatccttggtgagctcggcccggcctccggggcccgtggaccggtgagcctgtccgtgcgctgatggacctttttctgtcgactcg

SEQ ID NO: 723802 - DNA, 393 bp, Homo sapiens
tgatgtcttagatttgtctctaatccgttttgatttaattttttttagatggcaagagatagaggtctagttttattcctctgaatatggatattcagtttttgtaacacaatttgttgaagagactcccccattatattgaggcaggaaaatagagtctggaggcagaaaacataagaccacttcacacttcacctttccatagggcatgggccataaataactttgtaactttatttcatcctctccatttacatagggcatactagggggtatttaaactccctaaaattctgtaatggggcctttgagcccctacgcttgggctttttcccacactgtggagtgtattttcattttcaataaatcacttcatgccttcaaaaaaaaaaa

SEQ ID NO: 723803 - DNA, 558 bp, Homo sapiens
tgatcgcaaaaacagcagctaggacacccgtcgtttggtgtatatacatcaattctggcctcaattcatctgctgatatcaatcttcttcgaacaggtataggtggtgaagcaagtggtgtcgtgccttatgctcacattggcaggagcactagcagctgtctttccttcagtttcactatctgtttgggcaactcgatagagaacttgcaggatcagaagctttttcagccggcaggacttctggatgtaactcggcttcatcatctagtacgtcgtaaacattagatgcagcaaatacttcaacctgactgaaatctgccaaattgggaagctctggtatctgctgagagtaaggaactagtgtgagtaatgaggcccattcggcatccactgggcgatgcacagaaggaccaggagcctgtgagggctgtgatcttggcaggccctgcaggaggatgggcaccaattccagcctgattgttgtcctgtggtgactgtaaggtccgatcatatctaagatgattgatctcaatgagaggctgggccttggagggga

SEQ ID NO: 723804 - DNA, 540 bp, Homo sapiens
taggcaggctcacccaggcaagagtgcagtggcacaatcacagcttactgcagcctcgatctccctggctccagccatcctcccatctcatttttaaatttttgtatcgacaaggtctccctatgttgcccaggctggtctcaaactcatgagctcaagcgatcctcctgcctcagcctctcagagtgctgggattacaggtgtgaggctgaggcaggagaatctcatgaggccagcctaggcaacatagtaagaccctatctctccaaaacaaaaaccaaaattacctgggcatggtggcataaatctgtagtcttagctacccaggaggctgaatcaagaggattgcttgagcccaggagtttgaggttacaatgagctgtgatctgtgttccagcctggctgacagagcaagatcctgtcttccaaactaacaaacaaatcaaactttccaaaaacagaatggcctatatggactttgaaggcccttagaggcccggaaaaaagatttacttgaattttccaagggtcaaatgtttt

SEQ ID NO: 723805 - DNA, 414 bp, Homo sapiens
  misc_feature (76)..(76): n is a, c, g, or t
  misc_feature (129)..(129): n is a, c, g, or t
caggagctgagctgagtgacatgatgtgcatacactcagctagtgaagtgagagctatgtctaaaaacatatatanttggtatacgggcaagaacccaatttgaaggaaggtggagaatatactgtaantttgacttattttgtaatgatcatgatcagactcataatgttatctgctatttggtgtaatactggtatatctggtaaaattaatttgatgtgttctgatatggtttggatgtaagttccttgcaaatctcatgttgaaatgtaaccttcaacgttggaggtgggcctagtcagaggtctttgggtcatgggggtggatccctcatgaatgggttggtgctgtcctcatggtagtgagtgagttctcactgagttcatggcagatctggttgtttagaaaagcct

SEQ ID NO: 723806 - DNA, 906 bp, Homo sapiens
  misc_feature (814)..(814): n is a, c, g, or t
  misc_feature (840)..(840): n is a, c, g, or t
  misc_feature (883)..(883): n is a, c, g, or t
ctcagtcggtacctgctgctccctcttcacgacccggtctcggtctggctgtcgtgtacagcctgagacccaacagaaaaatggctacaaacttcctagcacatgagaagatctggttcgacaagttcaaatatgacgacgcagaaaggagattctacgagcagatgaacgggcctgtggcaggtgcctcccgccaggagaacggcgccagcgtgatcctccgtgacattgcgagagccagagagaacatccagaaatccctggctggaagctcaggccccggggcctccagcggcaccagcggagaccacggtgagctcgtcgtccggattgccagtctggaagtggagaaccagagtctgcgtggcgtggtacaggagctgcagcaggccatctccaagctggaggcccggctgaacgtgctgggagaagagctcgcctggccaccgggccacgggcccacagacccagcacgtatctcccatgcgccaagttggagcccccagccaagaagccagccacaccagcagaggatgacgaggatgatgacattgacctgtatggcagtgacaatgaggaggaggacaaggaggcggcacagctgcgggaggagcggctacggcagtacgcggagaagaaggccaagaagcctgcactggtggccaaagtcctccatcctgctggatgtcaagccttgggatgattgagacggacatggcccagctggaggcctgtgtgcgctctatccagctggacgggctggtctggggggcttccaagctggtgcccgtgggctacggtatccggaagcaanagattcagtttgtggtggaggacaanaaggtgggaacaaactagatggaggaggagatcaccaagtttnaagagaacgtgcaaagtgtcgat

SEQ ID NO: 723807 - DNA, 1275 bp, Homo sapiens
gcatttttacagtttattatgcgctgttgttctccctttgctctagggttaataacgcgtgcgttgggcacctgtgtgagagttcacaccgggatatcttgccgtgtgacacccccacagggtgttccccccaagattggagagcccacctttgtgaacccgtgaagtgcgcacttgggaatatccccacgtgttttttccttgttggaccccaggagtaccgggggataaaaagtgggcacccacagggttttcctactccccctagattgacacaaaggggcccgttttgaggccccaagggaagagcccacttttgaaacgctaagtggggccccccagggaaagcccttgaagaaaagttcaccccaaaggccccgaaaagaattgaggaaagcgcacagaaaggggaccacaaaggggggttcaaatcccccaacgaaattttcaagcgctggagggttcccctaaagtgcccctttcgagacccactgagaaaggccacaccctgttttgtaaaagattgtaagataaatcttttccacaggggccccaagagtttaaacccgaatttgaggggacccctaccacggagaggatatttttctggggacacacagtgggtaaattgagaaaattaattttccccccttcgggcccttggaatataagagattccacgagccttgcctgtaagaaaaggagaagaaaatttggagaccactcccaccacgaaaatagatagccctcgtgagggaaaagctttttgccacacacccccaacttacattcaccccacaagcttggttcaccacgaggtctcacaggagaggcacatctccacaggagaggaaatcgcccctggggagagatttctcctggctgtgttggaagcctccctctcctctcttggttgtgggtgtcttctctcctcacagggcccaccccacttgtaaaagagggctttgagttaaagcccacagccacaagtgtgtaagaattgtaagcactttgtgtccacacaccactcttataaaccacatttgagaaggacctctcaaaatttcgctatgcacaatttcttgtggcacgttttaaaaagttatagctgctaatagtaagttatctgggcacttctcacaataacttgaaatatggaaacacataatgcacccggggaacaggacaataacacttgcacctttataaaccacctgtattgtaagtggaaaaagccatgttttaaataaaactatttaaaattggccacccata

SEQ ID NO: 723808 - DNA, 233 bp, Homo sapiens
attattttatagatacatatcacagagctatttagaaaaacttctgaataactaacatagtggatgtaatgacaatattgtgcagtggcaccggaaaatgtattaattgtgaatgtacttaggtcttgtatcccagatactgtctcttgaagcagtgcacggactgaatgtttttctgtgtccagatctcatagtttgaagtcctaatttccaagtatcttgtatatataaat

SEQ ID NO: 723809 - DNA, 109 bp, Homo sapiens
ctacctaagctgataattataatgacagtgtaactatgcaggtgttaaacatttactatattcttacagacatctctgttcatatattcatttttaactccaggaaacc

SEQ ID NO: 723810 - DNA, 221 bp, Homo sapiens
tgttgggattacaggcgtgagccactgtgcctggcagaacagtgggttttgtaaggtgggaacaaagaaacagaacaatagaaagaaagctgattgggtaacatcaggttacttttttgtaagagttacagcataggaggacttccttgtcatgctggaatctcctgttttcaaaaaaaaaaaagaaacaggtctgttttgaggtctatctgcctcctaca

SEQ ID NO: 723811 - DNA, 464 bp, Homo sapiens
aatgtttccaagaagcagctcagcatgggagcctggcctttgagaaagcacagaacgtggcacgttggaggaaatcaaaagaaatctcgccattgccgggaatgggtaaatcactcaggccgcgtgggtccttggcagatggcagaggcggcttcccagtcccccacctggcactagagggacggggcgcgcacccaacggtggcacgcatcgccgaattttcctgaatgccgctgtggcacattcctggcctttgcagttattaggaaatgagaggatcttttttccttctactctcccctccccctgccttcgtttttcttccaggcatggaattatctactttagcagttcaaaagacattccattcccatgacaaagacagaaaggggtgatgttggcatactgtagccctctttctcatagggagacttgagcaataaatcataatgaatgagaaaaaa

SEQ ID NO: 723812 - DNA, 938 bp, Homo sapiens
cttcgccatgtgatgacaaaccttggagaagttctgcagcactaatatagccattgccatccttatcaaacacacggaatgcttctctaatgcaaaagatggagatggaactataacagcaaaggacgtggaatgtaaggaatctattgggcatgaaaaaaaagatcagaagacccgcgggcacctacacgccgacagccaagggacggaccgcgcacacccccagaaacacagcacaacgatcggcccgaacgcaacacagacacacgcaaccacccaacactactacgcagacacccccgcccggcgaccgcacaccacacacaacaaaccgcgcccacaaacaccaccccccaccacacaacacacaaacacacacgcacaaccaggacggagcagcgaccgccaacgcgcacgcaccgccacgccacccgcagcaccagccgcgcgatgcacacgacgagcgcgccgacacccacccatcggacgaaccgcaggggagcccgagcagaggcgcacgccccaaccgacaaacgagacacccgccagagacacgcagcgacgaaacgacccagccgcgaccagccaccacagacacggcacgacacgaccgaacgcgagcgcgaagacacacgggcacgccaaagacgccggactaccggaaggaccggggcacgaacgaccgaccaccaaccgacgccgaagcggccccgacagcagcccccaccaccaagagacacaccagaggacagcacgacagagacaacaacgagcaacgacggagacgcaaacaacggacgagacacaccacccggacacaccaacccacccccacacccaccaccccgcgcacagaccacgcagcggcgcgcaagagcgccggacacgaagaccgcacaaaagaacgaacagaacgcaagaacccacgcgcacgacaa

SEQ ID NO: 723813 - DNA, 221 bp, Homo sapiens
aaaccctaacttacggagtagatacaacaagactaaaaataatagaaagatataagaaagactataaagtaataatagaagcaacatgtatatagacataaataagcccaactcgcacatgttccccagtggccatgtctgtgtcacaccatcattttttgttacctgagtgacctgagctgggcccatcatattctctgcctgcatccagaagatggctg

SEQ ID NO: 723814 - DNA, 160 bp, Homo sapiens
actgaagttccttgtctttgccttcatcttggctctcatggtttccatgattggagctgattcatctgaagagaaatttttgcgtagaattggaagattcggatatgggtatggaccttatcaggcagggtcagaagcaacactatactcacacccatat

SEQ ID NO: 723815 - DNA, 601 bp, Homo sapiens
  misc_feature (601)..(601): n is a, c, g, or t
gcatgcatgatcagcggtgtggctagcgcgcgggcgtgttgtcttcgcggttctggtcttctgcatcatgccgattcatcgtaacaccaacgtgcccgcgcctccgtgccgacgggtcctctccgagctcacccagcagctgcgcaggcaccggcagcccccccagtacatcgcgtgccgtgtcccggaccagctcatggccttcggcggctccagcgagcgtgcgcgctcctgagcctgcagatcggaagatcggcggcgcgcagaaccgctcctacagcaagctgctgtgcgtgcctgcttggccagagcgcctgcgcatcagcccggacagcgtctaccatcaaactatacgacatgaagcgcggcccattgtgggctggaaaaactccaccttcggctaagaggccgcagagacccacgtctgttctgcgcttgctcccacccccggaaccccgccgcaccgctgtgttctaaggcccgcccaccaaaacctcctgcgtgggagaaaataaaccggttaagagaactaaaaaaaaatataatataaataaaaaaaaaccgcggggcctatatttgggggggcgcgcgaaacaggttn

SEQ ID NO: 723816 - DNA, 991 bp, Homo sapiens
  misc_feature (5)..(5): n is a, c, g, or t
  misc_feature (63)..(63): n is a, c, g, or t
  misc_feature (65)..(65): n is a, c, g, or t
  misc_feature (85)..(85): n is a, c, g, or t
  misc_feature (234)..(234): n is a, c, g, or t
  misc_feature (267)..(267): n is a, c, g, or t
  misc_feature (307)..(307): n is a, c, g, or t
  misc_feature (354)..(354): n is a, c, g, or t
  misc_feature (414)..(414): n is a, c, g, or t
  misc_feature (458)..(458): n is a, c, g, or t
  misc_feature (822)..(822): n is a, c, g, or t
  misc_feature (922)..(922): n is a, c, g, or t
  misc_feature (924)..(924): n is a, c, g, or t
  misc_feature (927)..(927): n is a, c, g, or t
  misc_feature (929)..(930): n is a, c, g, or t
  misc_feature (952)..(952): n is a, c, g, or t
  misc_feature (954)..(954): n is a, c, g, or t
gaganaaaggaaaccacagagaaagttgcagtcgactcttttaagggaaattcagcagttctntnaaggggctcggaagagtgcnacagataccagtgctaagtggagactctcacactgtactgtgcatagaactgatctctaccctaacagtaagcagctcttgaatagtggagtttcaatgcctgtcatacaaactaaggagaaaatgattcatgaaaatcttagaggcanccatgaaaatgaaactgattcgtggacggtgangcaaataaataaaaacagtacatcaggaaccattaagganacagatgacattgatgatatttttgctttaatgggagtttagatgcncgcccatatgtgagacttctaagtgattaacaaggctagttcagtgttctaagtagaacngctaagatctggaagtaccacctggactcacagaggagctgctntagtgcagcattgcacaggagttcatttcagttcagtctacatttaaagtagcattgtgtcatttcatcaacaagtatttcttttttggcttcaactacatgtcaggtgttaatatgaaaaatctgccacagccctacccttgagaagcagatgtaatcccttgagtgaggctagtaagtctctgaaaaactgaataattttatgacttactaggcaatttaataatcgtttgcaaaaaccattgtgtcttgaggtaaatgaggagcgggggtgggagatagcaaggaaacacctgaaaggtcaatttggtcttattggctccattatacataggtccgcctctgaatactaaagtttgtagcncctgacatttatgttttcttgtttatatgttggaattgatcaacaaggtttgccactgcttgtattaccagggactggttacaaccattatttctcttcntngcntnncttatctcatattaaagtgagntnggagtctccaaaaacaagcccgagtatacaaaaaaag

SEQ ID NO: 723817 - DNA, 329 bp, Homo sapiens
aacatgtcagctgacgagcttcttgagcttatgtcaagttctgtagttttccatgtatatgcccagatgctcctagaacatgatcaaatgatgagctataatatctgatgattacatcataaattatgtttaatggttacagcaatgatcactggctatctttcgttcttgtgtttttcttttccgacaattcgggctatttgcggtgagttcagttcttcatgttcactgatttgggtctccaaattgagttacggctatgtttagagttgcgttacaatcaaatttggtttcaacctgttcctaatgaattttttcgaacctcaaag

SEQ ID NO: 723818 - DNA, 218 bp, Homo sapiens
ggaaagttgagcaatatgacgtgaagtcgtggaagcctgtggctacaaaaaatgttgacgccgtcaatgccgtcgagaaatggctgaatggcgagacgtcgaacgtactactgagcgcttgctaggagtggtaaaactagagcacccagctaaaagttgtaactaagcacgtgcttgacattatttgcgtttcggcttgttcttctattagactatgt

SEQ ID NO: 723819 - DNA, 156 bp, Homo sapiens
gggttcatttaattcatctactctacccagtcactgcatcagaggatctgattctgtccaacagcactatcatgcgccatctctcgggtgggacgtcagccctcgaccttgccagccctagctataagccacctgacaccacggtgtgtcaatcac

SEQ ID NO: 723820 - DNA, 452 bp, Homo sapiens
gctggaaagtcggccaagaaagacaaatgacccacgtgaagcaaatccggggggcaaggccaaaaagaagaagtggtccaaaggcaaagttcgggacaagctctaataacttagtcgttgtttgacaaagctaccgtatgataatacatctgtaaggaagttcccgaactatagaacttataaccccgagctgtggtcatctgtagagtactgaagattctgaggctcccgtggccagggcagcccttctaggcagcgtccttagtaaaggacttatcaacactggtttcaaatgcacagagctcaagtaagtttacaccacgataataccaaggtgtggagatgcgtccagctgctggtgaaggatgcactgaataggtccaaccagctgtacatttggaataatataatacacctttattaaatcagcaacatagaggacatgttgaaaa

SEQ ID NO: 723821 - DNA, 848 bp, Homo sapiens
gtgataaattcaagtacgctggccagtgtcatgtggtatatgtgctttggactgcgactcagatttgacagttgcgtgttgacaggtggtggctgaatctcacttcctctgctggtggcctcggtagcacagtgaagggttgttgatagggtagccaagtgagtcaaagtgatgggcccctgggctcattgggatgtagacgctactgggaattatcacctgctcgttccatggccaacatgggttggaatgaacctgcattaactgaactctggcatatcagtatcccccgtcttctcactcccctccccagcctcaccacaccatacaacacacaacacaatcataaatcacaacatatcgcgtacatatctactagtaccatgcacgaaccttcccctatctcagtatgcttgcaactacgtcacaacaagcacaaaagtagcaatactgattctaccgatctacgtctgccctatcaacatccacacatcccacacctcattacacatacacgaccaaagacactctcccacgacatcgtcagcccatcttcgacccgcttggggccgtaatccagtgagcctacgggaaccagggctcctggctcgctcacgagccataaccacacaccttcacccgaatacctatccacctccacttgactcgtcctcaactcccccacacccatgccaccacgctgaccacacctgcccacagtatcacccaaattctcacataacaatctgtcctcgaatccacacatcaccaatcaacccacacctacctccctcatcccacggtacactcaatatctatgtcaccacgcttctagtcttccacatccc

SEQ ID NO: 723822 - DNA, 106 bp, Homo sapiens
tgtgcagtacggtattgactgtgtgtgatgtggtggcttcagtgaacagaacagtgtggtgacatagtggccccaatggacaggagcatgtggtgacatgtgtatg

SEQ ID NO: 723823 - DNA, 768 bp, Homo sapiens
  misc_feature (3)..(3): n is a, c, g, or t
  misc_feature (138)..(138): n is a, c, g, or t
  misc_feature (165)..(165): n is a, c, g, or t
  misc_feature (185)..(185): n is a, c, g, or t
  misc_feature (193)..(193): n is a, c, g, or t
  misc_feature (235)..(236): n is a, c, g, or t
  misc_feature (243)..(243): n is a, c, g, or t
  misc_feature (255)..(255): n is a, c, g, or t
  misc_feature (268)..(268): n is a, c, g, or t
  misc_feature (624)..(624): n is a, c, g, or t
  misc_feature (642)..(642): n is a, c, g, or t
  misc_feature (658)..(658): n is a, c, g, or t
  misc_feature (673)..(673): n is a, c, g, or t
  misc_feature (680)..(680): n is a, c, g, or t
  misc_feature (697)..(697): n is a, c, g, or t
  misc_feature (752)..(752): n is a, c, g, or t
ccngcggggcgggctctgggttgcgttccccctctcgttctgcccttccccctctccctgttcccccgggctgcccggcgcctgctgagtctcccccccccctcgctcaccgctctgacccctgcccggccgcgcccnggctgcgggcgttgcctctgctgcccntctccggggccgtcggccgngccgcccnggcctctgctctccctccctccctcccggtgtgctggccccnncggcccnggcgtccttccnctcttgcctgccngcgccccaattgccgggactgtagtctgcctctggatgagctgggctgtagcttgccgtctccgaagccgggcaggttggacggggtagggtcccagagcccatggagttattgctgagaagatatgcaggggacacattccccaggggcagagtagaagccctgggcctggaatccccgggcgctctgtgaaggggcggggcagatggggactcctcgtggaagcccctgggaaaaaattaaccacggaagggcatagcctgcctgacgtcaacgctgggctcaccagctccttgctttgtatctccagttgctaagagaccttcagactgggatcaggtgggataaggaagcanggtttttgttaaaggagnaaaaggagtccatgangaatgatgacaaagngctgcanaccttcccaggtcccangacgactgaagaccactgcccgtgctcttaccctacgcatccctaaatcaggggngggggctggtctcggg

SEQ ID NO: 723824 - DNA, 364 bp, Homo sapiens
gcatggacaggagggagtctgatcttgcggaacactccatcgacattgcctaaagttgctcagggccaatccagcaaagcagtccgttttcccgttgggcgagatagagatgtatgtgttagatacagaagagttcttggatgagccaaggacaagctggggtgtcctatattgaacagacctcgatgaaaatcttgaattcaccccagtgccctctgtgggcaagggaaggtgaagattgagaagttaaaaaagcttttggccacttgagaggatcagggccgcaactcttgaagaagcaaagggctcagtgcattggggtcagcgctggtacagctgaaggatgccggccttgtgcaggtcc

SEQ ID NO: 723825 - DNA, 144 bp, Homo sapiens
ggctacttgacaacagtatcattacagctgtgttcctttcatagttgccatcttggccatgcaagaaaagaaaacaagcatttactctatgtcggggggcggttatcgcgtgctgcatcgatgcgtttgcggtacaccaccatc

SEQ ID NO: 723826 - DNA, 217 bp, Homo sapiens
gggtcatcggcggtcccatgtgcgttattacgctcataaagtggtaaatcgctgtcatttttgatatctataatttaacttgggagtaaaacctttccactgccattgcttacgccaagcagctataccaacttcatattcactgtctttgcgttgaataccataccaaatattatctgctaaaaaattacgcttagaataacgtatgttgctacta

SEQ ID NO: 723827 - DNA, 352 bp, Homo sapiens
cctcccctcccttcccctcctcttttccttctcttttccttccctgagacatgtctttctgtcatccaggtttgagtgctgtggtgagatcatagctcactgtaatctcaaactcctgggctcaagtgatcctcctgcctcagcctcctgagtagctgggactacaggtgtgtgccatcatgcttggcttattttttaaggttttttttttttttgaaacgggatctctctatattgctcaggctggtctcaaactcctgacctcaagtgatcttctggcttccagccaccagagtagctggggttacaggcacgagccactatgcctggcctcttcaattgttttatcttt

SEQ ID NO: 723828 - DNA, 319 bp, Homo sapiens
  misc_feature (308)..(308): n is a, c, g, or t
atgacgctctgggaccaccagggtgggacagagtcctaaacatgtggcacctacagcctgaggggtcgtgggacctgaggaaacagcagtgttgctgaggtccagtgtgtccgagttcctatcgggcaccgtgcagtaggctaggggcttcctcatagagggagtcttcatttaattacacgacagccccccgtggatatctgagtaaacaggatccgagaggaaagtggctcctaggccacagagggacgtcgcgccggagacccacctctgaatgaacttcttcaccacttccatccccgcgtcgngcgcgccgacg

SEQ ID NO: 723829 - DNA, 287 bp, Homo sapiens
gaactatgaaggaacaacacaatttttcacaagcacctctcatgtctgaatgggtcctcactgtctagagttaaattccaggctgatgacactgtcaggtcacatggccagcatgtgctatatggcctggctcaaggcctagagctctgaggtttgcatgagaagcatgacacactagccaaacgcagggagacttactctagtcttcctgatgtcattccctctacggttgtttttctccatagtccaaccataaggtgactagtatatccatttgtagaccatgt

SEQ ID NO: 723830 - DNA, 115 bp, Homo sapiens
tcctccagcttggagtagcctccctgctctatttctgccatgccacctctggccaagacaatctttccctggtttcttccagctcccagacactacattatacatcaccctggcc

SEQ ID NO: 723831 - DNA, 187 bp, Homo sapiens
cgaaatccgcgcattagctgcttcattcagaccgatgacgacctggcgatgagggcctcaatcgcgctcgatgcaccaattttttccagcaatcgcagggtatcttccgttagcggtcgacgatctccagtgtgcggtacggtgatgacgccttcaagccatagcgacaggcctggaacgtgttaat

SEQ ID NO: 723832 - DNA, 175 bp, Homo sapiens
tgccaggcaaacaataattttaatgattaaagcattttaacaaccccgtgaagaaacggaagcccactgaagtgaagggggtggacatgaccatataataaagggcaaggcaaatgtccaaccaccattgcctagaagtctgccgtgctttccccacagagaagagggcttctga

SEQ ID NO: 723833 - DNA, 875 bp, Homo sapiens
  misc_feature (306)..(306): n is a, c, g, or t
gggaaaacacccccgcgggtgaccgggaacatcgtagtggtggcgcccctccacgggaacagggcgtcgccacagagaattgtgtggggacaccccaggaagcggcgcccaacagagggttgcgccaagtgggaatgaaacaccggggagcaaaccaatggggaggaagaagaccacccagtgaggaacacaagcatgttgtccccccgacaacagttggcagagcacacagacgtccgccgctcacactcagtattgaggggacgtctctcgcccccgctctctagaggacgctgggcggcgggnggcgacagcagggcggcctcacgtctttgaggacgtcgcgcgcgcgcacgagaaaatcgccgccgccccacttagggaaccggtaccacacacggaggccgatgacgcttctctgaggaaggcctgcaccaccgcacgcggctttcgaacagataaatctccatgctactaccgcgccgcaacagcttgtgtagacaaaagaaaagcacaccgtccagggagggcgggacaaccatgggttacgcatgggtatccaccctccgctgcaaaacgacgggaggtaggcccgcacaatgagaggggggtacaaacacaccaagagggaatgtgttcctcgagccattagacacaacagaaaagtggtttttttattcaacctctcgcagtacacccaacttcttatatcacggtagtcccccccttgatagcccccactgtggtgcatgtccttcttgaacccgctttcctaaaaaaaaagcatcgctgtaaataccagtgccctcgacgtaccaccttttctgtcgcacctaaatcaacaacagctgccgccccgtcccatcataatacaa

SEQ ID NO: 723834 - DNA, 446 bp, Homo sapiens
  misc_feature (64)..(64): n is a, c, g, or t
  misc_feature (103)..(103): n is a, c, g, or t
  misc_feature (162)..(162): n is a, c, g, or t
  misc_feature (186)..(186): n is a, c, g, or t
  misc_feature (280)..(280): n is a, c, g, or t
  misc_feature (295)..(295): n is a, c, g, or t
  misc_feature (369)..(369): n is a, c, g, or t
  misc_feature (400)..(400): n is a, c, g, or t
aggtgatctagaggatcccggagagcatccttacaccagacgtgatacagctccttctggggcnggcatccggggccaggctagaaacagaatctaatgcctngtagagccccacacatgccaggccccttcctctgagtcttggcctaggcggttcccacngtctggaataccaggctcccttcnggctcattcagattagaattatagaacccagctcagatgtgacttccagagagggtccaggcattcaaacccactctctgccatgtcacttagngttctgtgcctcagngtccccacttagaatataggctcatgtggcaggttggtggtgagggttaaatgagataatacatgcactatacngatctcacagcctgctccgggtgtgcacccngtcaatgacagtcactgataaacacttgaggaaacacagaggatca

SEQ ID NO: 723835 - DNA, 271 bp, Homo sapiens
  misc_feature (157)..(157): n is a, c, g, or t
  misc_feature (159)..(159): n is a, c, g, or t
aggtaagatatactgagagtttaaaatccagtagagccccaaccaatgatgaagccctaatgaggataaagactgaagaggtgatagcacaaatacggaatatggatcaaacagaaccagcaaaagctagaacagtttggacagttttaaccgccananctggtgtttcaaaaataaaggatcaagaataacaaccgggaggaaaaaggcagctgaaatgacctgaagattactgctgctatcacccactggctttgactgaacagcaact

SEQ ID NO: 723836 - DNA, 362 bp, Homo sapiens
aacactttggaaggccaagatgggagaatcacttgagaggccaccctgggccacataaggagacctccatctctacaaaaaatttaaaacttagctggacatggtggcacaggcctgtagtccaagccactcaggaggcagaggtgggaggatcccttgagccaagaagctcaaggttgcagtaagctgtgatcacaccactgcactccagcctgggtgacagagaccttgtccccccttcccaaaaaaaaaaaaaggtatcaatgaatgttctgcataggaaactttcatctcacctgctcctaggcaagaatagcaatcatctctgggcagaattccttcaataaatatttactgagtaa

SEQ ID NO: 723837 - DNA, 1171 bp, Homo sapiens
tttttttttttccattctcctttccaaagccagggccaggcgctcctgtggtgttacgggtgtgcttaaacacattcaggtgtgtgccattcccttcacatgtgcatgtgttcgttccccaccccttcctttcccaggggcttctctgggctccaggcgtttcctcgtgggaccctcgtgcagattacagccgtgtgtgcgtggacccccagccagggtgtgagggcctcatttcgtgctcgtgtctttccccagtgtgccttcagttttcccccaaaagcgtgcttttcagcgttcctttcatagtatagggggccttcccatgtgggggccaaggaactcccctttataggatttcaattcttttccctctttggggcacgttgtgggctttgtgagttccccacagggaattcagggtgtgaagacattgacaaaaaagcctcagtgtgagcggaatgtgacagcagcgtgggtgtggggtggctgtgggagaagaggctgcagggagaaggcagtcccccccaggggggcgcctaagccgggggaatcacgtgcaattttcctcgtgagatcccgattgggacaaccaggcccgggtttgaccattcccttcccattccattcggcattggtgtccaagcggggggctgtccactgcggggggctgcctccccatcgggtcctaacagttctaagactgggactggagttcctgggaggtgtggggagggggggcgtgttccacttctagaacaaattcctcagcagcttgagcccgagagagaatggccaagcagggaagttccgaaggacccgacaatgtgggcgggctggcccggggagcgacatcagccgctgtactctggtcaccagaagcgtccgacacaccgtgagctcccacagctgacagacggggagcccccgggcaggttacgcgggaccacaaggccggagcccaatacgtgagagagcgcaaacaacataggggggagaaaaaccacaggccgaacactataggcggaagggcttcacaaaaagcattaggagagacaagaggcgaagcaaagagggcaaacaacgcggaagcgacgaatatagagaaacgaccagcggcgagactgtctcctctgcctccgtgccccgccttgttcctttccacataacagga

SEQ ID NO: 723838 - DNA, 124 bp, Homo sapiens
cctgatagaacagcagcttcagtctatggtaaataaacccagactaacacacatgcagacaaacagcactggtgaattggttgaaacttaaatgttttattgatcaaatttaaacattattcag

SEQ ID NO: 723839 - DNA, 128 bp, Homo sapiens
ctcagtctgtgctcccctaagtcagccagacgcaagtgctaacacacttttccagtttccttctgtactgaacagtcatgggccattcaacgcctccgggccattcaacgcctccgggccattcaacg

SEQ ID NO: 723840 - DNA, 454 bp, Homo sapiens
  misc_feature (58)..(58): n is a, c, g, or t
  misc_feature (99)..(99): n is a, c, g, or t
  misc_feature (115)..(115): n is a, c, g, or t
  misc_feature (139)..(139): n is a, c, g, or t
  misc_feature (147)..(147): n is a, c, g, or t
  misc_feature (152)..(152): n is a, c, g, or t
  misc_feature (164)..(164): n is a, c, g, or t
  misc_feature (167)..(167): n is a, c, g, or t
  misc_feature (177)..(177): n is a, c, g, or t
  misc_feature (263)..(263): n is a, c, g, or t
  misc_feature (351)..(351): n is a, c, g, or t
  misc_feature (382)..(382): n is a, c, g, or t
  misc_feature (437)..(437): n is a, c, g, or t
ggttaaaaggaaaaaaagtaatttgaatttcccaagtgcctccgctgcatattccccntgttagatcccattttcatgttactttgtagccttggccanaggctcaaaaaggacncaaccagtttggggaaggggtggntaaggaanatggnataggtgaaggnggntgtgtgaccnctttcccccccccttcccaccctttagacaactttttcccttacctgtttttgctatggcggtaaagggatttttcctttgccccnctccctgccaaacctttatcctgggatcctattttgggcctggggggggtaaacctggggctggttttagaagggggttaggctgcanactgccttgtactccctggacccccccaaanggggttttttgggttatttcataaaattttttgaagtccaataaagcaggtaggngatttttaccacagccc

SEQ ID NO: 723841 - DNA, 965 bp, Homo sapiens
gaaggctacatttgtgtgagtgttgttgtatgcttcaggccttactgttttggaacattcggagatctcactgagctaatctgataacacaccttctcagctcatgccataaggggatgacctccatttgtttcctctgactagtggtcctctgctgacattcgcaaatgcccaccatcgattgtgtcgggcgtcttgggatttcccttcagtttctctcagtgtcctaccgtgtgcaagtataggtgggccaggtcgagtctctcacaatgacgggctacttgggattgctctatggtaagaactacatgagtgtgaaatggcgtgtgaacgaatagcttcggactacttgttcaagtgcgcttgtccagcgaccttagctgtttactctctatgagacagtgactgttattactctaatttttcttacttgggttagagttgaagacaattggacgtttacacatcttgtttccccagggctcgcgtcatttggatccccttggcgactaataggcttagtccacgagggggaacatcgcatgttcttagctccaaaaaggaatcttccaccatccccgttggcccattgaagcaaaatagtcacgcacaagtggtggtcatcgctttattctcgacaaggcccaggtttatgacgtcgtgaaagcttcgggcgagatgcgttcataataggttccctatgcgaacttcattatggcgcgtcgcgtttcctagacccgtggcccccccatttggtacgcaaagggacagcacctgggggtactacctagactccctttcgatgaaatacgctttgccttatttagatatgccgtctaagagtacattcttccattttacaatttttaagttcaaaacaaaatgtatcttgacaccttgttgtggtggtttcacaagtggtgcggcgctttgagggccagtttgaaggcccggaattcttgacc

SEQ ID NO: 723842 - DNA, 630 bp, Homo sapiens
gtgtcgttactggggctccgggaatgacaagttggtgatattgatggaggtgctagggtgcatgaattggggtgacaaaggtatggatctgccccccatcagtagagttgctttagaccaggagggagctgcctagaccaggcccaagacagtctggataaaaagcagagaagcttcatttggtccttaagttataaaaagagtgaatatcaggacagacacgagtctgagtcctgggagttaaaggttggagcccagtccttcactgagggatgggagccacacatacaggccttcggcattggtgggaaagagctgcccctgggacgtggagtcttctgtgagtggatccgctaggactcaggctctcagagcaagaggtttggacattcccaaaggtctccaaggagctgtggtggttcttttgatccaggatgggagcttatacttagaagaggcaaacatctctttcctcttgcccttggattacttggtggccacagctccctgacattgtaatcagagcccaagttacttgacttctgtgggcttctgggaggtgaatgagtgcaagctcaaatgctcctcccctgaccccagtcactgagcacatccatgtcttctgtgtcc

SEQ ID NO: 723843 - DNA, 355 bp, Homo sapiens
cagtttgaaatgttgaacttaaattcttgcaaaatgtggcacatgctaaatggtagttaatatttgcaaaggcttgtacagcaaccacccatgtggttgaatcacatccagtcttcatatatctcagttggttactcaaattaaagtattttttattatatggaatgtccagtaactattggtgtcttacgaaaatatagtaccgtgtcctatatagagctcacatctacatgtgctactctacactatgactgaagaaatctcatatatgaaagtcacagttatagttgacacatatcactcagtttatcactctccacaggatagtgtgtaatagtagaggtgtgtctatact

SEQ ID NO: 723844 - DNA, 538 bp, Homo sapiens
cgtgggaggtatctcacaggtaatgagtaggcgtatgggtatacccatattgctgaactggtaatgcgtatctacaggcaatccattgccatccttcacgctatctgaccttttctccacatcggaacaattacatactgctatgtcagctactttgccaagaaagggacagtaagtctatgggccattgatggcagccagtcaatcgacgagaactttacgcagaccttgcccagaatgccaatgcattctcatgcacagcccccagatgccagggaagaggatatcatacttgaaggtcaacagagcctgccatcccaggcttcagatttggagccgatactcaagcagcttactggaatccgtctctgtccctggaacactaaatgaggctgttgtaatgactccattttcatcggaacttcaaggaatttcagaacagaccctcctggagctgtccaaaggaaagccctccccgcatcccagagcctggtttgtgtctcttgatggcaagccggttgcccaagtgaggcactcc

SEQ ID NO: 723845 - DNA, 169 bp, Homo sapiens
ggcggtaccaggcaggtcagaaagcatactccaaaatgaaggccagctgcattagacacagaagtttttctttgaccttctcctgctctgtctctcagtcccattctcccccaaggtaagccatagaaactagaatccctcttctctaggtcacagaaactagaactcc

SEQ ID NO: 723846 - DNA, 107 bp, Homo sapiens
acaaccccggacaagtggccaaaggtggcctgggctttaatactcaagagaatggtggaaggttaaagcagcttggatttattcttactttgtatgttgtgtgttgt

SEQ ID NO: 723847 - DNA, 112 bp, Homo sapiens
cggtcgaataccgacagtacagtaggttcttatctgtggtgagtataaactagaggaatgctctacaggtgcaacaggttcagtgtgtttgctgacgtccagtgtacagtga

SEQ ID NO: 723848 - DNA, 107 bp, Homo sapiens
cgagcgtcctgagcgcacccctcgcagccctgtgctgcctggacgacgacctggcggaacgatactacggctcaagagcatgacgcagggacgagcagcagctcatc

SEQ ID NO: 723849 - DNA, 325 bp, Homo sapiens
catggatgtcttctctgctatcaagcacgaattgctattgagtccttctatgaaggagaatgactttgctgtgaccctgactcgggacatatttgtaagagctcaacgatggatctgttccggtctactatgatgcccgtccagaaagtgttggaagcattctgatttgaagaagtctgcatattgatgaaattgttcttgtatggtaggctcagactacgaattccaaagattcagcaactggttcaagagttcttcaatggcaaggaaccatcccgtggcataaacccagataaagctataacgtatggtgctgctgtccagg

SEQ ID NO: 723850 - DNA, 536 bp, Homo sapiens
  misc_feature (536)..(536): n is a, c, g, or t
cagaacagggccgtctgctccataaccagagcaagcgcagtgggcgagctgaactctcatacccactcacattcatgccttatataagcctctcctcctggttaaccttaacagcggagtgattcctctgctggtcgctgtttttgcttttctcttaccctattcctaacctctttgcttctctcttgctttccttgcgactcttgcttctctttactttttttttttagacatatagggtctttttttcttttaacacataggggatttaccttcattatgcttatccccattcggccccttcttcattcatgttcatctctgctattacgttctcctccacaagggatgcgaaccctattttcttttctccaagaccatgggagcactgattccctcactaggcctcgtgacaggtttctagaagagagaacgaggtcccacacccatttttggactaaattcttagacaggaaattctgggttcccttctttctttactgaggggggacaggcatgcccatttgccatactcn

SEQ ID NO: 723851 - DNA, 204 bp, Homo sapiens
tactatttgtgttggtattcggaactgaggccattcaacgcctccaggccattcaacgcccggaggcgttgaatggaccaccaggcccagctatttcgagacagaatcccactctgtcaaacaggctggagtgcagtggtgcaatcttggctcagtagaatgttcacctcccagtttcaagcaattctcctgtctctgcctccg

SEQ ID NO: 723852 - DNA, 291 bp, Homo sapiens
  misc_feature (62)..(62): n is a, c, g, or t
  misc_feature (69)..(69): n is a, c, g, or t
  misc_feature (97)..(97): n is a, c, g, or t
  misc_feature (105)..(105): n is a, c, g, or t
  misc_feature (165)..(165): n is a, c, g, or t
  misc_feature (169)..(169): n is a, c, g, or t
  misc_feature (206)..(206): n is a, c, g, or t
  misc_feature (213)..(213): n is a, c, g, or t
  misc_feature (279)..(279): n is a, c, g, or t
ctttcaacaactagtttattcaagaaaagaaaagaacttactgattcctctgttcctaaagnaagagtngcaagtgatcagggctgtgtgtagcatnccgcgttnctttagtgcagctaactgcatttgtcactgatgagcaaggaggggatcactaaagacatnttgngaagcagtagtatgtacgctctttgacaaaacacacntctgtgncttaacctgtagtttgcacacaagaacgagctccacctccccttcttcaggagggtctgctgccgntagattggctgg

SEQ ID NO: 723853 - DNA, 508 bp, Homo sapiens
tatgtgacccgatgaaacttgtggctgctgaaattttactcgcaggcttgagatagtatattcgcgctacttagagagaatgcgagtggtgggatcgtggtagcatgacattgtgagtgtgctgtggtttccattgatcgccgtcactctctcagtctccttcaggaatgactgcgtcagccatgaagacaggctcagccctgtgccgctcaccgaagccactttctacaggccagcaggggcttgttgcaggctgtgggttttggtgtggtttgtcagaggctaattctgcagagtttccaaaaccagaagacatcgtatgcttgggatgggggccgtgccacccgtgggaatgctgcccgctctgcagactgctgctagagccagcaactccactaaggtggattttcatcaggggcctgcagggccctcccttttcccattgttcctgcgctgcaaattgcaggccccagcaatcgtgactgacgtttgctccttgactccagcg

SEQ ID NO: 723854 - DNA, 565 bp, Homo sapiens
gagggctcggaggcgttctgcttcatcgacgatgagacgctgatgcattcctactcgtttcgctcgcatcacgtgtgcatggcgaataaaagctcatgtcgaccgttggcgtaccgcattggacactgcgacacaagtctcggctcaactgtctgcgtaattcagaatatgccgctgaatgcgtgccatcagacaaggttcggcgtgctgacaggcgtcataggcgatgagagaaactaggatacgtggtctactagatgcgtcccagtacactgatgttcgcgaatgtggtatactgcactatatacacaggggtgttttcgccgccacttggagaggcccaggagtttagatacgtatgaagcccgcaagtggtgccaccgatcggtccccggacactttgtcttaaaattgcacgttgaaaacgggtgggacaatttcccctttggtctgatcgacgcatctcaagacgcggaccaaaaacatcgaggcaggcacatagggacacatgaatgttacaaaagagtacgacgatgtgcccgttggcgatcttggcggatttttg

SEQ ID NO: 723855 - DNA, 142 bp, Homo sapiens
tggaagtacggcttagcggcacaatcaatttctaaaacagagggaatgtggaagagagaaaatctgatatgtcctgcaagataccctcaggaggtctctaggacactgataaatatcacggtatcatctagaaacgtggagc

SEQ ID NO: 723856 - DNA, 145 bp, Homo sapiens
tatcactgcacatggagactggtgagagctgcgtgtaccccactcagcccagtgtggcccagcaagaactggtacatcaggaagaaccccaaggacaatgaggcatgtctggttacggcgagcagcatgacctgatggattccag

SEQ ID NO: 723857 - DNA, 1010 bp, Homo sapiens
gctgtggctgccaggtcaaggccaacgaaggtgaacggccggcggggaggatactgtgcccaggagcaccctccctgcccgtcttgtccctctgcccctcccatctgcacatgtcacactgaccacgatctgtatgacatcttgagttgtatctgcaggacggggaccagtggctcccattttcattttacgccattttgtcgccctgcgacccactcccttcatacaagtctagtctagaatagcaggttctacgagcagctaggttctcaatgtctaagctatggaatcagctccccttatccaacatggcagtttaagaggacgtagtgaacttgggttttcgcgagtgctttgttcacgtagatggactttggggaggaacgcgatgcgtaacgccatgaccacgtgaggagaatgctagagcagagcgcgtgtctgtccccatgagcggacgtctgtcctctgctcttctgccgtcaggtcactgcctactgcctggggtgctctacttcattccagttggcatgacgtacctgtatacctgcgtggtgatgtgagcaacgtgtttcctccctgaccccgcgtaggatctgctctatgttgggatcagtcctgatattcgttcatgtgttaatttactgtttttggacatgtctgtctgttctagcagcaataaccctcctggggttcttgtggcgggtgcaataagtcccctccctgtgggtcgcttcgagatgagtatcgccattcctcatacccatactaggatcaggtccttgactctggggtgcaggcgtgcttctgttgtgtgttttaaagtccgttctgtcctgtttcgtggcgggaatgccctggggcagtcggggtatcctcgcggattcgaggccgtctactgctgggctgccatgggccggtcgctggctacgctactttccgttcgctcaagggttgggaacgagaaacccgcgttttggtggaagtgggtcttttccccttggggtcgccag

SEQ ID NO: 723858 - DNA, 221 bp, Homo sapiens
ctgcaacgattgtgtctgcctaatggggttttctgcaagagccttaattctgtagcaagacgcaacgaggagctgtgtaacttaagccagttcttcttggatcttacctttgttggccgacactaaggcagtaatcaagatcttggcttgaaacctcgaaagtcaagctattgtcctttcatctgtgtgtgatctcacaattaaatggatctacgctctct

SEQ ID NO: 723859 - DNA, 151 bp, Homo sapiens
tcaagatccctcacgcttatacttctcagcgctttatgcttctgcaacgctatcttcctgcagcgcttgatacttctcaacgctgtatacttcattagcgtctaggaggtccatggcatacttgaatattatagaagtataaagcgttgag

SEQ ID NO: 723860 - DNA, 467 bp, Homo sapiens
aaggatgacaccagggttttggcgtgtgtaactgtgagaatggagttgacagttactaagatgaggaaaattgcaaaagaataagagtgtattttgtttgcttaatcttagtttgttttgttaaaagactgagaaacagtggtggtaaaaaccagaaggtcaaggtctagaacatggtaagtttaagatacttatttaacatatggctaggtgtggtggctggctaggtgcagtggctcacacctgtaatcccagcaccttgggaggcggaggaaggcagatcacctgaggtcaggagttcgagaccagcctgaccaacatggtgaaaccccgtctctactaaatacaaaaaaattagctgggcatggtggcgcaactcggtaaatcccagctacttgggaggctgaggcaggagaatcgcttgaacccatgaggcggaggttgcagtgagccgagattgcgccttt

SEQ ID NO: 723861 - DNA, 100 bp, Homo sapiens
gatcggtcaagaggctaagctaaagaccctgaaactagacgagctacctaagaacagctaaaagagcacaacgcttctctgtgacgaaaatgatggctag

SEQ ID NO: 723862 - DNA, 329 bp, Homo sapiens
attatagtgacatggacaagtgaagcccaggctgaggtggtctgaaaaagagaacgaggaacttcttgtggaactgggtgcaatggtcacccttgctatgtttcaacaaagagaatggtgagattttgcccctgccctagagatctgtggaactttgaacttgatagagatcatctgaaattggaactcgtgtttacaagaaagcagggaatcaaacgtttgaaaacttcgcagcatgacggtgccttacgaaagaaaaacccattttctggagagaaattcaaataagtaacaaggagccaaatattaatcgccaagacaatggggta

SEQ ID NO: 723863 - DNA, 424 bp, Homo sapiens
  misc_feature (13)..(13): n is a, c, g, or t
  misc_feature (17)..(19): n is a, c, g, or t
  misc_feature (22)..(22): n is a, c, g, or t
  misc_feature (34)..(34): n is a, c, g, or t
ccacactgccggntcgnnnccncctgctgtcctnataccccaaccctggctcctcctgcgacctgctgtcctcatccccaaaccctggctcctcctgcgacctgctgtcctcatccccaaaccctggctcctcctgcgacctgctgtcctcatccccaaaccctggctcctcctgcgacctgctgtcctcataccccaatccctggctcctcctgcgacctgctgtcctcatccccaaccctggctcctcctgcgacctgctgtcctcatccccaaaccctggctcctcctgcgacctgctgtcctcatccccaaaccctggctcctcctgcgacacgctgtcctcatccccaaaccctggctcttcctgcgacctgctgtccttataccccaaccctggctcctcctgcgacccgggcttgtg

SEQ ID NO: 723864 - DNA, 379 bp, Homo sapiens
aatttccatattcaaaatgatcatattagagtggctgagtgaccttttgattttaaagcagactaaaatctggcccggccccaatgaaaagtataaaattagaaacttaaattcccagctaaatttcagctttgacccccctaactccagtgaataggtggcagctcagaaacaaggacagccctgctgctgccagagcaagctcccatccagctggcccttcgtgagagctccttcctgccgggcccgtgtgagttcagcgtgggcaaaagacttttatgccccttctgtccttcaaaagggaaatgatgcccacccccgatgcagcatgtcctgaatgaatgatctgtaaaatcccataataaaagcttatagtttg

SEQ ID NO: 723865 - DNA, 254 bp, Homo sapiens
  misc_feature (63)..(63): n is a, c, g, or t
  misc_feature (96)..(96): n is a, c, g, or t
  misc_feature (150)..(150): n is a, c, g, or t
  misc_feature (217)..(217): n is a, c, g, or t
  misc_feature (244)..(244): n is a, c, g, or t
gctgttggacaggatacgagcttgaaatccgggccttcctccagcagctcaagcgccgcgtanccggtgatgccattcagaaagtgcatccgggtngccttcagggaccaaggcgccgggacacatgcccccagcccccatagaggtctngacggatctggctgagaagataacagggccactggaagaagccgtggcagtggctttctcgcaggtnctcaccatcgcggccacggaaccggtnacccttctgg

SEQ ID NO: 723866 - DNA, 1150 bp, Homo sapiens
  misc_feature (425)..(425): n is a, c, g, or t
  misc_feature (1150)..(1150): n is a, c, g, or t
aaatcgagctgcccgtgaagaggcgggcatgacagcagaaaggacgagaagaccctatggtagctgtagttgattgaatggaaacagtagcgtaagcaagacccagaatggtcgcataaatctaccgatagaggctggctattagaaaagtttgcggtgaggggcgaccatcggaggcagaatccaattctccgagcaggacgatgctagatgacttcgacgccagatcaagagagaaatctaactaatcactcacaatcagatcccaaagtgaaccttggagccaagggcaaacatagttagccactagggaatgaagcagcgggcaagtgcctatggctagcaagtaccatcatcaaacaactaggagttgtcaccgaaaactacgatagtccggaatcagaggacatcaccgagtggggtgncatgcacgctgagttaaagggttcggttcgtaacagacgagttaggaggtaccatagcgatgaaatgcgtagaacgtaaacaagaacgcggaagtttaaatactcaagggattcgtgctgttctgaatcgtgactttccacatacttgccttccgctggtagcgcaaccagcgaccatacgaaaggaaaaaattacacggggtccccataacttgtcatcagagaggccgtgccctttatcgcgcacaccgggtaagaactggaagtaattcaaatctgtcaaagcctgtaagaaaagtttcaattagcgcgcaaacaaggacacgaggtcacaaaagggaaaatccacacggggctaccagtgggtctaacacggaagtgtggcgccaagaaaggccccccggggtttaagacattccgggcaggtaaggagacaccttttcacattgacccgttttattccaagggtgcacaaggcaaggggatttgccaagagtataccctctcatggtccctgtaaaaaaggaataaacggattgaagaacgccaattgtgaggcgccacaaaaaggccgtgacacctaatagctcacccctgtgcgaaattgtggggtagacggccccaagttgtccctcaaaacgtctccacgacgaagatttgggggggcaagttttcccccttaagaatttggcgatattgaaaccccggagaagagctgggaaagn

SEQ ID NO: 723867 - DNA, 166 bp, Homo sapiens
caatgtgtaaatgtcccgcgacgtccacctgaaagagtaatttatcatgattatactagtactataagaatcattagctctatgtgtgtggacactaattcctacttctaacaacctacatctatcaagtgctactcgtaatcgctctctcaccttttcatccaga

SEQ ID NO: 723868 - DNA, 615 bp, Homo sapiens
cgagcgaggggatggcgctgggccacgggagttcctgggagttccggcgttgccctggcagtcctgcggtcctcgtgcgtggaaggctgtcccggcgcctcaggcagctctgcgtgggccgtgggtgacttcctctgcgatccccttgctgctgatgtgttgaatgtgtgcatgtggacctttgcctgcgcctttccactgctgcctgtgccccacctggctgagtggctccatcttcctcatgacttatctgctctgctgtgacatgtgctgcctgtgggtctccctgtggcctcctgtacctgtcctccttcccatgctggctcctgggaatgctgtgttccctgtcttctggactgcatttcaccctgctgctggggatgatgcttccctgtggaatggttccactgtgctggcctgagtggtttcctgctgccctggtgactgctgtttctggcttgagtgcctgtggtgtccatgtccactgggttcttgccctgcactgtgtccaattggcctggtggatcggcgtgagtgctcatgtttggaccccatcattttgcattggctatggttgattgttttgagtgattgtgactgtgtatatttctccca

SEQ ID NO: 723869 - DNA, 327 bp, Homo sapiens
  misc_feature (305)..(306): n is a, c, g, or t
  misc_feature (315)..(315): n is a, c, g, or t
gatgttaccaagtttgccctctatacctgggattcatcccagggcaccttcacctccaagggcaacttctactccgggaaatattccttggagtttaggagatgataacccaccttcatctagttttcctggaccctctcaacctcgtgtttctttccatccgggaaatccttttgttgaagaagaaggtcatagactagatccagtctagagaaaggagaagagaaattcttcctgctcctgtaccgtcacactctatgatcagtatatacagtacactcacacgatgcacgtatactatcacnnatcagactnactgaggctctg

SEQ ID NO: 723870 - DNA, 429 bp, Homo sapiens
agaggtacctaaggagacatgaggacccaatgtcatgtgatattctagacggggtattggaccagaaaaaggacattagggaaaaactaaggtaatctgaataattcaaagtgtgggctttagttaacaataagggccgaatttggtggctcacacctgtaatcccagcactttgggaggctgaggtggccagatcacttgaggtcaggagtttgagaccagccttgcccatgatggtgcaaccccatctctactaaaaatacaaaaattagctgggcatggtagcaggcacctataataccagctacttaggaggctgaggcacaagaatcgcttaaacccgggaggtggaggttacagtgagtcaagatcatgccattgcactccagcctgggcgataaaatataaatcggtttccaaaaaaaaaaa

SEQ ID NO: 723871 - DNA, 276 bp, Homo sapiens
cagttgacttttaacaagatggctagacaattcaatgggcaaaagaatagtctttccaacaaatggtgctgggaaaactggctatccttgtgtggaagaatgaaagttagacacctacttcataccatacagaaaagttaactcaaaatggacgcacaaaggttgggtatggtgacccacacctgtaatcccaacattttgggaggccaaggtgggtgggtcgctggagcccaggagtttgagaccagcctgggcaacatggtgaaaccccactct

SEQ ID NO: 723872 - DNA, 1014 bp, Homo sapiens
  misc_feature (271)..(271): n is a, c, g, or t
  misc_feature (308)..(308): n is a, c, g, or t
cattaactgctcagtaccagacgtggcaaatctcaagtgacagtggaccccccccccggccaagtttatcaatctcgttccccttctttccaaccacctttcccgaagcgatcaacagtctcgagaaggctcagcaggaaagcttgagtctccataaccttctcttggggtgaaccttcccccaaccaatctggttctcaacatgggaaaacacggtggctcgagttaattacactagtgcattagacttccatggtttggatattccagntatgagctggggtttaaattatattggccactgtgcnttggatctttcctggttaaacagcattaccaggttgtggagttatattttcaccaattattattgcgtgtgtggcaatttgtgagagtttataatatatgtggatgtggggctgagagtgcgacatataaatttgtgcaaaacattctacaaaacacacttgtgaagggtgtgatcatagttggttacaaaagaaacagagatttaccacaggtatattatgggattccacagggttgtgtacatgttacttacagacgcatatgtgttaaatataccccgtggaacacttctctaacgaaatgtgtttatattcaaaagggggctccttaatggggggagaaacaaaagggttaaatgtggtatgtgcaactctaatttcaacgtgtgctgttggacaccaattttaaatataaggggacaaagtggtgggggccccttgcttgaaaacagaaaagcctcttgttgaggaagaaaacgtcttggtgtgtttggatgaccagaaaactctgtgtggggtgatatcccaaccttgtggaagcaaaaaagggatctttgaaattgtttctggaaaagattcgtgcgtgaaaatgtggcccgttgggggcttctctttacgagacatattaagactcaaaattctgctttgacattggggcaagatttcagacttatggtcacattcaagtcgagacgatcttcatgtt

SEQ ID NO: 723873 - DNA, 201 bp, Homo sapiens
  misc_feature (6)..(6): n is a, c, g, or t
  misc_feature (74)..(74): n is a, c, g, or t
  misc_feature (115)..(115): n is a, c, g, or t
  misc_feature (122)..(122): n is a, c, g, or t
  misc_feature (181)..(181): n is a, c, g, or t
tggatntggctggagtggcacagactggatctgggaaaacattgacttatttgcttcctgccattgtccacatnaatcatcaagccattcctagagagaggcgatgggcctattngtttggngctggcaccaactcgggaactggccaacaggtgcagcaagtagctgctgaatattgtanagcatgtcgcttgaagtcta

SEQ ID NO: 723874 - DNA, 857 bp, Homo sapiens
  misc_feature (70)..(70): n is a, c, g, or t
  misc_feature (104)..(104): n is a, c, g, or t
  misc_feature (114)..(114): n is a, c, g, or t
  misc_feature (151)..(151): n is a, c, g, or t
  misc_feature (190)..(190): n is a, c, g, or t
  misc_feature (305)..(305): n is a, c, g, or t
  misc_feature (316)..(316): n is a, c, g, or t
  misc_feature (334)..(334): n is a, c, g, or t
  misc_feature (336)..(336): n is a, c, g, or t
  misc_feature (351)..(351): n is a, c, g, or t
  misc_feature (360)..(360): n is a, c, g, or t
  misc_feature (371)..(371): n is a, c, g, or t
  misc_feature (417)..(417): n is a, c, g, or t
  misc_feature (422)..(422): n is a, c, g, or t
  misc_feature (424)..(425): n is a, c, g, or t
  misc_feature (440)..(440): n is a, c, g, or t
  misc_feature (465)..(465): n is a, c, g, or t
  misc_feature (549)..(549): n is a, c, g, or t
  misc_feature (553)..(553): n is a, c, g, or t
  misc_feature (572)..(572): n is a, c, g, or t
  misc_feature (579)..(579): n is a, c, g, or t
  misc_feature (602)..(602): n is a, c, g, or t
  misc_feature (606)..(606): n is a, c, g, or t
  misc_feature (617)..(617): n is a, c, g, or t
  misc_feature (645)..(646): n is a, c, g, or t
  misc_feature (649)..(649): n is a, c, g, or t
  misc_feature (652)..(652): n is a, c, g, or t
  misc_feature (656)..(656): n is a, c, g, or t
  misc_feature (658)..(658): n is a, c, g, or t
  misc_feature (660)..(661): n is a, c, g, or t
  misc_feature (675)..(675): n is a, c, g, or t
  misc_feature (690)..(690): n is a, c, g, or t
  misc_feature (754)..(754): n is a, c, g, or t
  misc_feature (855)..(855): n is a, c, g, or t
actctatatataaagaaatgcattccagcaacactgtcagcatctttattaccaaagaaatacataactntaacagataatctctctgtatcttagtattaaantttgcaaaanaaatggagatatatcaactctcatacaattctaaaancattgtgctgtgctgcctcacaggggtacgttcccagangtttctctctctagagcaatccctaataggacaattgttcactctgaggcttctggcttcttatctctcctctcttggggagctgctgcttctctgtaggttgcttccctgtgangcagggaccanagtttctgctctaataanancttttccactctgangtagctganccataaactanattgccttagtcctgttcaccctttggtgattctgttccatttgcnacctngnntcttcctcctcagtnacttttttttttttttgagagagtnttggtgtcactgaggctggagtgcagtggtgcaaactcagctcactgcagtctcaacttcctgggatcaggtgatactcctgcntcanccttcggagtagctgggantacaggngtgtgccactgcacctggctaantttngtaattttagnggagacggggtttcgccatgttggccannctngtntctntntnntgacctcaggtganctacccgcctcagancctcccaaggcgtgtgggaatacagaagtgagcctccgcacccggccgctcctcagtcaattcnaaacaactgtcctcacttgaggaagctggcctttctcctgtactgttttaccagttgtctttttaaaaaataactttcctccaaataacttactaattttntt

SEQ ID NO: 723875 - DNA, 401 bp, Homo sapiens
ctgtcacattaactagtttgactgttagataagtcacttaacatattttctcagtttttcacatataaacagaactaattcggttgcctcacagagttgtccttggatagtggtcttaaaaactggtgaatcagtctgggcatggtggctcacgcctataataccagcactttgggaggccaaggcagaacgattgtttgagttgagaacaggaggtcaagatcagcctgggcaacacaggaagaccccatctctacaaaaaatttttaaaattacctgagcatggtggcatgcacctgtagtctcagctacttgggaggctgagataggaggatcactggagcctgggaggggagattgaggctgcagtgagccatgattgtacctctgcactccagcct

SEQ ID NO: 723876 - DNA, 241 bp, Homo sapiens
gtttttttcagcctgtttccccagccacaggcctgctacgacccccccgatgtgccgcaagccctgtttccccatcccgcaccccccagacaacagccagggctggagtccaggcccctttcagctgctcctttttccgtgcatcgtgttttttttttgctttttttttcttcccccccttttctttttttgacccctcccctccggggggttttgtatcaaagctcctcaaaccccgtca

SEQ ID NO: 723877 - DNA, 1355 bp, Homo sapiens
gtcaactactggttcacatcctacgtgcgtccggtgtgaacgtccgtccgacaactatatgaccagtactaatatgcagaggcacacatatacttacctaccgtcggtttgccactctccacttggtctcgtctccatcaatggtcaggcacttatcaagagatgtgaacttgtccaacaccttgtggatggtggtgatgacaccacgacaccggagtcaggtctactgaaacacctgttcatgggggaagggatcacgtcatgaggcacagtgtactgagcttctgggcgttggacgagcgcacacagtaaatcagggcgtgagacttacggccaatgccaggcatatgaaccaaaggacgcgtgctgcacctatctgtgagctggcttgggtgctttgaaacgagtcttgaacacgaacatgtgctggtgtcaccttgggtagaataactacacacaagaccttagagaaaagatcagaatttacctggactagaggtacagccaagttaacccctataggtcctccgaccatgtggtgttgcctaccgatagacctatgtcgacacaataaacaaagagggaatccattgtcgacacattgcagaagtcggaacggattgcacccaatgacccacaagggccgtgtgtccattgaacgtacgtctcttacatactccggcacactgcaattctgggggcaaacaatccccggacttggggtggccatgccaattttctgcctccaattcgccaaaagtcgctcctaggggaaatctggtgcggccccaaagaaaggtctaattatcaaggcaccgttcaactagggtggaactttgtgcccgcactggttccaaacagaaattacgttcccttaagagcctactgggcctacgctaaatattaattaagctttaaccgaaaacactctcaaaagcggtttccgattaagccgttatagataaaacccttattacccaagatataagtgccccatggggggcggcacatttcaggactaggtcttccggaggcccatttaactggcgttcaccacgtgtcttaacacccccgtggacaattttcagccccaagtatgagcccagaaaaatgcgcttcggcgtgactagagggcccggacaattgccgcgccgggcaaaaccttggccgcgggcaattacctctaatctacgcttccaaatttcccctaacaattttcggaactcacactgtgagtttacaaaggttctctcacacactttgcacacttccccatgtgaccctccattacgatgtgtgaccacacaacaaacgcgctcaagggtccccaaacatttgtcagtaacggggacact

SEQ ID NO: 723878 - DNA, 127 bp, Homo sapiens
tgcatcaccaccatcactgccaccatcatcaccatcaccatcatcaccaccatcacatatcatcaccaccatcatcaccattatcatcaccatcatcaccagcattgccactaccattgccactacc

SEQ ID NO: 723879 - DNA, 985 bp, Homo sapiens
  misc_feature (146)..(146): n is a, c, g, or t
  misc_feature (182)..(182): n is a, c, g, or t
  misc_feature (190)..(190): n is a, c, g, or t
  misc_feature (199)..(199): n is a, c, g, or t
  misc_feature (210)..(210): n is a, c, g, or t
  misc_feature (628)..(628): n is a, c, g, or t
  misc_feature (635)..(635): n is a, c, g, or t
  misc_feature (663)..(663): n is a, c, g, or t
  misc_feature (727)..(727): n is a, c, g, or t
  misc_feature (732)..(732): n is a, c, g, or t
  misc_feature (739)..(739): n is a, c, g, or t
  misc_feature (758)..(758): n is a, c, g, or t
  misc_feature (769)..(769): n is a, c, g, or t
  misc_feature (771)..(771): n is a, c, g, or t
  misc_feature (858)..(858): n is a, c, g, or t
  misc_feature (864)..(864): n is a, c, g, or t
  misc_feature (894)..(894): n is a, c, g, or t
  misc_feature (898)..(898): n is a, c, g, or t
  misc_feature (909)..(909): n is a, c, g, or t
  misc_feature (912)..(912): n is a, c, g, or t
  misc_feature (925)..(925): n is a, c, g, or t
  misc_feature (933)..(933): n is a, c, g, or t
ttctgggccaccagtgcccctaccatcttcacaggcagtccctccatcgctaacctttttttaaccggccttttaggaccggaagtccttcatctcaagcatccaatgctgaaagcggcctgattttctctaccggaagccctttnccagaggctgggaacacggcccacctagcaggaagncccacctncttgagctncgccacccttnccgaagtttttctgtcacctgtgttaggctccgtcccctttccgcgttttatccccgtaccagaaaaggatacatttagtgcctcccacccagctccactaaacgggttggatatctcattctttgagattggtgttccttccccggcgcccccatgtagctgggaagtgggacctgggggtggttggacccctgggatcctaaaggaggggcagggagggcgcagaactccgcttctgctccttgctaccaggacgcgcggcctcctcagcctctttcctcccgctgccatgcaccctgcgagccttcccgcttcctgttggttgtggccgctgtgctgtggggagcggccccgacccggggggctcattcgagcgaactcggaccacaaatgccagcattggactttgcaagatcnttccagnctctgtgtgggggctaccttgacgccanggagggcctccaggggtttccttgtggaggctcaccccagacaatgccctgcaggcccatttgncccangcacccnccagccccggtcaatgggntcagtctttantngcgctgcttcgaagattcgactgcaactttgacctcaaggtcctaaatgcccagaaggctggatatggtgccactatagtacacaantttaantccaattaacttcttaacatttttattaanattnattaaatccancancagatctggatcncgtctgtntttattgggggagagaagctccgagtacctgcgtgcgctctttgtctacgaa

SEQ ID NO: 723880 - DNA, 476 bp, Homo sapiens
  misc_feature (476)..(476): n is a, c, g, or t
catgtacagcatgaggggctgccgaagccccttaccctgagatgggagccgttttcccagtccaccgtccggatcgtgggcattgttgctggcctggctgtcctagcagttgtggtcatcggagctgtggtcgctgctgtgatgtgtaggaggaagagctcaggtggggagggagctggtctcaagctgcgtgcagcgacagtgcccagggctctgatgtgtctttcacagcttgcttccctttgtgacttcaagagcctttggcatctctttctgcggcacctgaatgtgtctgcgtccctgttagcataatgtgaggaggtggagagacagcccacccttgtgtccactgtgacccctgttcccatgctgacctgtggttcctccccagccatctttcttgttccatataaggtgggttggatgtcttcatctttgtctcaactttacgtgcactgagctgccttcttcttccn

SEQ ID NO: 723881 - DNA, 868 bp, Homo sapiens
tgtgcgggtaattgccagccatcacctgattgatcaaactgaagcctcagaactaagataataatccatgaagagcaaacactgaaagcgacggaacctgatctcttataactaggtatcctatgaaactcgatgtcatatatgggccacgactaactctccgtcggactcctgcctcactcatttacaccaaccacccaacatatctataagacctagtcatggccatccccttatgagcgggcgcagtgattatagggcttcgctctaagattaaaaatgccctagcccagttcttaccacaaggcacacctacaccccttatccccatactagttagttatcgaacactcgagtcagcctatcgtcattcaaccaatagccctgggccgtacggcctaaccgctaacattagctgcaggccacctactcagtgcacctaattggaagcgccaccctagcaatatcaaccattaaccttccctctacacttatcgatcttcgacaattctaattctacgtgacatactcctagaaatcgctgtcgccttagatccagagcctacgttttcaacgcttcataggtaagcctctagctgcacagacgaagataatataaaaaaccaaaggataccttcccccattaggtgggacgcgttatacgcgctacaagaaaggccccaatgggaccaattgaggggggggcgaaagcactgtccgtggccagaatatcggtagaaggtgtttcccaaagaaacggcgataaaaaaaaagggaaggagccacatagaaataacgccggtaaacacagatgtgtttcaacacaacaaggggttgggccaatagagaccacaaaggggcagaggaa

SEQ ID NO: 723882 - DNA, 1655 bp, Homo sapiens
  misc_feature (978)..(979): n is a, c, g, or t
  misc_feature (982)..(982): n is a, c, g, or t
  misc_feature (1298)..(1298): n is a, c, g, or t
  misc_feature (1305)..(1305): n is a, c, g, or t
  misc_feature (1333)..(1333): n is a, c, g, or t
  misc_feature (1397)..(1397): n is a, c, g, or t
  misc_feature (1402)..(1402): n is a, c, g, or t
  misc_feature (1409)..(1409): n is a, c, g, or t
  misc_feature (1428)..(1428): n is a, c, g, or t
  misc_feature (1439)..(1439): n is a, c, g, or t
  misc_feature (1441)..(1441): n is a, c, g, or t
  misc_feature (1528)..(1528): n is a, c, g, or t
  misc_feature (1534)..(1534): n is a, c, g, or t
  misc_feature (1564)..(1564): n is a, c, g, or t
  misc_feature (1568)..(1568): n is a, c, g, or t
  misc_feature (1579)..(1579): n is a, c, g, or t
  misc_feature (1582)..(1582): n is a, c, g, or t
  misc_feature (1595)..(1595): n is a, c, g, or t
  misc_feature (1603)..(1603): n is a, c, g, or t
ctagtcagtcattgacgctacgacgtgtccgagcacactggatagggaatgcatgcgcgtgttcactagtgttgatgacactccatcttttcccggttgaattcgaatgcaggcgccgtttaaacaacatgttttgtatgccacagggcgtttggtcaagctggaagttcggccatccggcaagtcatgcgggataagtagccaacttcggtctcgtgtttcccaccataaggctccagtggcacctgcggtcaatggccaatcaacagccttcagcagtatagccaagggggagtaccatcagccccaggtcaggcgcttcattacagcacggtatagtattcccaaggcgggtattggtgtaggtgggcctgtaccgcagcaaggccagcacgacagccctagtgtaaatgcccctcaggccactgtctgccttcaggatactggtgagggcatggaagctggttttgtactctcgagtcttggccccattccccagcttcaacatgcatccggttcttcaccaggtccaggggctggacaaataaactgtagctcccatcaccggccaggcccccattacagcgaacattgacggacttaggggaggtacggggcttccccagtctatcccagccggccccaggcacatcagccgtcgccagccatcgccacgtcaatggccctcggctccagggtcccgtgcgcagcgcaggcccacgcatcgcgccacaaggtagacaccagcgcagctgcaacagagcagagggcagcgcgcacgcccctccagctctcaggtccgacacccgctggaagccggcgcagggcgcaggcgcgcagcgcaaaggcggccgggagtaaggcggagctgaaggaggagcttgatggaagcgtgcgagaaggggcgtaactgatttggaaaccagaggaaaggcgctgttttcaccgaataaaaaacgccctgcaatagagaagagnnggntggaagggctcgcgagatttttttagtacggctcgccaagttggagcgctctcgcgatagacacagcaactattcagctgcgaggggacgggagaggtggtgagcactctcgcgagatttgaaggaccggcggaggccaaagggaggagaggacgcgcggcctcctcagcctctttcctcccgctgccatgcaccctgcgagccttcccgcttcctgttggttgtggccgctgtgctgtggggagcggccccgacccggggggctcattcgagcgaactcggaccacaaatgccagcattggactttgcaagatcnttccagnctctgtgtgggggctaccttgacgccanggagggcctccaggggtttccttgtggaggctcaccccagacaatgccctgcaggcccatttgncccangcacccnccagccccggtcaatgggntcagtctttantngcgctgcttcgaagattcgactgcaactttgacctcaaggtcctaaatgcccagaaggctggatatggtgccactatagtacacaantttaantccaattaacttcttaacatttttattaanattnattaaatccancancagatctggatcncgtctgtntttattgggggagagaagctccgagtacctgcgtgcgctctttgtctacgaa

SEQ ID NO: 723883 - DNA, 878 bp, Homo sapiens
ctctactgagggatgtaggagtttatatctgaggtctgagcctcttttcctttacttcctttactctttcctaagccttctttataaaaactatgcatgtactattgttattcctgttttgattccctttcttttattatccccagctccgtgcagtgacttgctaattctcatatgttagaaaggcagatctcctggttgacgaaaagatccacccaagcaagtcagcatgtttaataacttttctgagggggatctcaaactgtgggcacggattgttcatataatgacaaccaaatgatgacatgagaccaataaaccttgctactaggacattcctcggacggaactatattagcctactcttattatccttaggtttacgcggaagagcatattattacgttgtagacagtaacttacctaacttctacattttaacttgtggaacatcaacaaatatatatactgaaacatacaatgttctaattgacttcagtgtcccataaaccagcgttcaaacaattaccaaattgtgaccaatctttacacacatgcacaggtgtccctcagtatctgtggggcattggttctaggaccacttatggataccaacatctatggatgctcaagtccctgatatcaacatggtggactatttgcatttaaccctgtgtacatcccgtattatctaaatcatccctagtatcactttataataacgctaattacaaatgtagaatgcccatcgtacactaaactgtgcatcctggtattaacggacctaacaacgcatgaaacatgtccatgttccagtacagacgcaattgtcctgtgtgtggacatattacattccaagtcaaatgcaccatggacta

SEQ ID NO: 723884 - DNA, 325 bp, Homo sapiens
  misc_feature (239)..(239): n is a, c, g, or t
tggggttttaccatgttagtcaggctggtcttgaactcctgacctcaggtgatccacccacctcaccctcccaaaatgctgggattcaggcatgagccaccatgcccggccaatgccatctattaaaaaaacaaagaaaaagagtacacaccacaaagcactggggccaaatgcattgttttccatgtttgcaaggatttcccatagaaatattaggtttgatgcaaaaattaaatttncccagactgcgaatttttaaaatcatttggtaacttacgctaaaaacatattctattaatcaaaaccaggaaccttaccaatcaca

SEQ ID NO: 723885 - DNA, 298 bp, Homo sapiens
  misc_feature (70)..(70): n is a, c, g, or t
  misc_feature (83)..(83): n is a, c, g, or t
  misc_feature (87)..(87): n is a, c, g, or t
  misc_feature (174)..(174): n is a, c, g, or t
  misc_feature (214)..(214): n is a, c, g, or t
  misc_feature (287)..(287): n is a, c, g, or t
tagatatacaatcagctctgtacctgaagattcgtgtcacgtatactcatattgacaataacttgacaanggaacaagttacnctanggataaagcgcaatcctattctagagtccatatcaacaatagggtttacgacctcgatgttggatcaggacatcccgatggtgcagncgctattaaaggttcgtttgttcaacgattaaagtcctangtgatctgagttcagaccggagtaatccaggtcggtttctatctacttcgaattcctccctgtacgaaagganacgaatgttca

SEQ ID NO: 723886 - DNA, 100 bp, Homo sapiens
  misc_feature (28)..(28): n is a, c, g, or t
gagacatcctctataaactttcctccangaaatacaaggatccactgaaagatggtgaggaaaagctcaaatagcgactatgcacaacttcttgaagaca

SEQ ID NO: 723887 - DNA, 216 bp, Homo sapiens
ttgatctagaggatcccgagctctctctgttggggcgcccccgtgcggggtcttgggtgggtagagcaatcaggtgactggtgacgtttggcctccctgaactgcctcgagctccttgtgtgagcacagtgaccccggcgtggcactgcaggatgggcagtgcaggcccctgcgcaggtgctgggtggactgcttccaggtgtcatattggaagaa

SEQ ID NO: 723888 - DNA, 474 bp, Homo sapiens
cgcacgagcctgcctcagcctctcaagtagctgggattacaggcgtgtaccaccacacccagctaatttttgtatttttagtagagacagggttctactaaaaaccctgttggccaggctggtctcgaactcctgacctcaagtgatccacctgcctcggcctcccaaagtgctgggattacagcatgagccaccatgctgctggctgcctgcctttcaaaattgaagaaaaccaaccccaagtcatggttcctgggtgggtatcgtggcctagagagaagtatcagagcacctcagattgtcattttaaaaaagaagcctttcatgtacagttccagctttttcctcccaagggtgttgtggtaggtgtttctgtctttccactccacagacaagaaactgaggtccaaatgacttgcctgaggttatccagcaagtcgtgagcagaactagaacgaacttggatctcctgac

SEQ ID NO: 723889 - DNA, 556 bp, Homo sapiens
  misc_feature (80)..(80): n is a, c, g, or t
  misc_feature (119)..(119): n is a, c, g, or t
  misc_feature (163)..(163): n is a, c, g, or t
  misc_feature (172)..(172): n is a, c, g, or t
  misc_feature (195)..(195): n is a, c, g, or t
  misc_feature (295)..(295): n is a, c, g, or t
  misc_feature (328)..(328): n is a, c, g, or t
  misc_feature (330)..(330): n is a, c, g, or t
  misc_feature (358)..(358): n is a, c, g, or t
  misc_feature (377)..(377): n is a, c, g, or t
  misc_feature (390)..(390): n is a, c, g, or t
  misc_feature (418)..(418): n is a, c, g, or t
  misc_feature (420)..(420): n is a, c, g, or t
  misc_feature (462)..(462): n is a, c, g, or t
  misc_feature (473)..(473): n is a, c, g, or t
  misc_feature (492)..(492): n is a, c, g, or t
  misc_feature (494)..(494): n is a, c, g, or t
  misc_feature (518)..(518): n is a, c, g, or t
gtatggagagaaaactgtgcgcctgctaactgcctgccgaagacctgggctttaattttcttgccatttcaatcccaatntttctttaggagattgatgataaggttcggagtggactntttgtttgatggctttctaatatggagatagttccaagagagcnaggattaanttggccaacttcatgcacatgtnttatccaacccaaattacagttcaggtggctggtggtgaaagccaactcattaacctacagtgacatctgttcatctgatatacctttcctgagctcaanaggtctatttcttttgaaatatttatggctctnanactaaaggccatttcatttttgtttttnacttcacatgatggttaanacagatacttaanataataaaatcacctttaaaggcaaaananaaaaaaaaaaaaaaaaaaaaaaaaaaaaaggggggggggccntgggttttccntgggggggccccggcttcngngtccccggctttttttttcaaggnggtccctttggtggttggttttaaaggcgggggcctgg

SEQ ID NO: 723890 - DNA, 422 bp, Homo sapiens
atgagccggtccggacctcctgtgtgtgttgttaggttgttaatttgatcgcttctttcttgctgcttgcttttatttatttatttctttccttctttctttctttctgtctttttctttctttcagacagggtctcactgtatcactcagactggcatgcactggcatgatcacagctcacttcagcctcaactgagcccaagcatctttctaacttttttatgtgggtggttagcgtcacacatattttaaactaaacatattccaaactgatagaagatattttgcctcaagcttgcttctcctccaatgttccctatctaacaaagaagctaatctccattcccaacagaaaccacttgctaaatcctgctgattttacttcctacacattttgaagccctcctgcttattgctactg

SEQ ID NO: 723891 - DNA, 225 bp, Homo sapiens
acgggctcgcgcaaaaagctgagcatattgacagctttttgcaaggaccttgaaccgtccgccttgagttgacccgccatgcccccagaatcctccagccccagcgacctgatctacggcctcaacgaccggccgaaaccactgcccgctttcctcgcggcgctgcaacatgtattggcggcgttcgtcggcatcatcacgccgcctctgattattggctcctca

SEQ ID NO: 723892 - DNA, 442 bp, Homo sapiens
tcaaggaggaggagtcctctcatcctctgttcggtataggatcatcattccttgggcactggaatattccccctgcttcaaagccagcaccctcctcatcccctctcttctaatgtccttaccttttacaggatgcttatgacatcattaagatccctaaaagctccaagatagttttcccatctaaatgtatcttattcaatctaacctactaagttccttctgaattatgaggaatcattcaatatgtaccatggtctccaaaatccaaggcctgaacatcattgtgaagacattattcagcttagtatcattttcacatgacagttacctaatgtgttcatctaaatctaccctgcatagtctctttctacctgattaatcctcacacgagtttctccatcttccctcctttctgcaataaagttcccagtgtcatgca

SEQ ID NO: 723893 - DNA, 302 bp, Homo sapiens
ctgttgcgaggaatgctgagggttggacaggcaaaagcagatgtgtggcccagaacagctccgaagaaagatgagaacaggttagattcctcctgcgctcgcgtgtggacagcgatcggggagagtgatagttcagaccgtgttcctgtgcccagttggcaaaattccttcggccaagctattgaagcagccttcatgaaactggacacaccagctacttcagatcccctctctgaagagaaaggaggaaagaaaagaaaaaaacagaaacagaagctcctgctcagcattcctcgcaacag

SEQ ID NO: 723894 - DNA, 670 bp, Homo sapiens
attgtcgtgtgccgccacgtgcctgtgtgtatgaaacttgtgtgtgagacagtgagcgccgtctgtgagcagcgttgttaacttccccgtgtctcctctcggcggttagcccacgctcatctttgtcggattccataggattccttcgtcccccggccttcctgtgtcactgcagctatgatgtagccgccgcccgggcacgcagcaattgtgggtgggggataggcagaccacaaaagacaaatatctctggcagtggtggtctcgcgagggaacaacatagttctctcgctcgcgggagatgatcatgagcagaacgcacgcaggtatgggaagatcgcctcgtatcaaggttattgtctggcttgtccgcaccgggtcggcaccgggcttttgcgtactatttctcgcccaccaagccggactgtgagcggcgcgctctctttctattagagaacgagggcggatattgacgcaaaaattaagccccgggggaggagggttcatccgaggatactagctatacctgttgccacaagagtctcgccacagaagttagtgtgtcgtgtgttgatgttctccatccaggatgcatttgtgtcgtgcggatacgaaccaacctccacgagcagtactgcccccaacaaaccctgtgacacacaacaaaaca

SEQ ID NO: 723895 - DNA, 496 bp, Homo sapiens
tggtgccctatccagaagaccatccactgagactatccattcacatgaagcagcagctgcagctttaactatacatctaccaagagggaagggtcaccaacacaagcctcactagctcaacaaaatcatccccaacacccatgaccctaagtatcactagtggcatgccaaataatttctctgacatgcctcaacaaagcacaacccttaactaagggagggaagagcacaaccacaaatgtaaagactccattaccttcggtggcaaaggcttggaaagtcaatgctacatttctcttatggctcaatgtggtggccaggcgggctgactgagggtctgcatttactgaaagtaatgaaagcactcctccctgatgtacggtggggcaacatatgtccatatctagccagtgatacgagctatagtacagtatacaggacggccagactaaacatacctagctctgaagtaaatgcagtatcttgtcttaaataa

SEQ ID NO: 723896 - DNA, 274 bp, Homo sapiens
ttgtaagcacgtgtaatctgagtactttggaaagccagaggtagacagatacttaagcccaggagttccagaccagtctgggtaacaaagccaaaccacttatctacaaaaaaatacaaaaattagctggatgtggtggcagacgcctgtggtcccagctacttgggaggctgaggtcgaaggatcgcttgagtccaggagttctgggctgtagtgcgctatgccggtcgggtgtccgcactaagttcggcatcaatacggtgcgttggcccaa

SEQ ID NO: 723897 - DNA, 563 bp, Homo sapiens
  misc_feature (45)..(45): n is a, c, g, or t
aaatatgcaatacatattgttaactctagttatgctacatgcgtnagaacacgagaaatttatctatctaactagtagctttgtacttgtggaccaatctctgcctatttctctttcctctgtcctccccagagttctcgtacccctattctattctctacttctgtgagaacagcctttcagattccacatgtggatgaaatcgtgagatatttgtcttactatgcatggcctatttcacttaatgtcttccaggtttatccgtgttgccacaaaagacaggattttattctttttgtggctgaatagtattctatcatgtctccataccacattttcttcatccattcgtctttctgtggacatttaggttgatttcatatcttgcgattgtgagtagtgccacaataaacatagttcagatatctttttcacatgctgatttcatttcctttgggtgtatatccagtagtgggattgctagatcatatggtagttctatttttaattttttgagaaacctccatactgttttcagtaatgactgtactaattaacattcc

SEQ ID NO: 723898 - DNA, 822 bp, Homo sapiens
agcggggcggggtcgggttccgggcgcttgtgagaagatggtgctgcggcggctgctggtctggccctgctgctagcaggccgcagctggtggaacgtctgtcacacgtcgcggcctatccgcagcgtgcggcgcagatctacggccttcgcactgctgcgaggcgccatctgcttgtggccaggacgcggacgcgccgcctgcaggacctctcggctgggctccgatgggctccattgtgcgcagccgcgctgagcgatttagcagacgccttcacccagagtagctacgaccgacgaggctccgtaggtccgctcgtgggccaacatcaggtagccagaggggccctggacgcaaacattataatcctgggctgtgcggggaccggaggccgaattagcttttccttccgtggctctacagatgtgcatcaatgtggaggggtccttccgggcactgcgcgcggcttacgaatcccgactgggattgttgggcctagcagacatcgccacgcagtaagagcctatggccagaccgcccgctccgttgaagtcttgtgattggacaagacacagtgtggagaaagacccctaagccttaaccggaggatcgaaggtatgctcgggtccaggacgacgggaccttacgtgatgagccacggaccgaatggccatgagcagcctttgcctctgcaaggtgggactgaaactcttgagagatgctgctcaatctgactggtatacgtgaggacagttaattccagggacgatatggatgaaaagacagccctacagtgtgccaaatcctttgattaaatgtgtg

SEQ ID NO: 723899 - DNA, 306 bp, Homo sapiens
tgctcctttgaaatttgggtaaaaaattgtccacccgtaaaaaaagtcatttttgtattttttttatgttgtgaaaaccaaaattgtaattttataagtctttgattccctaaaattaaataatttaaatgtattttttgtatatttaaaaataaggagtccagagactacgcttaactttttatgcatgcatttgaaagctgtttttccctgataatgtagtaataagttgtattcataaaaaactgatttgtgttgcatttcaaaataaactggggtgtgctctgcctggttttgaaatcccca

SEQ ID NO: 723900 - DNA, 257 bp, Homo sapiens
  misc_feature (102)..(103): n is a, c, g, or t
  misc_feature (177)..(177): n is a, c, g, or t
  misc_feature (193)..(193): n is a, c, g, or t
  misc_feature (196)..(196): n is a, c, g, or t
  misc_feature (215)..(215): n is a, c, g, or t
ccttgagcctaaagggcccttttatgcccccctaaggtgctgttggtttattgctggcaacgtgaattttttaaggggtttaggagggggattttggagganngcctgaccccccccctatcccctgcctccccctttcaaaaaagggtggaaaatgaaatgaaagctatgggactnttggaggaaacccagngtntattttgggttaaaaaagngcttactaaggggttttttaataaaaacaaatgcccccttga

SEQ ID NO: 723901 - DNA, 1215 bp, Homo sapiens
  misc_feature (586)..(586): n is a, c, g, or t
caaagctaagacccccgaaagcagacgagctacctaaggaacagcgtaacaagagcacacccgtctatgtagcaaaatagtgggaagatttataggatagaggcagacaaatcctacgcgagtccatggatgatagctgggttggtcgcgaagaatagaatcgttagtttcaagcttgtaaatgttgcccgagcagaaccgcgtctaatatccgccattgtaaactttaagctggttagtccgaaagaggaactagctcctctgggacaacgtaggagaaaaaccattgctagacgagaggtaaagagaaattgtaacaccctaataggtaggcgctaagaagcagccacgcaaagtgtagagaaagcggttcaagcgtcaacgatccatctagcctagaaaaatcccagaacgatatagacgtggaactccgtcgacaccgcaattggagccaatctagtcaccgctatagaagaagctaagtgttagtataagtagcatgagaagattctcctccgaataagcctgcgtcagattgaaaacgactgaagctgagcaattgaacagcccaatagtctacaatcanacaacaagtcattattacgcctcactgtcaacccaacacaggcatgcgtcataaggccaggttaagactaacagtcacgacaggaactcggcaaatcttacccggcctgtttaccaaaaacatcagctctagcatcaccagtattagagggacggctggccagtgacgcatgttttaacgggcggggtaaccctaacggggcacaggtgcctaatcactcggtgcctaaatagaggaccgtaatgaatgcggtcaccaagggtcaacagagtccaaaattaacacgggacatgacctaccgtgaaaaagaggctgaacacccagtagagcaaacacctaggaggagacataattaagggccacaagccataaaacccgcggggcgtgatagcaaaaccagcgggctaacaaagccgggggaggcccccacggaaacaaacaccagcacgaggagttagaatcaacaagcccggagaaaaagacagcaacaatagcagaggcgaacagcacgaggaacaacgaataaccaggagagccccgaagcagcagacgcagggcagagctaaatgaacagatagaccctatacactccgcgcgcatcacaccacacaagagcatgagcaggacca

SEQ ID NO: 723902 - DNA, 170 bp, Homo sapiens
agactctcgaggatccccctgtttcctttactcacattgaagggacttcggtgtgttttgggagtcttggttgtgaccccaagagcacgtagtgagtgaagtaccctcaagcatagactcgggtactgtgatgatgtctgcagtccaggtttatgattctgctgttatgt

SEQ ID NO: 723903 - DNA, 357 bp, Homo sapiens
  misc_feature (14)..(14): n is a, c, g, or t
  misc_feature (26)..(26): n is a, c, g, or t
  misc_feature (177)..(177): n is a, c, g, or t
taaacccccataangatacttgaccnaatatttgaagcacagcaagctgacaagttcctatacagataggcagtgaaagagttttattttcccagcccaggcgcagtggctcaaatccccagcacttcgggaggctaaggcaggcggatcacttgaggtccggagttcccagacaancctggccaacatgatgaagccctgtctctactaaaaatacaaaaattagccgggcgtgatgcacatgcctttagtcccagctactcgggaggctgaggcatgagaatcatttgaacccgcgaggcagagtctgcagtgagccgagattgcaccactgcactccagcctggagagcagagc

SEQ ID NO: 723904 - DNA, 921 bp, Homo sapiens
cactgtgacacaagccccggacaggcaaagccgatgctggggaaacgtgtgtaagactggaccgagcggataccctagcacacgggcgccacccctcaagtgagaacgcccgggagagcaacttggcgaactagacaaaacaatggggcatctccaacacgatcatgaccgcccccgagggcccccggcgccgcctggaatggtaacaaaaactggaccgggtcctcgcggaatactattccccgcgccgccaaaccgtaaaatggtgaccttctccaggagactgttgtataaagggcgctctaaagaaagtggggaaaccagagataaaaccacacccacgtttccaagaaccacaaagttcttcgtgttttaaaaagaaaccctccaaaaatgttcttccccacgccacagttatggtcaaataaaccacaatcttgggcgcccccaatgaaatggccgtgtctttctcctcgtcattcacataattgcgccccctgaaatattttcctcccctcaaggtccccaaggatcaaacaactcttttgggtttaaaaaacaacactactgttttggactctctaaaaatattatttttcccacaaatgaattggttttcaaacccagacccctatctccacatgaggggaatttattaaaaaattctcctcttgtttccctaactgttatagacaccccaattagtattatgaatcctgagtttttcttactactctcttaatataagcatgccccaagtctcgcccaaaaggaagttcgtttttttgatataggcaccctacttgttaaaaataaccactataaccacaaaacctcttttaacccacgaatcctgggtttttttccatggggggacccaaccaattttttgccaaataaaccctttaaaagccaaaaaaa

SEQ ID NO: 723905 - DNA, 152 bp, Homo sapiens
tctcctgcgtggcgcttggggtggctcgttgtggggctcgtatcgtgtgcaccttgtcgtggcgccttgggtggctcttcgggtggctctttgggtggctctttgggatccgatccgatcccattccatccgttcctcgtctcctccacgtg

SEQ ID NO: 723906 - DNA, 689 bp, Homo sapiens
gcacgaatttacatcaccttggagttattgatttctattttattaaatatttataattgataccatccgtatttattttaatgctcacaattgtcccccaattatggcccaagaaagctccttccaactggttgctatgtccctttgaccatggccccatccattctttaaaccaccattttacctctggcaccataacgtgcgtacatacccccatcttgtatttttcctgcccccatcttttaaatccagcccattctcaaggggttccttcttaatctggctgttgttgtgttggaactcctggtacccatcttagaaccttaaggagaccagcgaacccagcccataagctttccctgatgctgcttagagttaaaccgagccccggtactaagttatgtcatggagaccagtgaactaacctctggactgcttgctacatgagaccattgattttcttattttctatgtagggtggtaccatttcctccttttgagatatttcttccaacatatagcttttccattagtggggattttgtccattataacccaaaaccatgtgacggataccccagatgtttcatgttgtagcttgggtgaattacacctttctgaagcccttacacttcctagtttatttggatttaagttgaccaataaaaattgcatatgtttatggtcta

SEQ ID NO: 723907 - DNA, 222 bp, Homo sapiens
gtgtgtacgagataagtatgctttgtgacatttttatccagctgtggagaatctctgcgctgtcatcaggtacaacaaaagatcaaacccatgtcccgatgttaactttttaactataaaagaatgccatgaaaacccatgatcaacactttaccagctacgagccgtaccacaactggccaccacaaatggccatgtcattactctgtacaccacgggtac

SEQ ID NO: 723908 - DNA, 323 bp, Homo sapiens
ctcacgtctatatagaaaccgtacctatataatgctcagctctatggcataacctccatgaaaccttttctgaccccctttgtaggagaggaatgccgtcttccccacgtcctggtttacacgatggaaaaactttctctaatacacactcctggctcctctgtacttctttaaagagattaatgtataacttatcttttaatcttttttgactggcagatcatgaaaaattgaagtgcaacatggctcagagttctgtgtttctaccctttctgaacaagtgtactccatttcttcagggccaggctctctccagcgtagag

SEQ ID NO: 723909 - DNA, 173 bp, Homo sapiens
  misc_feature (15)..(15): n is a, c, g, or t
  misc_feature (27)..(28): n is a, c, g, or t
  misc_feature (30)..(31): n is a, c, g, or t
  misc_feature (77)..(77): n is a, c, g, or t
  misc_feature (108)..(110): n is a, c, g, or t
  misc_feature (154)..(154): n is a, c, g, or t
  misc_feature (157)..(158): n is a, c, g, or t
  misc_feature (160)..(160): n is a, c, g, or t
attccaaaaaagatntctatgactgtnntnnaatagtatatctaatggctgtggcattgttgatgctcacatatganaaaaaagtgtcctataattctattgaaagtnnntaatatttattgaattattttgttactgtctgtagtgttttgtngannantggaccaaaaaaa

SEQ ID NO: 723910 - DNA, 578 bp, Homo sapiens
ccacctcccgagtgaggactcgacttggcgcagggccgaagcagagacagggtcttgctctgtcacccaggctggagtgcagtggtatgatcaccacagcattgacatcccggcctcaggcgatcctcccacttcagcctcccagtagttgggactacaggcatgcgccgccacacctgttgggagccgaaaaggccaaagggatcatgaccaactcagcgttccgctggagactatattatcaaactgcaaactgtttatcatgaatgcaggatgtgggcacactcacactgccctgccaccaaaaggtttgctgagggcctcactccctggcaccgggctccttgaagttatctattgagaaatctagcacctattgttcgaagaatgcagtcttgcaagcctgctgtcaatcaaactgctgaccgacaaccccccaccgctcttgctatctcttttgcctaataaatacggagggctgtgtaggaggactgtgtaaagctcagggtccttgtccactagaggcaagtgccccctgaccccttcttccaaatatactctcttggctttgcttttta

SEQ ID NO: 723911 - DNA, 195 bp, Homo sapiens
gactagcactcgtatgatagtcaagcatttacagttcaagatgcaacacttggaaatgtgaaaaagtattactctaatcattgtcaatttatagacccctgactttctggaaataaactgtgtaattaccttttactctgatcataatctcccagctgtctaagaggttatttattcctatatttagcagggcct

SEQ ID NO: 723912 - DNA, 595 bp, Homo sapiens
  misc_feature (110)..(110): n is a, c, g, or t
gactgcgttgtagatcgggccggctgcaaagcgtacatctgcagggctgttttcccaggttccctcggcctgtacctcgtcgcactcctcgttgctccaggtccttcagntctccgagtcgtctcaccgtaggctgtgacgagcatgagcgaacaaagaaggatcaggagggttcacggaaaaggaagcgtgacaagtttcccacataagcaaagaagagaaggggaaggctgttacattcaatcttacacccgatgaatggtgggactattaacatcatttgcacgcgaggacaggtgagtgcgaagggcatgacaaacatatgagcagacattcgtgataacttgagatcggggatcatacacgtgtatgacacatgtaagaaatgggaccaaatgttgttgctgcgcatccgaaaagagacttctacgaaagtgcctccgtgagtaatgggcacgactgatggttgaactgaagatcaaagaaatttgaacctcgggagtgggtgtcgagaaacaagaagactagtgccagggtaagccacaaggagctattcagggggaagaatatgccatcacgttccatcgagccatta

SEQ ID NO: 723913 - DNA, 152 bp, Homo sapiens
tctagaggatccctgtccgggttggtgcatccgttagcataagtgtgccttgagcaagggggtctgaggcttttggatggccttggcagtgaaggactccagcttccttgggaagtaaagcagccttgagaagagtttttattaaagagtca

SEQ ID NO: 723914 - DNA, 1482 bp, Homo sapiens
  misc_feature (316)..(316): n is a, c, g, or t
tcataataggaagcaaaaagaaaaaaatgaaaagcaaacatatgcacgcactttgcttgtagacaaatgcaagaatgtaggttgtgctgtgtaggtttaggtgctctattggattggtgagtgaccagaagcgaagtatgaaggtgatgctgccaaaagcgacgaagccgagtttctatgggaaaattcaaggttacagtggagtatttattgttgaagaccagtatgctatggaggtagaaaccaaaccgaacgacctaatacaatacaataaataatacataaaagaattttcgtgccgcccctaatatctccnccaggccaatgaagcacttccaccaagaagtatgcgctgcgcaattaaaggccctgcgaggggtcgtgcctagggtgcaacgggttctctataattcagggtcaagtttggccgaatgagatttatatagtatgtacgcaaggattccacaaatggctggtgtgaccacgcaaagaaaatagcggcgcgttttaatacaaatcggaaaccggtgtaaatcccagcaacaattgtcgtccgagaacactcggccgaccgggcaaactaacttcgtggcatttttacccaaaccgcggagaagggagtgaccccctaccattttgagcctatggggtgcgtcccagggatctaaaaacctagaggatataaaggggcttaggaaagagccgcttcggaggaattatttctccacgacgagagtactttcacaaaccgcactaagagggacgctgagaggggaagacacgtttccaagcacaccggtacagcgaaccgggcggtcgaacaccttgacggggggaacgcactgtgcgaacattcccgtgaaggcaccgacacttaaaaagccgaacattatacttcccggataaagggggaaacggcgaagagggcccccgagaacacacggggaacagggcactctggaccccgaagaggcatcccaacactgtcgtgagtctcaaaggacaaagcacagcgaagaacaaaatagtgaagggccctccggaaaggccccacaagaaggtgtcacacaaagggggggtgtacaacgcgtggcaaaaacaaacactcaacaaccccggggcaacaaagcaggcagcactagaaagcgcgacacagacactagcgagacgaagcgatgataagaacaaaccccagagaggagatgcccacagaaaaaaccctgtaaaagagagcatgcaggagggcgagcgagcaacaacaaagacagccggcacagcaccgacacaccccaacaacacacacaagacgtgagagtcgaacaggagatcgcaccaaaggtgagataaccagagggacagcagcagaccacaacctagcaagcttggcgagccaacacaccactgcaagcaagacagagacgagcaaactaacgcatgcgacgagacaaagacgacagaaccagcttgccggcatgacgacca

SEQ ID NO: 723915 - DNA, 422 bp, Homo sapiens
ctgacgaaccgagctcgtacccccttctacgtctcatcactggagaacagtctcgcacagaaaatatactgaagagctcagtcaaagtcagctgttgaagagaggtagtaatgaaagtaaaaaaaatccaaagcaaaaacattcttgtcacattattcttgctcagtgtctccttctttaaagctctatgcaggtacctgtggcatgcagcacatcctacccgtaatggagcacagtgctacacggtgaggcagtgaccagcagttgaaaccatggacagattaagggaggcagaagaagaggagaatgagtgtgcagaactgcaagaagaatccttgcctgattcaaaaacagctgtgcaagacttcagcacagcagcacttcaggtatttataatctagcatttattacttgtgacaact

SEQ ID NO: 723916 - DNA, 368 bp, Homo sapiens
cacagtggctcacgcctgtaatcccaacacattgagaggccgaggcgggcagatcacgaggtcaggagttcaagaccagcctggccaatatggtgaaacctcatctctactaaaaatacaaaaattagccaggcgtggtggcgctcacctgaatcacttgaatccgggaggcggaggttgcagtgagctgagatcatgccactgaactccagcctgagccacagagggagactctgtctccacaagtacaattactacagagtagcatattaagacttatcgggccaggcgtggtggctcatgcctgttcccagtactttgggaggccgaggcaggtggatcacccgaggtcaggagttcgagaccgc

SEQ ID NO: 723917 - DNA, 219 bp, Homo sapiens
atttctgccttgtgattaaatatgaataccatattgactagaaaattggtttgtctttaaattatggttttgaaaaggtttactctcttttgctattcatagaggttagtaggccataggccctttatctcatttatttattattagttcattaattagggcagagcttgctatattgccagcttgagtgcggtgttcatcttagccactgcaaagtcc

SEQ ID NO: 723918 - DNA, 261 bp, Homo sapiens
tctgcagtgcacgcgagtgtgtgtgatccagaggaggaaggtgacagaggcatgtgttttctgtgatctctgtgtggcttgtggcatcagaaaactgtggctggagtatgaggagaggcgtaccccttgcttctgatgtggcccaggggatgcgtgtgattgagacatatgtgtagacttacagctgcggcaccagaagggcacttatagctgagaaaattgactgctcagagagctgcaacagcttgcccagtatcatac

SEQ ID NO: 723919 - DNA, 700 bp, Homo sapiens
  misc_feature (449)..(449): n is a, c, g, or t
  misc_feature (471)..(471): n is a, c, g, or t
ctacatctggtggacagaccctgtattgtttacgtaaggaaaactctactgtatcaagagaatggaaaacatgagtgtggtctggttttatatcctaagaaacagtgggaggaaggcttatagatagagagtctatggtacaagtaccctgcaaatctaaaacttttcaaattgcatagtttacatgccagcagatgttacttcagggccatgccttttctgggtggagtttccaagggaacacagctttataaacacaagggattaattatagatgctctggggacttgctctaatattctaaactgtttactgaagaggcttcttatatgtcagtctaatgcaggcttctgcaaaagcttattctctgtgtctactgggtaccaatatagtgtgaggagatttagcttaaagttcattacagaaacactgtagacctgtttgccaanaaaaaaggcacacatactttgntcatccttgttgtgccggcgggtgcaatccaatgtagaatagaacaagcttatgcaggcgccaccattgaagatattggccacatcggccatatgaagccaattgaataaatggccgaggtttacatgtgggaattggaaaaccctgggttacccaattaaccgcttgaaaaaatcccttttgacaatgggtatagcggccccccgatcccctttccgtggccaccgtg

SEQ ID NO: 723920 - DNA, 133 bp, Homo sapiens
atttgccacgcgcccccgacgaccggcccgacggtgcatttcccgatttccttttggttccaagtccaatatggcaacctctaaaggatcagctgatttatactctcctaaaggaagacagacccccacgatt

SEQ ID NO: 723921 - DNA, 399 bp, Homo sapiens
  misc_feature (1)..(1): n is a, c, g, or t
nctcagaaaactcaaataacttgccccaagatcagagtcaagtaatcaaaacagcccaggtgggcttgacacgatggctcacaccctgtaatccccagcactttgggaggctgaggcaggcgaatcacttgagccgaagagttcgaaaccagcctgggcaacgtggcaaaatcctgtctctataaaaatcacagaaaattagctgtgtgcctgtgatcccagctacccaaaaggctgaggtgggaggatcactggagcaggggaggttgaagctgcagtgagctgagattttgccactgcaccccagcctgggtgacagagtgagacccagtttgtctcaaaaacgagcaaacaaaaaaagcagaacaacaactccaaaacacacaacaacaaagaaac

SEQ ID NO: 723922 - DNA, 1261 bp, Homo sapiens
atgtgctgtgcgtgaaatgtggtatgctgacttttcatgcatgatgactgtatgaatggctgcctgtgtgaccctgtgatgtgaacctgtgaaataaacatgaatctcatgctgaacatgagagcttgtgcatgtacgcatgttgtgctgtgctgctccacatgtgatgaacctgatgacgtgacgaacgaatgatgctgctggtgttcggaccctttagccttgtgtgatgtgcaaacatcttgtgccagagcaagcacgtgaaatgtccttagatcttttgaacagatgtctaatctttgactacatcttccccaagttgcattccatggtattagagctgcaggtttacaatgcactacgacgcatgcttatcagcccatgttggtattgcaccaaaaaccagatttataattattacttgccaagtcatgcatgcgacatgtcaaagttctgcgaaataacactacgacacgagcgcgcacattgaactccgtccaacaccattttccgtacgtcaccctggcagttcatcgagagctattcgccaggttagctctgaccggcactcatttgtctccttgtctctagttgcggttgattgcactccctcgtcaccttgaccgggtgtcctggatggctacgtgaaccttctggaccatggactcaccatgcctcgcaccttgggctattctcccttggacagctgtgcacctggcatccaactttgcgcccacggtcgcactttgccagattctcctttcacagtgtagccttgggtcttcccggatacacgcgtcccctgcgacaacgctctcgcatcttctttgcttgcgccccggtctggacccgtatccccagcccactttacagattctttctggccgtacgcttccctactctccccactttctcccagtcccgggtctacacgccacagcgttcatcaaacgcccacaagccgtggtcttctccgtaccagaaaccctcggggagcgatctgtgcgacacacttagtccataggtgacaccttcctcttctgagtgaactactcaaactctccaccaacttgttagcctggtgcgccaatacacacgtcgacacccaccgactattaactcattacagacactacaataaagagtgcagcagaccctcacaccgcgagtcagtctccaagactggctacaaacaccagtccacagcctcggtagcaaataactcacctatcatactagcctgtgtgccaccatacactct

SEQ ID NO: 723923 - DNA, 248 bp, Homo sapiens
  misc_feature (73)..(73): n is a, c, g, or t
  misc_feature (116)..(116): n is a, c, g, or t
  misc_feature (141)..(141): n is a, c, g, or t
  misc_feature (150)..(150): n is a, c, g, or t
  misc_feature (163)..(163): n is a, c, g, or t
  misc_feature (186)..(186): n is a, c, g, or t
gaattgaagactctcagggctcacccggaagatctcctgggccagaatctgcattttaacaagatgctcaggntctgtaacccaggctggagtgcagtggtgcgatcccggctcantgcagcctctacctcctgggttcangcgatcctnccacctcagcctnccgagtagctgagatcacagggnttctcaaccgggggtgattttgccccccagagaacatgtggccatgtctggagacaattttg

SEQ ID NO: 723924 - DNA, 159 bp, Homo sapiens
cagcgcagggatgcggcataacgtacagctgctctgtggcttgttgtgaccgccaagaatgagggtggaaactgtgtcatgtagagacaggtctaggaactggccccacagctcgtcttctaggcgccgttgatgccggtaggagccgcatttgaatcc

SEQ ID NO: 723925 - DNA, 648 bp, Homo sapiens
  misc_feature (11)..(11): n is a, c, g, or t
  misc_feature (56)..(56): n is a, c, g, or t
  misc_feature (546)..(546): n is a, c, g, or t
  misc_feature (566)..(566): n is a, c, g, or t
  misc_feature (574)..(574): n is a, c, g, or t
  misc_feature (593)..(593): n is a, c, g, or t
  misc_feature (630)..(630): n is a, c, g, or t
  misc_feature (636)..(636): n is a, c, g, or t
gtacccgaatncagcaaaacattacagaaaaaaaaaaatcaatgaaaccaaaaggnggttctttgaagagacagaaaattaataaatccttgccaaataaatataaggtataaggactgaaaaagaaataaaactcattattcacagatgctatgtccatatatacaggaaagcccaaaagaatctaaagataattagtaaaagtgagtttggcacagttgctgaatatgaggcatatatatatctttctaaaagatatataaaaatgcaaacaatccagaatagccaggacactatctttaaaaagaataaacagagggccaggcgcggtggctcacgcctgtaatcccagcactttgggaggctgaggcgggtggatcaagaggtcaggagatcgagaccatcctggctaagtcggctctaataaaaatacaaaaaattagccaggccgtggtgcaccgcgcctgtaagtcccagctacttcgggaaggcttaagcaggaagaatccttggaacccgggaggcaaaagtttccattgagccganaccgggccattggacttcanccttgggnaccagagccaaactccacnttaaaaaccaaaaccaaaacccccttggaaaaaactngcttangataccttaact

SEQ ID NO: 723926 - DNA, 1802 bp, Homo sapiens
  misc_feature (1244)..(1244): n is a, c, g, or t
ggttgtgtgtctgttgaggtgtgtggtgtttgtgttgtgtgtgtggtggggctgtgtgggtgcgttggtggtggctgggtggttggtggcgttgtggttgttgttggtggttgttgtggtttgtttggctgcgtgtggttgggtgtgtgtgcatgaggggttggtctggtgtggttcgtgtggctggtgtgtgctgcgtgtgtgcttgtgggcgtgttggtgtgtgcgtttggttggttggtgtgtggtctggggggttgggtctcttctgtgccttcttgtgtctgccgtcctttttttccttcgcccgcggttgggtggctcaacgcacgcagctttcgttgttttgggctgcccgaccctgtgtggtgaggcttcttgcgcgagggggtcgtccaccacgacaagggtgtgtttgccgcgcaaagtatgccgcgggctgtggttgtgtatctgggccgccctcctgtgtcttaatgatccccggtgctgcttaaaaagttatgtcgtaagtacgccttttgggggtgtcaccaaatatttctctcggcccatctttgtggtggcgccctccctccctgccctgggaatggtgataaatccgcccttgtgttgttcgtatggtgtgtaaccacctagtggggtgctaataacaccccaccaccaccggggtgtgtgttgttgtcttcagaacacacaattatggctcacggtcttgttatctcttgtggctgagagagtgcctcctctattggggggccactagcggtgtttgccccccgtgttggaagctctgtggtgttgtgcccaggaagcataacagggggtttgcccctccatatggctccttcccctggtggacaaattgttgttctcgctggatctttcttggagagctcaccatgtggtgatggagtaataaagagggagaattttttggcggttgtaaataaaaagagggtggtcttcctcctcgtccgttgtgtctacacccacgggagaatgtgtaatttgtcccaccggagcggtggtttataaaagtttgtctccaaaagggtttgtgtgtggacaatgtttcgcacaccacacgccccccattgaaatagcggccccacatatggggtggcgccgcaaaaggcgcccatatcaaatatagtgcgcgcagaaacaaaatattttggtagagagattgtaggatacggttcgtatgccgcctctgaaagccataaaccgggtgcccctgngcgctatctgtgtggcccaataggcgcgaatagcttggggacaccccaacacacacaaataggtttccccccagagtgtgtgtctgatatatggcgacattgcgccaagaacttgagattggtttggataggccaagacgcatatgtgggtgttgtgcgcccaaagtgagaaagaaaggcacatgaaatattttgttgggagggcccacatggagagcgcctcttgtggttccacaggagatatggccacaagagccacgctccaagataagaatcacccacattgtctgagctcgtggacgcacaactcgagaaaaagtttgaacttgtggtgtttagatcttagaccacccacgagtcacttcctcttctgtaagctccacaggaggaagcaccccctcccacccccactttgcttcgcacgtgaatcctagaattctttgtggcttcttcgctgcacgttccccttgggttcccaaggtttcccttggtccctcccaagcctagctggattgcagagttaagagttatgattatgaaattaaaacgtataataac

SEQ ID NO: 723927 - DNA, 790 bp, Homo sapiens
  misc_feature (18)..(18): n is a, c, g, or t
  misc_feature (75)..(75): n is a, c, g, or t
  misc_feature (90)..(90): n is a, c, g, or t
  misc_feature (92)..(92): n is a, c, g, or t
  misc_feature (98)..(99): n is a, c, g, or t
  misc_feature (127)..(127): n is a, c, g, or t
  misc_feature (151)..(151): n is a, c, g, or t
  misc_feature (162)..(162): n is a, c, g, or t
  misc_feature (178)..(178): n is a, c, g, or t
  misc_feature (186)..(186): n is a, c, g, or t
  misc_feature (238)..(238): n is a, c, g, or t
  misc_feature (244)..(244): n is a, c, g, or t
  misc_feature (296)..(296): n is a, c, g, or t
  misc_feature (301)..(301): n is a, c, g, or t
  misc_feature (327)..(327): n is a, c, g, or t
  misc_feature (331)..(331): n is a, c, g, or t
  misc_feature (334)..(334): n is a, c, g, or t
  misc_feature (398)..(398): n is a, c, g, or t
  misc_feature (400)..(400): n is a, c, g, or t
  misc_feature (415)..(415): n is a, c, g, or t
  misc_feature (421)..(421): n is a, c, g, or t
  misc_feature (431)..(431): n is a, c, g, or t
  misc_feature (434)..(434): n is a, c, g, or t
  misc_feature (436)..(436): n is a, c, g, or t
  misc_feature (447)..(447): n is a, c, g, or t
  misc_feature (451)..(451): n is a, c, g, or t
  misc_feature (572)..(572): n is a, c, g, or t
  misc_feature (606)..(606): n is a, c, g, or t
  misc_feature (687)..(687): n is a, c, g, or t
  misc_feature (723)..(723): n is a, c, g, or t
  misc_feature (745)..(748): n is a, c, g, or t
gggggttttttgatgatnagcgctcaggtgagttgggagaaatctggtggacggttgttgaaggtaattaaaaanaagaaggaagacgangnggggannctgcagtgagggagtaatggggttctanggttctcaccacccttgggcaaanccagtctagtncaacaacactgagganttggtcangtagaaaggggcggatgatacgtgcaggaagccgttgaaagtagaccctgcngggcangggaaggaaaaggtgctcttcgagatgttggtgtccaaggcactgggaatanaagcnttccagccctcgaaatcggtgacgtntgcnacnaagagcccttcgaagagcatcagggatttgttttcgtaggcaatggtgcgatctaagccgccananttggtgaggcccagnacaggnagctcgtacnaananaaggagaagcngtanttccagcagctctggatggtggggaggtagaccagggaccaggacaccctcttgtcctggaagaggaagctggggtgttgtggagtctggaaggactggtaggggtagtatctgtagtcanagggggcttggaagtaatcagaagaatatttgancaaaggcccccgtctggactgatagaccagttgtgacttccgtgcactccaggaactgtctgtcacaaaggcactccaggngggcgaggtgtaaatccggggcttgtaggtatcctnggtgaggttcaggcctttgtannnngccagcaactggaagggcacagtgtggaattccagggcctgc

SEQ ID NO: 723928 - DNA, 256 bp, Homo sapiens
  misc_feature (179)..(179): n is a, c, g, or t
cttatgcattagacaggattcacgtgtccgccctactctattcgcgcctagttccacaatctgcatttctcatacggggctatcacccgctgtggccggactttccattccgttctgatatgcaaactgctaaaacgcgagggctactccgatttcgctcgccactactttcggaatcncggttgatgtcttttcctcgagctagtgagatgttccagtcaccgggttcgacttcattatcctgtgacacgatcat

SEQ ID NO: 723929 - DNA, 834 bp, Homo sapiens
ggtcgtggtctggcggagctgcggtgtggcttgtggcgtctccgtgcgtcgtggtccctcccttcctcttccccatcttcttctctcggtcccgggagcccccgcccggagagagtcgcggtggctgatcgtggtgcttgagtagagccgtggttggtgacagcatgactgagcgaggtgatagaaaacgaggaagcaattctattgccaaggctcgatgacctactggaaacaaatcccacacctagcggtggacaggcgagtgtcttggggggtatggccacatcatccgagcatcgaccagtcaatcagctcccggaagtatctgcagaggtttgttgacgggaaggcccgaacaataacagggaacgatcctgatgaccctgtgactgtggatgctggcattggagacggatcacctaagccggatgcgtcctgccgacatgatacagaggaggctgtgcatatggtcgatcataaacgggtacggaaattccatggcttcaagccgaagaacatatcctggggagatgcgtagggcaaaaagtggacaacacatgcgactgagacacacgtgagcacgaagtttccgtgcggcgtctagcataggcgcacgcgctaccgtcgcctaaactgagcctctatcgtacagtgcaaaaaagaagattgagcacagggagggcgtgattactggcacgacggtgtagcagcagaatgttgccggggaccttgaaaatggtccgcaggatcatctgcagtgaagctcaaactcctgaccgacggagaggcaagaaaactcacccgatagaaatctacaatgtctatagatttgca

SEQ ID NO: 723930 - DNA, 1173 bp, Homo sapiens
ggctcgccgcccgcccgcccgactggagacgcagtcccagctatctgacttcactgtgaaccgatggctaatgcagaacgtgagtgtcccacgtgggggatgtggcttgtggtacctaactgaaggacaactgaacggggagaactcctgaatgacactaacaaccccaatgtgatttttgcacgttacatgctctgttgcaacacacggtgcatatattgaacgcttgtggtctgtgagacacaaccacgtgcacgtcgtatgcaagtagcaaagctacacaacgactaccccacacaattcgaccgacactggtgatagactacacggcacgtataccgacacgcaacctgagggactatgggaaccatcgctctagccccgagtaaacctatgttgtgtcggacgacgcacaaatgccagctcctatcctccatgtgcaacgacagtactgggtacttggtaccccacgtgaccactacagacccggtgacccgtggctaggtccaagcgtacacacaactggaactccacgacacggcactccaagagccccacaaacgccacacatcagagataccaaatcatcggcgccatggcgcaacacggtcccaaccctccctggaaacgggaccccgcggaacaccacgaagacataagtgtacacgcgttcctctggggcgtcttgcagatgaaattaccaattgctgcattccaatgtgcgtcaccaccaccgttggcaacttggcgcacacgttccgctgtgtgaaacgcaacgtcacactactgggaagtcctactatcaacccccacatcagtcgttagttggaccactcgcacacaagactccagcacggggcgttcccgcgatcaaggtcaaacacccataagaggacacacagcgaagaacaagtggccacagcacccaagacgaaaaaacagcaatcgaggggacaagataccactagataccgtgtatggaacacctcacaccacgctgaccgcggcgacggggccacaacatgcgacaaagaccgacttccggccataacgacgagtggccgcaccacagacagcgaaacacgatgcgaccacacggacaacgcaaacaaggacagttggcactgaacgcgataggaccaacaggacacgcagccaccccccaacaagcct

SEQ ID NO: 723931 - DNA, 240 bp, Homo sapiens
acgttgtagactcccgagaaatgccaaatgctcttagtaaacacttgccatctttcagatcgtatgtctctaacagtagatgttgagtgctcatgaaacttctgctggtgctacatacattcgagaagcacgtgtggacaagtatactggcgcatcagatcaacccaaaggaaaccaaggcatagggcagcataggacaaaagcacgaacgaagcaacaagcacgggaaaccttgccatc

SEQ ID NO: 723932 - DNA, 615 bp, Homo sapiens
ttttgcttatttgggttttgttttaagtaaaaaccctttaattgttggaagtcgggcttttctctatttcccaatggagggaaggggggagggtttgcccttcccccatttggggggataaaagacttacatccttttgcctcccttcggggggttggggtttgatctttaccaaggcccgcccccgcaaaggaagggggggggtgtctttttaaagggggtttggtttttttcccccgccgcggtatcactttgcaccgcgcctcctatattttattggggagctgtacaaaaccctgccctaggtgcctttttttttcatgccccataaatttatatagtaactgcccttctgccgaggaggcaccttggggagggtttgccccccccattttttttaagacccccctcttggggggcggtgcttttctccccccaaaaatttttaccattcccaattggggcaggttgttttgtagtaccctagaaaaaaaaaaaaagctcaagacagaggtgaagtgtctagtgagattttaaagtgtgcaccaccaagtattgttaaagcgttccatctccaccagagggtgtgtaccattgtttttaaattataaacaa

SEQ ID NO: 723933 - DNA, 433 bp, Homo sapiens
agcgtgggggctctccagacatcagagcttaaagcccaggactctgcaagcggcatctcattccggggtccaggcctctcccggctctccatcccctccataatcctcatgcgaaagacctgggacatagggtgatactctgtacaatgaatccaaacacgcctttgtagagcatataagcatgggcaaatggtagcagagggtatgatgacacgcccatgatgggtctgagcatagacacaaggcattggttagtgccacatgcccctatagaagacggtatagcaatgatattcatcgtcgagatgcgtccatcactgtggccatgcatcggagccggaccggccaagtgataaataggatagtcatgaagaaaacttccaacaacactggagggccggcgactaggctggaaccagagcacaggtaccaa

SEQ ID NO: 723934 - DNA, 142 bp, Homo sapiens
cagccggtcgacgagcggaccagcaagtccgtcccaccgtgacctcctaagtgtcgggtcacaggcataagccactgcactaagacctgcttactttttttgagacggtgtgtcgctcttgtagcccagggtggagtgcagt

SEQ ID NO: 723935 - DNA, 162 bp, Homo sapiens
caaatagatccctaatgcaaggtacaaaggatctacaaccaaagagttaaaattgcaattgcttattcgcaggaaacactaggtaaaggctcacttatccccaactgtgcaaaaaagcaaggcaacccagttgaatctagcctccaaccaacaccaaggccc

SEQ ID NO: 723936 - DNA, 506 bp, Homo sapiens
ttactgatcgtgcgtatacttgacggcagtcatacggaagcatgagctgttacagatcggtgagtataactagatcacgcgtataatggagctgacgacgcaacgcaggtgcgaccgtgcatgggtctgcaacacccacgctgacttcgccgacaagtgccccaagccagagatgctgaccatccgcttcctgaatgctgagaatgcacagaacatcaaacacaaagtcagaagcaatgcaggacacgcagatcgacagagagagcaaaagcacaggcaggatcaggcaaaacctgatcatgccagaagaagtgcgcggcaaagctagacgctctctcggtgacggaggcgcacaaggaggatgctgaggcgcaagcaatagatcgtcttattttattttctcttcctcatctttcctttccttttatcaaaaaattttaccctgcccacatctttgtcgggttggtctaaattctttcatttagcacacagggacgttatataac

SEQ ID NO: 723937 - DNA, 175 bp, Homo sapiens
tcgccaaatggactcactggcgtgccacagatggctgtagacctgtaagcgactcccccagtccggtttccaaatctgtatcatgagagtaacaatcgtgccatttgccagggcgctgagggtactgagggtggcccgtggcacgtggagagattggatgaaaaacgagggggta

SEQ ID NO: 723938 - DNA, 677 bp, Homo sapiens
  misc_feature (1)..(1): n is a, c, g, or t
ngcccctccaccgattctcccccccgtccaccccggaatccttttttgcgggacaccctcctcttccctcccctcccccctggttttattgcccccctctccaccccccccccctcctccccatgatgactatacgagattttactatctctctgattcctcaagatataaaactattctgacgataacatatttgggagaacttataacataatatattttacgccccccccggtttaggcactctctcggcgaagaaacactttatttaggcgaggatatcgagtcttttacaacgattcttcccttctcttacactcgaggtcttacagcaggcgtccgctcttgtctaacacaaatacggtgttttcggtggctgtgtcccacccgccgcgctcccactgggtttcttgtgagagtcagtaagacgaaactcgtgtttcacgaggttttgtgtacataaaccgacaagcatctgcacccctcttggggcccacacaatgccccccacccttcttaagaagaagtgttttatatccccgcgccatctagaacaccaccattactcttccccgttctaacatagacacaacaacacctggcggctctgatttgtactccccagagagattgcgcccctatctctcatttaacacacctcttgcccccacaagaca

SEQ ID NO: 723939 - DNA, 1459 bp, Homo sapiens
  misc_feature (355)..(355): n is a, c, g, or t
  misc_feature (534)..(534): n is a, c, g, or t
  misc_feature (615)..(615): n is a, c, g, or t
  misc_feature (619)..(619): n is a, c, g, or t
gagagagaactagtctcgagttttttggtttttttttttccctttaaattccttttatttaaagggcggaattttacctcccgggccaataagttttgtgggtttctttcagtttctcttcgtgggaaatactcttttttcttctcgtgggacaaccttccttctttcgtggttttaggaaacaactcgtggtcccttttcccgatagaggattcatctcaatgtggtggcgaggggaagaagcctccagtgttagtggggttataaactccgacccagtgaagcctcgtgtgtgaggtctcgcgggcgggcgccatctcttataggtgtgcctgtgtgtgtctacactgtgggnatatatgtcgcctcacatgtgaaccacagaaaacatatctctcacactactctgtaaaacaccgcttataaaaaggttctcgagcacatatatacactctctctgctgtgaggcgttatattcaaacagcccgtagtgtgtgctcgacgccacaaaaaacaatatctcagagacacacnattctatattgtgggggcgccacacacgcggacaacctgtgtgtgtgtcttccagagcccccacatgtgtgtgctatgtgnggtncccgtggcgcacaacacctgctgtggcacaaaacttctcacacccacaatgtggtgtagtacaccgcgtctcgcagaaaatgtgtggtgtacccacaccacgcgtgggattctctgtggagtacaagcgggtgcacccaattctctttcacaaaaaaaatactttgtgcggagggggctattattcgggtatatttattgcctataaaacctctgtgagtagagggcctcgtgagagccacagtttcaccagcgagaagggtgatgcctcttaaacagaggttgcaccacccggaagagatattgggggaaacctcttcttgtgagattcggggcgatggaaattagcgggggggggggacacccccccggggtcccccgggtggcacattcagggggaacaccccatcttcgcacttcgccgagaagggcggcgcagaagtgtgtctcccaccaagaaaagagggtccctcccccgggttcccccaagaacagttggggttgccccctcggggtctcactgtggccttcgggaaaaagccggaacgaagacgggcatgccgggggcgcacgcgggcgaaagaagagtccccctaaagaagtggaccccggtccacagcgggtgcccctcctcaaaaaggatttcgtgggggagaaacgcgggggggtgagtccccactctggcgggggaactcaacaagggggggaccacggggacccaaaggagggggggcggcagagcagccatttgtagaagacaccccccacgtggtcggggctagagcagaggatgaggaaaccacaagagcacggcagacaacaaagttgggggaccacagaa

SEQ ID NO: 723940 - DNA, 139 bp, Homo sapiens
ggaaagctagaccagagcaggaaggtaaaagttaacaggcaacattttctcttagaaaaggtgataaatcataagtatttggaattagacccttgcacagcactgacctgggaagagtttaactctgatttgtcttaga

SEQ ID NO: 723941 - DNA, 274 bp, Homo sapiens
  misc_feature (182)..(182): n is a, c, g, or t
tagggaattaacagtctttatggggctcaaaccaggagtccgggggtctcttgaggacctctcttgtggtttttgtgctcaatttttctttctctccagcgtttctttcttcggccgtgtttctccgtatacccctcattgagcgtggtttctttcttctccggataggtggatctctgggncttttctctttctcctctctttctctcctctccgagggggtggcgtgtgtgtcactgtggccgtggtgtcacttctctcgagcgccaaacct

SEQ ID NO: 723942 - DNA, 391 bp, Homo sapiens
tcagctcgtaccggataggcgggcagacagaatgagacagtcgccgggcgctgactcatgcccgtaatcacagcaccttgggaggacgaggtgggtggaccacgaggtcaggagttcaagaccagcctggccaacatggcgaaacccagctccactaaaaataaaaaaaattacccagacgtggtggtggcaggcgcctgtggtcccagctactcgggaggccgaagcaggagaaacgcttgaacccgggaggcagaggttgcagtgagtcgagatcgcgccactgcactccagcctgggtgacagagtgagaaagaaagaaaaacagaaacagacagagacaaagagacagagtaggtgatggacagagagagacagagatagaaacaga

SEQ ID NO: 723943 - DNA, 690 bp, Homo sapiens
caacgtgtaaattcgcctcaccgtggactaagagttcctgtgaaagcgggtcgtagtgttacattgcagtataacagtcataccatggatgcatccagattcctgttaaaaaaactcctcagtcctaactgtgcactatattgcatagagcatatggctcagaagaagagtctcatggcaatttcgactgcatgttgatccagcgtttcaatttggtcaaattctcagtgctcagataatgcactagtaaaagcaatggacaccctcattagaccaatcgacatagcagtatggataggcatgtggccacagagacagtagagtctctggcgccactcggtagctgggaatccgatcagcacagcgtcctacggctgggtgtcaggctgttcactagatttctgaagaatcactcgacgcgtgtgtacagaccgtgtgagagagtcagtgtgtgatgcctagtatcattgcatacggccgcaagccagtgactgccgaccagcgtaactctgtcttatgactcaggaaagcagcactagtgagctcacatgtttggctcatagcaaaatggcaggcagatctcactgggtaggtcctggaaagccaaaggtcattcccgctgaagcacagtccagatagagaggcctgtaaaagccgcatgtcgatgtcctcacgtgcctgactcgcttg

SEQ ID NO: 723944 - DNA, 573 bp, Homo sapiens
agacagaggggatccttaaagcaggtggaggctcagcgacttatatgacaagttagcagctttacttctttccccttaacagagtagagtcaaaacaaaaggcgctagttttgtccaactgacaaacataagagatatgctcactagaattctggaaagtactcttactagttcacctttgaatccccagaaaattcaatatggctactactgatgggaattttaatctgagattgccttccaaccaagccttatacattatatccaccaggacacccctatcacctaaaaacaaccatcagacggacagcgatatgaaatgctggctatgaagtgcttcctttagttcttcgctaacctggacttgcattgagtacccgcggcagcctccctttgacatttcatttttacaatacatagggtaaggcctcatgcatgaggtacctgatcaatcctgtgtgaattaaccaatgagctgagaaatgacacagacctctctgacctggaaccatcagacttctgttcatttctcagctttctctcagatgcagtagtttttccatggtccgagcg

SEQ ID NO: 723945 - DNA, 253 bp, Homo sapiens
  misc_feature (163)..(163): n is a, c, g, or t
cgccccaagttttaccgcctcacaaatttaaccctgcccactaaatgcccattgaacctttctcatgctttgagactgattacggaatatagaatagcaaagtcaattgaagtgaagattagagtcttctgacttcatcttactgggttgaaggtaggcctcntttcttgtcctggctatatcgactgaaccttgcgagttgaaaagcttggtggatccctctagcagttcgtacctgccaggacatgcaatc

SEQ ID NO: 723946 - DNA, 119 bp, Homo sapiens
  misc_feature (37)..(37): n is a, c, g, or t
  misc_feature (84)..(84): n is a, c, g, or t
ggaaggcaggcgcacgaggtccagggaggcccttttntgatcatgccccttctctcccaccccatctccccaccaccacctctntggcctccatggtacccccacagggctggcctccc

SEQ ID NO: 723947 - DNA, 906 bp, Homo sapiens
gcctaaggactataccccatccgatatgcaacacacttatactgattgcacgggtcaccactgtaagttggtattactgtgatctctgaccaggtatcagtgcattccctgtcccaattattgagtgagatgtgactataaccgagcaaacaaatgtcaagcgatataagagaataccaataggagcaatggatctagaacatcagcgcacttctcagcattgcgaattccctcaagggttgtattcgtgatgattccgacccagttatcttggatcgagagagatcctaaacgatagccatacacagatcgattttgatcaagcatccagataatcgataaataaactcggcaatgcacacgatcggcgtcataatgcattgatgtctaagacgcgggaagaatccacgtggatggagtattcgaaaatgatcttggatggaagttgatggttgccgacggtcaaggatccacattctctacctatttgtcacctgcaaagcatggtgctggacgaggacatttgaaattgggcacaaagatcatcgacatgagtagtatttgaagataaatagcgaataggtacgtacgtgagtgaacgaaaagctttccaggtatgttatatcgccataaggacgcctgatagagtagccagtctagatacagagacgagcggcaggacccgtggatacaccaccttactgcttcagggctgacgccgtaagagacaaaagctactgactagaatatcccattgtcgcctattcatatttcatcgggcgtaaaatccgcacttttgttcccatgaaacctttgacaggacctaaaccggaatgacctgaaagttctcgcgaataacccgattggtcaccggtgaatatcgcaatacctgaggtcacccaatca

SEQ ID NO: 723948 - DNA, 918 bp, Homo sapiens
ggacgcagagaattggatctggcgcctcctaacgcagcccgcacaggagcgaagggatggagtgcagtggtgcgaccttggctcactgcaacctctgccttgcctccggagttcaagcgatcctcctgcctcggcctcccaagtagctgggattacaggcacccaccgccacacccagagagtgtgacgatccccctgatgcggctgagatgttctgaaatgaagacgttggctctcatccccagcctgaagagagaaaattctgagatggctcccttacagattgagagcagatacggggtttcaccgtgctagccaggatgatctcgatctactgacctcgtgatccgcccgcctcggcctcccaaagtgctgggattataggcgtgagccaccgcgcccggcggctgtggctaattattaggtaactagcgtcgttgggtctccctacctgaaggcctaaaggctggagataagagggctgaaggggagtagagccaggactggtgggcctgggagccaccaatagtcccagaagatcctacggggactttgcttctgctcctgatctctggaatcgattcatcagctgagcttcgactccagcctctggcatccgttctcccaagggcactgggtaggaaacacagccaagaacgattgcaggatggggtccttccaggacactgacgtctccagcttgcgcactgtgagtccctggaacgagttaactccaactcttctggaacttctcctcacttgctactgggaaaataccgggcttcggagatgcaacaggactggggaccttttcaactttttcctgtgtcacttcttcaaagggaagaaggagatggcagggacattgcccaggcacccggggaggacccccctaaaaaaaaaaggggtcaaagttcc

SEQ ID NO: 723949 - DNA, 412 bp, Homo sapiens
ctacttgttggctggagagaagtatatggtaggacaacctctgacttcatatggagaaggcacatcattggatgtggcatccatcttggctatgaagatattagggtctttgctgagcttctcgccaagtactttatacttggactccaggttcttacagtgaccacaccaaggggcataaaattcaaacagcacatcttcatatacattatacactatttcatcaaaattctctgctaccaataccttcacaggcccatcattgctctctgggataggtccagacttccggtatctcttcagattggcatcaaagtaatcatgcaggaacctctaaagagccttcccatcacgcgagaactcctcctgcatgacaaacttatctcctttaacagttctgatagcaacaaca

SEQ ID NO: 723950 - DNA, 603 bp, Homo sapiens
gcatggtttggctccctgcctcgggctctcaccctcctctcctgcagctccagctttgtgctctgcctctgaggagaccatggcccagcatctgagtaccctgctgctcctgctggccaccctagctgtggccctggcctggagccccaaggaggaggataggataatcccgggtggcatctataacgcagacctcaatgatgagtgggtacagcgtgcccttcacttcgccatcagcgagtataacaaggccaccaaagatgactactacagacgtccgctgcgggtactaagagccaggcaacagaccgttgggggggtgaattacttcttcgacgtagaggtgggccgaaccatatgtaccaagtcccagcccaacttggacacctgtgccttccatgaacagccagaactgcagaagaaacagttgtgctctttcgagatctacgaagttccctgggagaacagaaggtccctggtgaaatccaggtgtcaagaatcctagggatctgtgccaggccattcgcaccagccaccacccactcccaccccctgtagtgctcccacccctgggggccaatgggactgtgcaggagacagcgg

SEQ ID NO: 723951 - DNA, 417 bp, Homo sapiens
aataaagtacagagtaataatttaaaaataaaaatgtaaatgcagacccttagaccttttcacccaactactctcagagagtctgattcagtgggtgaacatcacagaatcagctctcaggtgactctgtgacagtggcccaaagaccacagtggcctgtaacagaggaggtgggacatcccagatggtggaacagcctgccctgtgcagtgaggagtgggtgaagccctcatgtgaggacaggttgtctgactagagccacaaactacagtcgtaagaaataaagaaaataggttgggcgcagaggctcacgcctgtaatcccagaaccttgggaggccaaggcaggaggatcacctgagtccaggagttccagaccagcctgggcaacatagtgaggccctgtccgtaccaaaaa

SEQ ID NO: 723952 - DNA, 452 bp, Homo sapiens
ctttaattagatacactaaagtaatcttttcaaacatatgtccagaccatcatatgtgtgtagcttacaatgcagcctgtgagtatgaaagattttatttacccatagagtgtatttaaaggtaaatatagaaagcttcttcccatgacttcttattaaatagaaaactcctatgtttcagtagcactataagtattgtatataaatggtatacatggtgaattcgcaataaatatgagaaaaaaaaaaccttttacctttaacatcatccgtaaacgtacttatcaaaccctaagaacctttgatctgccaaatcaggtaacacatgtgcaggttaactatgtagaataaattatatagatatatatatattagtcgtgttactgcaaattgactgctttattctttctggggtttgggccttatgcctaggcagaagctgcagtggagca

SEQ ID NO: 723953 - DNA, 779 bp, Homo sapiens
  misc_feature (761)..(761): n is a, c, g, or t
gcatggtttggctccctgcctcgggctctcaccctcctctcctgcagctccagctttgtgctctgcctctgaggagaccatggcccagcatctgagtaccctgctgctcctgctggccaccctagctgtggccctggcctggagccccaaggaggaggataggataatcccgggtggcatctataacgcagacctcaatgatgagtgggtacagcgtgcccttcacttcgccatcagcgagtataacaaggccaccaaagatgactactacagacgtccgctgcgggtactaagagccaggcaacagaccgttgggggggtgaattacttcttcgacgtagaggtgggccgaaccatatgtaccaagtcccagcccaacttggacacctgtgccttccatgaacagccagaactgcagaagaaacagttgtgctctttcgagatctacgaagttccctgggagaacagaaggtccctggtgaaatccaggtgtcaagaatcctagggatctgtgccaggccattcgcaccagccaccacccactcccaccccctgtagtgctcccacccctggactggtggcccccaccctgcgggaggcctccccatgtgcactgcgccaagagacagacagagaaggctgcaggagtcctttgttgctcagcagggcgctctgccctccctccttccttcttgcttctcatagccctggtacatggtacacacacccccacctcctgcaattaaacagtagcatcaccnctttttcttgttgctcta

SEQ ID NO: 723954 - DNA, 784 bp, Homo sapiens
gcatggtttggctccctgcctcgggctctcaccctcctctcctgcagctccagctttgtgctctgcctctgaggagaccatggcccagcatctgagtaccctgctgctcctgctggccaccctagctgtggccctggcctggagccccaaggaggaggataggataatcccgggtggcatctataacgcagacctcaatgatgagtgggtacagcgtgcccttcacttcgccatcagcgagtataacaaggccaccaaagatgactactacagacgtccgctgcgggtactaagagccaggcaacagaccgttgggggggtgaattacttcttcgacgtagaggtgggccgaaccatatgtaccaagtcccagcccaacttggacacctgtgccttccatgaacagccagaactgcagaagaaacagttgtgctctttcgagatctacgaagttccctgggagaacagaaggtccctggtgaaatccaggtgtcaagaatcctagggatctgtgccaggccattcgcaccagccaccacccactcccaccccctgtagtgctcccacccctggactggtggcccccaccctgcgggaggcctccccatgtgcactgcgccaagagacagacagagaaggctgcaggagtcctttgttgctcagcagggcgctctgccctccctccttccttcttgcttctcatagccctggtacatggtacacaccctcaccctcggcatactatgctccctttctctcgttcttttttgttttttttttttcc

SEQ ID NO: 723955 - DNA, 357 bp, Homo sapiens
  misc_feature (37)..(38): n is a, c, g, or t
  misc_feature (87)..(87): n is a, c, g, or t
  misc_feature (348)..(348): n is a, c, g, or t
caatacaaggcagtttcatccttttgaggcctaactnngggaggaaatggaaggagtcatgttgccctgtgcagagtcatgcatgtnatctgtgttatgatagcaaatggccagtgttagttactcttggggaaagtagtgggattggatgagggcattgggggaggccagtgtagcttaaaccttttatttagtatgtgtctgtatggttttgaaatttttatattattttttaacttagaaataaatgacttaaatattccctcaaaggcagtcatctgtaggggctttaacaaatatttgtagttttttaaatgtcaaagagatggcttcttactgagatatttncctgtgtgg

SEQ ID NO: 723956 - DNA, 784 bp, Homo sapiens
gcatggtttggctccctgcctcgggctctcaccctcctctcctgcagctccagctttgtgctctgcctctgaggagaccatggcccagcatctgagtaccctgctgctcctgctggccaccctagctgtggccctggcctggagccccaaggaggaggataggataatcccgggtggcatctataacgcagacctcaatgatgagtgggtacagcgtgcccttcacttcgccatcagcgagtataacaaggccaccaaagatgactactacagacgtccgctgcgggtactaagagccaggcaacagaccgttgggggggtgaattacttcttcgacgtagaggtgggccgaaccatatgtaccaagtcccagcccaacttggacacctgtgccttccatgaacagccagaactgcagaagaaacagttgtgctctttcgagatctacgaagttccctgggagaacagaaggtccctggtgaaatccaggtgtcaagaatcctagggatctgtgccaggccattcgcaccagccaccacccactcccaccccctgtagtgctcccacccctggactggtggcccccaccctgcgggaggcctccccatgtgcactgcgccaagagacagacagagaaggctgcaggagtcctttgttgctcagcagggcgctctgccctccctccttccttcttgcttctcatagccctggtacatggtacacaccccccacacctcctgcaattaaacacgtagcaatcgcctcacaaaaacaacaaaaaaag

SEQ ID NO: 723957 - DNA, 346 bp, Homo sapiens
tatctcaaatctctgacccacttttctgcctttctcttccacttttagagattcatttcaagccagacttggtggcttaagactgttataaccgccctttgggaggtcaggtgggcggatcacgaggtcaggagatggagaaccttctggcgaaacccgcgaaaaccccgtctctgctaaaaatacaaaaaaattagccggtagtggtaggggagcgcctgtagtcccagccactcgggaggctgaggcaggagaatggcgtgaacccaggaggcggactttgcagtgagccgagattgtgccgctgcactccagcctgggcgacaaagcgagactccgtgttggg

SEQ ID NO: 723958 - DNA, 174 bp, Homo sapiens
cccggagagcagcctgctgaggcagcagaatctcttgaacccaggaagtggaggttgtggtgagccgagatcgcgccattgccctccagcctgtgcaatgagagcgaaattctgtctcaaaaaaaaaaaggttaaaaaagaggctgaggattaaaacctataaaatggaattgc

SEQ ID NO: 723959 - DNA, 355 bp, Homo sapiens
ggccactgctgggatcagtggtgccatggagcaagcgaggagttgtttggcctgaaagccggaagcgtgcccaaatctttgcatcaccatgtaggcagtcacctcgctcctcagcactcggggcaggacagaagcttgctgtctgctcaccagacatcctgtgctgccctacagacaccttgctcgccagccatccccactcacttctgaccgggagccaattctctggccaaacccaggctctagcaccgtcttggtgctgcttgagaaacatctagtttaagtcaaaatccaatgtctttttaatatatagactatatgtacctatggactagaggtgaatatatatacatca

SEQ ID NO: 723960 - DNA, 727 bp, Homo sapiens
gcatggtttggctccctgcctcgggctctcaccctcctctcctgcagctccagctttgtgctctgcctctgaggagaccatggcccagcatctgagtaccctgctgctcctgctggccaccctagctgtggccctggcctggagccccaaggaggaggataggataatcccgggtggcatctataacgcagacctcaatgatgagtgggtacagcgtgcccttcacttcgccatcagcgagtataacaaggccaccaaagatgactactacagacgtccgctgcgggtactaagaaccatatgtaccaagtcccagcccaacttggacacctgtgccttccatgaacagccagaactgcagaagaaacagttgtgctctttcgagatctacgaagttccctgggagaacagaaggtccctggtgaaatccaggtgtcaagaatcctagggatctgtgccaggccattcgcaccagccaccacccactcccaccccctgtagtgctcccacccctggactggtggcccccaccctgcgggaggcctccccatgtgcactgcgccaagagacagacagagaaggctgcaggagtcctttgttgctcagcagggcgctctgccctccctccttccttcttgcttctcatagccctggtacatggtacacaccccccacacctcctgcaattaaacacgtagcaatcgcctcacaaaaacaacaaaaaaag

SEQ ID NO: 723961 - DNA, 535 bp, Homo sapiens
agtatggtacatagcgtgcatcatgttcgcagcatacgacgtataaaacggtgtgtaatgtatgactaccacagacgtacgctgcggatactataccgcgtatgtactcacagtcctcagtggctaatatggtagcaactgtgccttccatgaacagccagaactgcagaagaaacagttgtgctctttcgagatctacgaagttccctgggagaacagaaggtccctggtgaaatccaggtgtcaagaatcctagggatctgtgccaggccattcgcaccagccaccacccactcccaccccctgtagtgctcccacccctggactggtggcccccaccctgcgggaggcctccccatgtgcactgcgccaagagacagacagagaaggctgcaggagtcctttgttgctcagcagggcgctctgccctccctccttccttcttgcttctcatagccctggtacatggtacacaccccccacacctcctgcaattaaacacgtagcaatcgcctcacaaaaacaacaaaaaaag

SEQ ID NO: 723962 - DNA, 930 bp, Homo sapiens
ccaagtagctgggattgcaggtgagcgccaccatgcctggctaatttttatatttttagtagagatagggtttcaccgtatggctaggctggtctcgatctcctgaccttgtgatccgcttgcctcggcctcccaaagtgctgaagcaatttcttttttttttttttttttggaaacagagtctagctctgtcgcccaggcgggggtgcaggggagtgatctcggctcactggcaacttccgcctcccaggtttaagcgattctccgtgcctcagcctcctgaggtagctgggattacaggcgtatgccaccatgcccagctaattttggtatttttagtagagacggggtttcaccagtgtgggtcaggcgggtctcgaactcctgacctcgtgatccggcccgcctgggcctccgaaagtgcggggattacagggcggtgagccattggcgccgggcctgaagctattctttacaaaagctcttagttcggtgtggttggtgggttttctttggcgacgggactctctgtcgcaaggctggagtgaggggctgatctcaggtcagtgaacctcggggctcgtgggtcaagcgattctcctggttcagcctcccaagtaggtgggattccggggcctgcacccaacacccaagtaatttgggttttcacgcacaacgtggggtcccctttttgggcacggcgggtcccgaacttccaacctgggcgatccgcggctggccccaaggggggggtccacggtaaaaccggccggggcctaaaaattcgggttgttcacaatccgggtaagggcccaaaaaacaatctggttacaaacacggggcaacaggaggggccgacctccaacggacgcacgccagagggattcgcaagcgcatttgggaaagaaccaggtgcatgacacacgcggg

SEQ ID NO: 723963 - DNA, 459 bp, Homo sapiens
atccctgcgagtgatggtaccagtaatggataaatgagcgaatactttctgagtgtacctttgcaagattaatgttcgtgacattgtctattaatgagaaatgggcataataccattcacgctcgaggtacagctgacataacccaagagtactatgatgttgatgaaacagactgtggggcaggcttgtaagtggcatactgtggtccaggtcagctgaaagaagatctgtccagcatcatcctcctatacagaggaggacctccagatgcttgtagaggctcactgctcagatctggttcaggaactacttcaggagttgtgccaccgttccatcgggtgctgcagagactccatcaggtgcttgaacaaagagacgaagtgcttcattccaagctgttcctgaagctgtacctccaggctttggagaaagagggcagcctcttgtcaaagcaggaa

SEQ ID NO: 723964 - DNA, 134 bp, Homo sapiens
aggatctggtcgcgcacgactgcataactgcgctgccgacgcacggcgcgctgtacgcgtgggagctcgcgcgcgggacgacgtgctgcaggtgcgcgtcgacgggcaggtcacgttcaacggcacgtacgaaa

SEQ ID NO: 723965 - DNA, 632 bp, Homo sapiens
actgcagctaaaagatatactttatttagctctcaagagtctaggatccagtattcagcatgcagttgagaggggacaacctttcaggttagagggtacttatgtcagaaaaaaattttagaaaaagtataattccctaaaactacattaagcaacatttaaaaaaaaaaaaaaaaaagggaaaccgggttaataaggccactcaggctggccttaactggacgtagtagagatgtattaaaagggtccgtgaaagctaagaaaagctaaaggactacaataaaaatacaggaagacagcatattatactaagctggaaaacgattaaatgggcgctacttttaggaaaaataccactttggaaacacaataatttttgttttctttctggggagtgggggtctcaacactcgtggtcacccaaggctgggtgtggcccggggtggtggtcccaggttcacgtgggaacctcgtggctcccagggttcaaggcagattctccgtgggctacagcctcctggaggtacgctggggattacagggacggcggccataatggcgtggtaatttggggattttcaagtaggaactgggttttccctttggctcagcggggtctcaattcctgcctg

SEQ ID NO: 723966 - DNA, 406 bp, Homo sapiens
ctcccccccgtcacgttactcaaaattagccaggtgtggtggcgcacacctgtagtcccaactattcagaaggctgaggtagggaggatggcttgaacccagtgaggttgaggctgcagtgagccatgatcatgccgctgcactccagcctgggtgacagagtgagaccttgtctcaccaaaaaaaaaaaaaaaaaaaattagcaatagggtgggctttgagatagatttggatgattacttccgattccctaaagtttatttggtccctgggttcggcgaaatagttttaggcgcaatcttcttgtggagaaattggttgtccctttctggagtctctccattttcccttcatattctgtcatcgtgggaacctaaagcttgggttaaaattgggaatttgatag

SEQ ID NO: 723967 - DNA, 200 bp, Homo sapiens
ccgtgcccttagcacgacatctcttgtcgctgttcattgttcgtgcgcacctttgccgcatgcatgtacttctctcgcaggctctaacacagtgctgccacatgtgcctcgcggatctccttagtgagctccatcttgtagctgagcttctcctccgcctgtccagtgaaactgttattctgctccagaggcttttgcaa

SEQ ID NO: 723968 - DNA, 86 bp, Homo sapiens
gttaaaaaccctttttttaaaggggggaccctctgcccccccaagggaatgggtttgttttatcccaaaaaaaagtttttccaata

SEQ ID NO: 723969 - DNA, 946 bp, Homo sapiens
atcgctgcgctctcctcttcccccggctggtctcctcgctcgccttctggctctgccatgccctgctctgcacgagacacccgcaccatactcacccagctaagcgggcccggcctgcggaggtgggcggcctgcagcctccgcatatagcccggcatctccgagaaacgccacggacacccacaccccggcgggactcacgcagcgacgaccgacgggcctacagcaccagctcacaagatgccctactgacttaccaccaatacacacctactgcgcagcaacacgcctgcacgtgaccaacccggaccactcccagactacgcggcctcccctacacagcgcagctaccactggcaccgagctgcgcatcccaaccggccccagggcccggaggcccggccaacaaccccctcccacacctcggacctggccccggacccctgggccggctccactagccactcacacgcaccccctcagcccgcgccaacaccgaccgggctggcccgccccccggaccaaagcccacgcccacaacaccacacaaggacccgccaagccccacacccccgccgcgacccgcaacccgccacacacccccacacccccaagcaacgagcactcccgcccctcccgccacccccaccacacccaagccccgcaacccaccagcccacccacgcccccccgaccacacgcgacccacccgcaagcccaccggcccccccccctgcccacccgccccctcaccccacccccacgcccacccacacccccaccccccgcgccacgcccacaaccccaccaccccccaccccccacccaccccaccaccccacccggccacccccgccgcccccccccacaccgccaccacaccgcgacgcccgcccaccacccacccccccacccaacccaccccgcaccccacccgcacgccccc

SEQ ID NO: 723970 - DNA, 877 bp, Homo sapiens
  misc_feature (513)..(513): n is a, c, g, or t
tataaaaaaaaaaatctttctttccctttttctaatttattttgtttttggggagggtgggttcccagggggtaaaaaaaaaccccctcattgacatcaaggggtgggtatgagtgcggaaacgctgtagtggggcggttctgtagaagatgggatattcgtcttggagaaccattttgtacaccgccactaccgcgttttcacaaattatacaacctgctggtgtttaggagaagacgcccccagtgtgagaaggagagggggccaggggagaaggaggacaatttgtagaaaatagacatggagtgagatttggtggtggtcatggggcagtgtgtctacacatactaaaaagtttccccctctccgatcgctctgggggaaagaaagtggagtggctctcttgggacgattagtgccgagcacacacacctgtgtgggaatgtggggggccgctacccaaaatttatagtgacggggggacacttgtgtggccccccacagaggggagtnttccgtgaactcttctgcggggaaattcataatcttagttaatttcctcgcggaccaatagttgtgggaaacttattatttgtgtggccaaccccatataagtgtggagcaatggtggtaatagtcagcgggaatatatgcagagtgtattaaaaacagcgggaggaatgagctaaaaaactcgtaactgttgtggataaataaactaagtgcttggggcgcgtatatgtggggtgggacaaaactttcgtgtttgagaccgcttattgtgaacggttgtaacggtggcgggaatttattctgggaccgatttggtacggggagagtggttttgttaaaacccaaatgggtttgaaacacaagg

SEQ ID NO: 723971 - DNA, 115 bp, Homo sapiens
gacccttctgacacctaacagttagaaactgtgtcaaagaacctcagaaggttggtagtgcgtctgtacctatatgagatgaggtcatttgccttcggctaattatcagaatatt

SEQ ID NO: 723972 - DNA, 767 bp, Homo sapiens
gggccccaagaagtcggaccacagggagagcctgaggaactcggcatgcgcccgtgtacaagcgtgcaccctgcgataatcaggcttcaagggagagagtcttcgcccaggactttaccgccagtgcagttccaattcgcgtgcaagtagcgacccgcaccgccgcataccccgttcggtccacccaccagacttaaaggaagaaagcttactctacggcccctctccacttgtatacgcaagagggaactcataggtgaaaccccctgaccctccgccaacgttaaatgctcgagacggaatcttccacaaggcatgggccaatgcacgcaacctgcaaaagcacttggagggcccaggtgtctctccaccagcccccatgcagtagggactggaagatatgtcatcttgctcggttgtgttatcactccgcacccccgtaccccagcccgtcttccggaatttctcaactaaatttcattattgggcaggaaaggaggtcatgggttcatcttcatttttgttttttcgtgtttttaattaaaagaaaggttacctcagttttcactccttagacatggatgtagctacctttttttgtatgtcttttttttttttaagcaatcgtgttgaattaggagtatacttggtgtggaaagagtatgaatttgccatgtgatttgcaaatggggggaagctactgtgagcgtgtgtttttttaatttacactatagagtgatttttttttcacccaacgtcaagtttta

SEQ ID NO: 723973 - DNA, 1141 bp, Homo sapiens
  misc_feature (213)..(213): n is a, c, g, or t
  misc_feature (218)..(218): n is a, c, g, or t
gcagaggcggcagctgcggccgcggcctccttgcccccatttgcgtgccggcgcctgcgcgcggctgcttctgaccactggcctgctgatgctggctggcccactgtggctggctgcacacctgactgtgaatgcccttcaatgtgccctgctgctgctgagctgctgacttcaactgctgccctgctgcttgctggatgctgtgcacaatgnctgancccactgaaccttgcatgtggccctgtgtgctgctgcactcccatgctgcaatgcctgtgtgcctgctggtggccatgtgctgcatgtggccctgatgactggctggtgctgaatggcacctgcttgcggatgtgctggtgctgatctgcctccttctttgtgcttctgtgaccttgcatgtgctttgctttccttgtgtgccccctgctgtgggtgtgctgtgctgttgcccaaatgcatctgtgtggtgtgctttgcttcccctgatggtgtgctggttggtggatggctgccttgcaccttgctggctgtgcctgcctgatgcccctctggacagacagcccttgtaccaggtgctgacttgctggtgagccttctttgctgtcaggcctgctggcccctggccatgtcactctgtgaggcccactctgggccctggccacctacggcttgcggccactgcggggctctgtacgcggtgctggcctgccttggaggagcaccggctgggtcagccacgggtgcagggcgggggggacaaggaaaggagagagaggacaggacggcccggggaacaagggcaaccaggaagatccggggaaacccccggtctgggatccagagcagagagaagaagatcttcgagaatgatcaaagtagcgagaaaggttgtatccgataagcggaataacatggagtgagaagttgattggtgtaaatttggggaagaaacgcgatccctgtttgatataaattttgggacaagttatatcaggccaggagtggtaacgtaataggggaaacaggatggtattgagacattgatgtggcctttccattgcagacaattggagagggaatgaaaagaggtagagaagctacaaggagcatgaagtatgcatgggaatgagtgtgagcagcg

SEQ ID NO: 723974 - DNA, 132 bp, Homo sapiens
tagagagtctgacttgagtaagttttgggccctggagcatacgtcctgtggacaggacgttggtgcgtgtgagatggccacctgtgacggcataatgctgagatgtatgagatggccagatgtagaggcaag

SEQ ID NO: 723975 - DNA, 150 bp, Homo sapiens
gcggtccgagaattaagagtgtgatctaccatgcattgtctcagaaagggggcgaatgactccgatgtcccagcccttcaggagcacagcgggccgaggccttcgtggagggcctttcctgtaggcgcagcacggccccgtatggacccc

SEQ ID NO: 723976 - DNA, 294 bp, Homo sapiens
ccctttaaaaccccccctttttttccccccctttttttttaaaaaagggggggggggggtttccccccaggccccttttccaaaatttttccccgggtttttgcgggaccccccccccaaaaaccccctttttaaaaggggggtttttttttttttaaagggggccccccccaggccggggcccagtttttttgggttttttttttggccccggcccccggtaaaggccccttaatttttttttggggggggcgggggtttttttttttggggggggggacttttttcccccca

SEQ ID NO: 723977 - DNA, 763 bp, Homo sapiens
ggagagaactagtctcgagttttttatttacatttttactgtgatggggcccaagtttaccaactaaattagcaggaggaccacgctgcccttcttgggggcacaacaatgggtggggatgagcagtttcccctcgtttccaattgaaaaaactagggaaatggtcaggcaatgaagtttcccaaggtgggtgtattagctccattttcagtgcgtgctgataaagacattacccaagacgtgggcaagaaacaagtgtttagtgggacttacagtcccacagtggctggggaggcctcagcaactcagtgggtgggtaggcgaaagacacttcttacatgggtggtggccagagaaaatgaggacagaggcaaaatgggaaattcctgaaaaacctatcagatctcataagacttatacactatcatgagaaatagcacaaggaaaagaccggcccccatgattcaattatctccccgtgggtccttctcacaacacatggaactcctcaggagcttacacatttgcagttgacatggggttggggacacagccaaaccatatctatactgcatactggccctaccaaatctcgatattctacacattttgaaaagcaattcatgcctttcccaaacagtcccccaaagtctacagctcatgtcagataaaccacgaaatcacaagccaaaggtctaatctgaagaacaggcaagtcccttcagtgtatgagcctgtaaaatgtaaaagacagctaggtcta

SEQ ID NO: 723978 - DNA, 862 bp, Homo sapiens
cggagcaggggtgtggattataacggctcccccgtgcgtctagttagtaagagaggcgcgacgcaacagcggggcttgcgcttcggtttaaacccacccctgttacgctacgcggtataaaagcggccagtgggtgcttattgtgtcgaagacaaacacccgcccctctttgttagacagaggagagtataagacacagagagggtatctcgcccctaccaagtgaggggggtgagggacgatcagatataattgctggcgcgcgacgaccgacgccctattgctgctcggatatgagaaaatagtagctcatcctctgtgtggaccgccccagcagcagtgattattgtgtcaataaaaagacgtctgtccccacaacgaacaaacttccgtgcacttgccaggttggtcagaggaaaccaacagagttgtgataccgcccactccacccactgagggagctcactcctggggtgtcaccccacgccccgccagataaccaacagcacagactctctgggggagtgagtcccacatcatcgcgcggcgccgcgacacagcttcacttgtgcggttgcacgccgtgcggtgcgtccaacccacttcacgctgtggaaaaacagaggtgtaaaacccccctcgtgtgttacggtagccctacacagtacgcccacgaaaattacagttgaggcctatgtgcgcggtgagggcaccccacgtagtatactattccccgctgcttgctggggggagctgtatggcaccgcggtagatgagtgttggtgcaccccacggtaacgcggggttagtccccccccccccccccgggggccaggggtgcgggaatccccttccaaaaaac

SEQ ID NO: 723979 - DNA, 865 bp, Homo sapiens
tgtcgatcattggtctgggtctcgtgcccggattgaacatgacgattgtcgtagtagtacgtaccgaatcctggtcgtcactagtgtgagtgtcctgacctgtagaaatacgctgcggcggcaacgcgtccggtacctgatctgtagtgtccatgatgggcgattctgggccgacacattaacctgggatctttgcgtcgatcatggacgtatcagatacggtagttcctctggcactgctccacaatttaactgctccgaggccagtgctaagattgctaagataagttcgagacatttgtacaccgtactattaatggggcgtacaaaatacgagaagcactaatcgtgtgcgattgtcgctaactcgatcgcgtagactgcactagcgatttgacgtgtcgagcgaggcgggagaaattgttttgagcgatagcatataggtgcgatccgtagatccgctgtcgcggaattgtgcatcccttaaagtttgttgatccctaagaagaagagttaggtcacagctaaggcgatcgtttgagcctagagcgctgctactctgacacttactaactgactgatgtaactcgctagaaagtctatgctcaagccaatgcccgtacgaatgtgggaattggtcccccagcgttataacgactccgatcattcgcggatatggcgcctgtttaaattaacagccccataacgaatgatgtaagtggcggtggggcttcagcgtgcacaggaactttaaactacttgaacccttcttttgttcgcagaacgatttaagcataaagcgaagaatcactccggatgcaccatatgggagttggccagttattgaatggggttcatagggctg

SEQ ID NO: 723980 - DNA, 239 bp, Homo sapiens
  misc_feature (1)..(1): n is a, c, g, or t
ntcgggccggttcctgcccatgtggtgaaaccccatctctactaaaatacaaaattagccgggcatggtggcatatgcttgtaatcccagctacccgggaggctgaggcaggagaatcgcttgaacccgggaggtggaggttacagtgcgtcgagattgcgccactgcactccagcctgagtgacagagcgagactccgtcccaaaaaaaaaagagatttttaatgttcataggtgtct

SEQ ID NO: 723981 - DNA, 251 bp, Homo sapiens
aattatagtatatgtagtatacataacaatgcataaaaaaatgctagtgctacggtgtctaagccaattggtagccagtagcccatatgtggtaatttaaatttaaagtaatcaaaagcaaataaatgaaaaatcaattcctcgattgccctatccacatttcatgtcctctacagccacatgtggctagtagctaccctgtgggacaacaaagatacagaacatttccatcatcacagaaaatcttcctg

SEQ ID NO: 723982 - DNA, 1452 bp, Homo sapiens
  misc_feature (1197)..(1197): n is a, c, g, or t
gcttaccgggagactggagtcgaaggccgctgaggtatttgttctacacgccagacgtgtttagcaaagggtagttatctcggaagggcgaggagtaccttatagcaaccccagtgagtgacggtgaatggagcttggagcgtgggtcatcctatgaatggcagcgtcgaagcaaattagtgaagactatccagtagaacatccacgagtcattcgtcccgagttactgtaaatagttcctatcggatgtctgatggcatgaaggatgcatgaaagaaccgatgcatgatcatgtatatctagcaaatgcagttgaattgccaccaagtttgggcatcccacttcgacaattagagaccatgatgatggaatttctggatttatcgtgacatttaccacccatttcaacatgttacccacttagttcttcagtggggtctcaatcttagtgcataacctctgaagtgtaagctttcaatttcccttaaaggcgtaaactattcactaagataaacaaaccaagtgatacttagggtacacatgaagttccacggaggtaagtttgttcattgtatgcccaggaagttcgctcgagccactacttaaacctagcacacttgatgacgacctaaccatgggccttggtgcgctagagaccctttgagacatccaaggaacgcggttgggcacagcatataccaaaacggcagtgtcgtggttgcccccaacactccattatgtcgccccttccttgggggcagtagaagccccaaaacaaaaatttctggcaagaaattataccttggccacgttccatagataaaaggtttatggccccatattttgcgagacaggcgcagcttcccacccgggttccaaccaaaggggttttacagcacctatacaattgcggagttgagcaccagcgaaacaagtttggtccaatcaaatttattttgtcacatacacaacatcggttaacccaatttccgtttccggccaatccagagttccctccacacacccgctgcgcttaaaaaaagtttacactatggctctaggttggagtcacaacgcgaggtctggaccactgtgttctttttcacagcaaagtgcggttggggtcgacctcccttgcgaaaattttcgcacaagctccactcttgtctgcaagaagttaatccctcatgccagagntcatcaagcactcactcgcgctttcaacacgagggccactcatgagacatattgagcctcttttattcacccttcccatcaccaaaaagagggaactttcccatttgtaatcaccctctcatcaaatttcggccatgttcagagaccaaccttgggacagtcacattttctcaaaaccccactctgggtctcggcaactaacactttctcgcaatctagtctaattctctcatctacactctcgttatccgcgac

SEQ ID NO: 723983 - DNA, 284 bp, Homo sapiens
tgctgtgtatcatttactgaagacctggactagtgcccactgcaaacctcaaccacagtgtgggcaagggtggatcatgtggccttccgctcatgaacagttacaacctgaacgatatggcctcagggctgggcagtgagacgcggctggaccgcaggataggagatgcacagagcgacacagtgctgctacactcctcggccacactaatgaccaatgatgataacgaggaatccgaatgcacgcacgtacctgccgactacctgcatgctgacgaggaacgt

SEQ ID NO: 723984 - DNA, 275 bp, Homo sapiens
  misc_feature (102)..(102): n is a, c, g, or t
  misc_feature (118)..(118): n is a, c, g, or t
agaaaaaagggcttcccagggctggctggagacccatggtgagttcggagagaagggagaccccagggattccctgggaatcccaggaaaaagttcgccccntaagcatgggccctanaatgtgtgccatgggccccctggagcccaggccccaaaggtgaatcgggagactacaaggccacccagaaaatcgccttctctgccacaagaaccatcaacgtccccctgcgccgggaccagaccatccgcttcgaccacgtgatcaccaacatgaa

SEQ ID NO: 723985 - DNA, 1279 bp, Homo sapiens
  misc_feature (546)..(546): n is a, c, g, or t
  misc_feature (642)..(642): n is a, c, g, or t
  misc_feature (865)..(865): n is a, c, g, or t
  misc_feature (937)..(937): n is a, c, g, or t
ggcagcggaggttttcctggtttcggaccccagcggtccggactgtgtgaatagtcctctcctgccatggcggatccattcgatagttgagcctacatgtcgttcagccgagtagtagtacatggtacacgggggcatataaccgccagtcgcccacacatctcgactggcctaaggaccagcaccgaatgtcgcagcctcacctaaagtcgcgttgcgaaccagggctcggcgtgtcgagctaggcctacgaccaggtttgcactggacgttttctccgaagaggggcctctttccccactgtggccaacatagcataggtaggctagagccctggtgctccccgggggggtccccctttgccggatgacattggagggcttcgggaccttaaccccggtgtggccattttggagaccccaactccttgcgccaaaacttcgcccaaacagacgacctctttgggaacaatggggcaattgcccctcagagatgacttggagcgagcccggacgaagatgctgggcgaaaattacaggggttccngaatggcaaagcgtggggagaagtttctatatcccgaaaaaagtgtgttcccccttttgaggtatgcattgcccccaacaaagggggggcacaccntttttttcgacgacgtagaacagcgcgcggccgctatatgtccttgtgtgaaaacgcattcttgtgtaccgcccgattttaacagccccgttttatcccggcccgtggccacaaacggcttctgggtgcccccaaacttgttccgccccgggcatcggctcccccccatcttcggcgccgaaaccacacttcttttggactctctccgagaagaagcgcccgncacagggcgccacacggcacggcagcacaaccgttacaccagttttttgactacggagacgcgctcgggtanctattatccccacgcactaggacaagagacacccccgcggggagtgaaaaagtcgcgcgtgcaataacgacaatcgcgtgtcgaaaaaaacacccctctgcggggcgcaaaaatcgcggcaccgggcctcgaaaaacattatttcaaacagccgcggaattttatcgccgcgacaaacaaagcaagcagtaccccccccgaggggcgtacatttttttctcccacgccccacttatatcaagcggccgaggacacagaggtagtattattaccagagcgagacgccgccccaggcaatatctgacgcagaagcaggggggattatcacgcagcgcgcttttt

SEQ ID NO: 723986 - DNA, 168 bp, Homo sapiens
  misc_feature (26)..(26): n is a, c, g, or t
gacgtgcacttggtgctgcgcccagngaggaagccgtaccaccagtcagcgcaggccctggtgaaaagccttcccgctgcctttgggaggcgtgctgccttgaaaaggagcaaggagcactgaaggtctggtggcattctgtaggcctggagttgaatgggggaatgc

SEQ ID NO: 723987 - DNA, 639 bp, Homo sapiens
cttgttcttttctaaccccaactcttttaccagatcaaaccaacctcccaaccccaccctcactccacaaccaccaccacccatccccctaaaccacctcacccactcctatatccacccccccccccacaccacacctccaccaacaccatcccccaacaccccaccctacaacactccaaccccccctcctcaaaccacacacaacaaatactcccaatcacccccctattccacccccctccacccccacacacacacacaaatcaacacctccccaacctctcccctcacctacccccaccacacaaccacaacctcactatacttccccacccccaactccccacatccctccaaccatactcaccaccacccacctcacccaaccctcctatcccccctcccaccaccaccccactacacccgcctcaccctctctccctcccccaaaccaacgcctactcctcacacctccacccaccaacacccaacaccaccccctcaaaaaacaaaacccccaccccaacatccccacttacacccaacatacacgcacccaccaacaccatcctcctataccaaacaaacacaacaaacaccccaccaccaccaccaaccccatatacaaacgaaccc

SEQ ID NO: 723988 - DNA, 313 bp, Homo sapiens
  misc_feature (222)..(222): n is a, c, g, or t
  misc_feature (303)..(303): n is a, c, g, or t
gtattcttctgctcctttaaataatatccccttactcatctgttcttcttttctttcccttctacttcaaggtctttattttcttattatctttctgatatatttatttacagaagtagagaagtataatctaaattcatgtttgtagcacttacagcatcatatacgtacaaattatttggtctttatagctactaccaggaaaacatctgcagacagaanaatttttcactccctatggactaggtttctcacctgtaataacagaaaatttctctaatgtccaaaccaaattccttcttngaagaacact

SEQ ID NO: 723989 - DNA, 395 bp, Homo sapiens
aaaaaaaaaaaaaaaaccccccccttaaatagccccctggggggcccatagagcggatgctttcatgcccccttttttgccctttttggcccggagctcctttgagtttggggtttctaggatcaggggccgtctttggcttacccaaaaattttaatctcttttaattctcccccgctttaaaaaaaagtttttggggggtgggatctttatttattccctagtttgcagacctgtttgaataaaggaaccaaggattttttcaatgtttctgccctgaaaaacgggtttgttttagtggggtagattttttacccaaatattccccagtttttgttgcccctgttgtttgggcctggctcctaaattttttgtaataaaaagcctttgtctta

SEQ ID NO: 723990 - DNA, 210 bp, Homo sapiens
tgcttctgcccactttcaggagaaccatgatgtgcgccccagaaaaccttttttttttaaaagggaggtggggttagaagtaaaaggttgatcatgggagggagttgaggggttaatatatctacatacatacacatttttgtttttttttaaataaacaggaaatgattttatgcctccatcccacccatgagggttgcaggctttcca

SEQ ID NO: 723991 - DNA, 446 bp, Homo sapiens
  misc_feature (28)..(28): n is a, c, g, or t
  misc_feature (84)..(84): n is a, c, g, or t
  misc_feature (103)..(103): n is a, c, g, or t
  misc_feature (408)..(408): n is a, c, g, or t
  misc_feature (430)..(430): n is a, c, g, or t
gatttcttgacctcgtgatccacctgcnttggcctcccaaagtgctgggattacaggcgtgagcactgtgcccggccatatgtntttaataacccagtttgtntcttcttgccttcaggacatcaaacggtcatgctactggaagctcggaccatggccccttctgctgggcacccttagataggcctctgagggagatctgattgccattttcccgaaacagtgccccctatcagcaggaagcagttaagatctgtctttgtccctattcttatcctagtggcagttagatagacttctttagagcgaggaatgagccagatgggaagggttccctggtaaaactccaactggcctgtgcactgctctggggtggagccacagaagtttcgttcctcagttttgcanctgggaggagcctgggccttcnttttctcggggaggaa

SEQ ID NO: 723992 - DNA, 220 bp, Homo sapiens
tcggtaccggcgcacgccagtgtcgtgcagaagcgcgcgatgcagcaggtgtcgacgtcagcgtggccaaggtgcgcctgttgtcgcagatgctcgatgccaacaaccagatgatggtggtgcgccgcgagatgctgatccgccaaggtgacgaccgcagcagcgacgagaagcgcattgccgatctggtcaagcgctacgaggccagctggtccgccta

SEQ ID NO: 723993 - DNA, 533 bp, Homo sapiens
gtgccagcaggttactgaagtgtcaagatcttcacaaactttctgatatattgatcctccaaattctgtcccagtcattgccatgagtgtgtagctggaattccccagtcctgtagcccagtgcaaagttataccttgtcaggttagatttggcactgtcaaaggtcatctggtgtgcagcacgccaggcctcataaccaaagacaggtgaaccatggcttgcaggtccagcaaaatcaaagtcaagatcacaaccaaggttaatacactccctcttgtacgaggacttgatttgaccactttactttcctgtgttgggtgagaaggtagtatcaaatgtcagtgtcaaaccttgacaaatctggtctgcaattgcgatgtctgtacccagagtgtaatcagtgtaccagtttactgtgaaagtcagaccatactcaaaccacttgtattgggtctccacggtcccagtacctttaccagtgtcggtattagatgaaccggacgttgaaaattccacgccactgcagactatt

SEQ ID NO: 723994 - DNA, 657 bp, Homo sapiens
  misc_feature (386)..(386): n is a, c, g, or t
gtcccgtgcgggcctccgtcctcgggcgagcagggcccttcgctccgggaggggaggtgacgcggcgcgggctggacggccggagacgcggggtcagggcgcggacgaggggagcgcagggtcggaggggctcccggacgctgcccgcccagcgtcggctctcgttggcccctggctgcgcgcagcgggcccgactctcagggccctgcggtgcccgctgccagcgtgagggctccggtcacgcggcgcgcgagacgaacgagcgagatgcttcccgaagcgcggggcccagtgcaggggctcagccggggctcctcccaaagctcacctggagcccagcacgactgcgttctggaaacgctgtgtttgacagcaggggcaggatngggggctgtgtagacgctggccacgtggcaattgtaggagaaccatgggatcgataaatgttcactgttgtccctgaagcgcaaaactgcagggctctggaaagtccgtgtgtgtgtttttgttgttgtttttgtttgttcgagactccatctcaaaaaaaaaagaatcagtaaaagatataaaggagaaaaggacagaaccacaaataggcaacaaatatgttaaaaaaaagtttagcttcacttaaaatgaaataaatgtgattaaaat

SEQ ID NO: 723995 - DNA, 946 bp, Homo sapiens
cgaggagggaagaacaggacctgtgggtgcagaggcccggcactgtagagaacccagatagacagccgtgtggtggaacttggtcaaactccacgccccgcctgggagtgtttgtcaggttgctgtgtgatgtaaggataggaggtgcccagtgctccgcatcaatggaatgtgcttggatctttggccccacctacagagagggctcagtgtgacttgtgacctggtgggcatttgttgttgctctgtgtgcctgaccctgggacctggtggccagacagcttgtgtctcttgtctgggagattatgctgtccccaaggagcctgtaacacatgttgtggcttgttgtggtatggttggcttggctttatccttctatggacttcactctctcacttgccccaaccttgcaatagctgcacacaacaacaccttgaatcctgcaccctctgtgagggtgcatctgtatcttccctgttgcaacaaattgcaccatgtaccaggatggacaaacacccgtcaaggacattatgttgcacctaaggtattccctttctcacgcgaggagtgagacctgtcactattgatgtttgacctctgaacgttgtgatggcccgagccggcatgcgtgagacccctttcaggacatacccttgctgtgatggacctttgatgtccgcgtatatactgatcaacagtaggactgcagagtggggtcctgagtgcagaaaacacgtgttctgacattcagaactttaatttaccacaagtatcttacggggttttgttagtggatacactcaaaatccggacggttgtaagatattgaagaagggacagatccagggtttattcgaaatggttgaatgggtagattatgaagtttggtatatgagttttaattaaaattatttgttggtggaacagaacagagacagaatgagtg

SEQ ID NO: 723996 - DNA, 209 bp, Homo sapiens
gataatgaaagactcagagtatgtagggatggggaggactaatcccaagtcttataactccaatacctgtgtagtcccatagtatcttaattaaaggaagccaggattctgggcaggaggaggatgagagaaccagcgagacagtcatcaaaagctgcctgacaccatttgtcactgatcaggggtcagatgtctgactcagctctctg

SEQ ID NO: 723997 - DNA, 482 bp, Homo sapiens
ggagggtggccgggagttactgttatccttgtccttgttggacacttgctgatactgggagttgcctgggcggcctgatcgactcaggttacctttcagagtgaggaggacccccagtaagatagaggactttttggttttacggggaattttttaggccaaaatatttcaaaccaaatccatattagccttagaacacgtaaacattatagagaaggttatgatagtagaatagcaaaagcaaggccagacattaataccttgagtgaaggtatataaagaggctatacaggggttagaattgggggacattgattaaaaggcatacccaaaaccagaaagaaacagaagagaagggcatagaagagataaacccttgggaactagacattagcaagaagtacaaataataccagaaagaattggaaacaaattggagtaacccgaagcttccaaaatttacaggtaaattcaaaaggtcc

SEQ ID NO: 723998 - DNA, 850 bp, Homo sapiens
  misc_feature (12)..(12): n is a, c, g, or t
  misc_feature (33)..(33): n is a, c, g, or t
  misc_feature (44)..(44): n is a, c, g, or t
  misc_feature (56)..(56): n is a, c, g, or t
  misc_feature (60)..(60): n is a, c, g, or t
  misc_feature (65)..(66): n is a, c, g, or t
  misc_feature (72)..(72): n is a, c, g, or t
  misc_feature (76)..(76): n is a, c, g, or t
  misc_feature (89)..(89): n is a, c, g, or t
  misc_feature (97)..(97): n is a, c, g, or t
  misc_feature (129)..(130): n is a, c, g, or t
  misc_feature (133)..(133): n is a, c, g, or t
  misc_feature (142)..(142): n is a, c, g, or t
  misc_feature (158)..(158): n is a, c, g, or t
  misc_feature (165)..(165): n is a, c, g, or t
  misc_feature (185)..(185): n is a, c, g, or t
  misc_feature (193)..(193): n is a, c, g, or t
  misc_feature (195)..(196): n is a, c, g, or t
  misc_feature (209)..(210): n is a, c, g, or t
  misc_feature (214)..(214): n is a, c, g, or t
  misc_feature (221)..(221): n is a, c, g, or t
  misc_feature (237)..(237): n is a, c, g, or t
  misc_feature (260)..(260): n is a, c, g, or t
  misc_feature (267)..(267): n is a, c, g, or t
  misc_feature (279)..(279): n is a, c, g, or t
  misc_feature (307)..(307): n is a, c, g, or t
  misc_feature (316)..(316): n is a, c, g, or t
  misc_feature (329)..(329): n is a, c, g, or t
  misc_feature (332)..(332): n is a, c, g, or t
  misc_feature (334)..(334): n is a, c, g, or t
  misc_feature (356)..(356): n is a, c, g, or t
  misc_feature (361)..(361): n is a, c, g, or t
  misc_feature (374)..(374): n is a, c, g, or t
  misc_feature (379)..(379): n is a, c, g, or t
  misc_feature (387)..(387): n is a, c, g, or t
  misc_feature (401)..(401): n is a, c, g, or t
  misc_feature (443)..(443): n is a, c, g, or t
  misc_feature (445)..(445): n is a, c, g, or t
  misc_feature (455)..(455): n is a, c, g, or t
  misc_feature (459)..(459): n is a, c, g, or t
  misc_feature (461)..(461): n is a, c, g, or t
  misc_feature (500)..(500): n is a, c, g, or t
  misc_feature (562)..(562): n is a, c, g, or t
  misc_feature (595)..(595): n is a, c, g, or t
  misc_feature (603)..(603): n is a, c, g, or t
  misc_feature (612)..(612): n is a, c, g, or t
  misc_feature (684)..(684): n is a, c, g, or t
  misc_feature (696)..(696): n is a, c, g, or t
  misc_feature (706)..(706): n is a, c, g, or t
  misc_feature (730)..(730): n is a, c, g, or t
  misc_feature (753)..(753): n is a, c, g, or t
  misc_feature (824)..(824): n is a, c, g, or t
tctcatttaacntttttaaagggtctcaaaaanctgtgacaaanttttggtcaagnagantccannaaaaantacngattttaaaaacnaaaaactnaaaactgccacacgcaaaaaagaaaaccaaannggnccacaaaanattcccctttccttcngaagggnttacgaagcattgttatcantaaccagncnnttactactaaacnnaaanggccaantgaaacaaacagttcngagcccgttcttccaccactgantaagagngggggggcaggnataagggaaaaaattcagttagccttcngagctttcngggcagacttggngancntgccagccccagcagccttctngtccnccgccttgaaganacccnccgcaacngtctgtctcaaatnacgaacagcaaagcgacccaaagggggatagtctgagaagcncncaacacacangggngngccagggaccaaatcaacaatggcagccccaccagactncaagaatttagggccatcttccagctttttaccagaacggcgatcaatcttttccttcagcncagcaaacttgcatgcaatgtgagccgtgtggnaatccaanacaggggcntagccggcgcttatttggcctggatggttcaggataatcacctgagcagttaagccagccgcttccattggngggtcatttttnctgtaaccancaacgttgccacgacgaacatccntgacagacacattcttgacattnaagcccacattgtccccaggaagagctttactcaaagcttcatggtgcatttcgacagaatttacttccgntgtaacgttgactggagcaaaggtga

SEQ ID NO: 723999 - DNA, 210 bp, Homo sapiens
  misc_feature (73)..(73): n is a, c, g, or t
  misc_feature (128)..(128): n is a, c, g, or t
gtcagggccatgctctcccagctccactgggatcatgtcaatacccagatgctcgcagatggcaaaatgccgntcgtaaccgggaacgggggcgatgaacttgacgttctggccggaccagggtttcngtccggcaataccgtgaacgaaagcgaacatcaccagatcatgcatgatcgacaaactggaattgtcggcagcaatgatgtg

SEQ ID NO: 724000 - DNA, 864 bp, Homo sapiens
  misc_feature (18)..(18): n is a, c, g, or t
  misc_feature (507)..(507): n is a, c, g, or t
ggcacgatcctgtctttnctgaagcggatcccccggtcaacacagctgcagttaacttggtcccgggtgacccccgatggattggagcctggtggctaggcctgctcatttcttcagctttattggttctcacctctttccccttttttttcttccctcgagcaatgcccataggagcaaagagggctcctgccacagcagatgaagcaaggaagttggaggaggccaagtcaagaggctccctggtggatttcattaaacggtttccatgcatctttctgaggctcctgatgaactcactcttcgtcctggtggtcctggcccagtgcaccttctcctccgtcattgctggcctctccaccttcctcaacaagttcctggagaagcagtatggcacctcagcagcctatgccaacttcctcattggtgctgtgaacctccctgctgcagccttggggatgctgtttggaggaatcctcatgaagcgctttgttttctctctacaanccattccccgcatagctaccaccatcatcaccatctccatgatcctttgtgttcctttgttcttcatgggatgctccaccccaactgtggccgaagtctaccccctctagagccatcaagttctatacatccgcagtctcctgcctgccgcagggactgctcgtgcctagattctatcttccacccggtctgtggagacaatggaatcgagtacctctccccttgccatgccggctgcagcaacatcaacatgagctctgcaacctccaagcaactgatctatttgaactgcagctgtgtgaccgggggatccgcttcacaaagacaggatcgtgccctgtcccctgggcccacttt

SEQ ID NO: 724001 - DNA, 1279 bp, Homo sapiens
  misc_feature (1068)..(1068): n is a, c, g, or t
catccaagcagtagcacagatgacgtccggttgttcgccttcgtgctgcttcaccaccgtgggatgccatgagcaatgaggtccaaggtttgccctcatcacgtgtgatcggttgcaggaacgtcagcgaggctggctgccgcgccttaaccggcgcacgagaccaagagccctggctggaaggaggatcgtaccaggacattatcgcctaagggcagttctgtgagttcagttgatcgggaaagggtagcgtggtatggccaagaatttgcatctgagtagcggagtctgtagacgtagaaggcggggtggcacgcccaagtatgagcgtatgtccctgaccacgtgtgagctaagcgccaagaggctcctcgttgcattaccaaacccctttttcccgaagggttccattggtggtcgcttggcgtgcacgcgcgtgtcgttgtcacgcaagtgggaatcgcgtgcaccgtgccgctgtcgtgcacttcaacgtggagtacgcacgatttgcagaggctcccctaaccctgaggggttgagcgaccaccagggagtaaaaaggtccacccaacttgtggcataaccgtataaagggcgggcccaaatatgtaacggggtttcccccccgggtaagcccggaaaaaacccccaccggtttacatgttggtggtttcccatctaaagcacaaagtgttccgcccccacactctgccgaaagaaggctatttttcggcctcggggcgatgttgcgggcccttttgacgaagtagaacagttccgtgaaccacggccggaagtcgcgttaacctcccttgctatttgtagaaccgttcattcctaatcggggttgaagaacaccctaccttggtacctgtttgtggacgaatccctataggccttgaattgttgaccttatcctattgaatccccgcgcggcgcgtagctgtaacgttgaggaagggacgtattgcctaaagggagttgaaaaaaacgagactttccacatttgctctttggactttggcctgggtaggggggaatgtcccctttgaaccgcttggtggnctcatatgtccaagttgtagtgttccccgcaatgtagaatgtgaacccacgtgtccccccctttgttggacatgcgttggaaagcgcccacacgtgttttggtacagcccttggtgtggcatgtttgttcaccattccgttatacacaggacaggtcgggacaacacattaacgcgggtgtccgtttgccaccccctttataggttggacc

SEQ ID NO: 724002 - DNA, 112 bp, Homo sapiens
cgtgggggttatgccaattctgctccatggacatccggaaggacaggcagttgttgatgttggcaataacattggccctgtaattcgtcagctgcttgcatctctccagaaa

SEQ ID NO: 724003 - DNA, 640 bp, Homo sapiens
  misc_feature (85)..(85): n is a, c, g, or t
  misc_feature (87)..(87): n is a, c, g, or t
  misc_feature (283)..(283): n is a, c, g, or t
atcctgtctcaagatatttctctagatgtgcctggcaagcagtaaatgctcaattaatgtcagctacttcgattacaatttaacntnccaaatgttccttcctgaagccatgcttccttctcagtgatccagctcagtgtttgtagcccacatgcagtcccaggcctgtgcacctggatcacctccttctttccacttataggtgctgtgaacctccctgctgcagccttggggatgctgtttggaggaatcctcatgaagcgctttgttttctctctacaanccattccccgcatagctaccaccatcatcaccatctccatgatcctttgtgttcctttgttcttcatgggatgctccaccccaactgtggccgaagtctaccccctctagagccatcaagttctatacatccgcagtctcctgcctgccgcagggactgctcgtgcctagattctatcttccacccggtctgtggagacaatggaatcgagtacctctccccttgccatgccggctgcagcaacatcaacatgagctctgcaacctccaagcaactgatctatttgaactgcagctgtgtgaccgggggatccgcttcacaaagacaggatcgtgccctgtcccctgggcccacttt

SEQ ID NO: 724004 - DNA, 688 bp, Homo sapiens
  misc_feature (161)..(161): n is a, c, g, or t
  misc_feature (239)..(239): n is a, c, g, or t
  misc_feature (272)..(272): n is a, c, g, or t
  misc_feature (298)..(298): n is a, c, g, or t
  misc_feature (364)..(364): n is a, c, g, or t
  misc_feature (376)..(376): n is a, c, g, or t
  misc_feature (378)..(378): n is a, c, g, or t
  misc_feature (383)..(383): n is a, c, g, or t
  misc_feature (412)..(412): n is a, c, g, or t
  misc_feature (428)..(429): n is a, c, g, or t
  misc_feature (439)..(439): n is a, c, g, or t
  misc_feature (445)..(445): n is a, c, g, or t
  misc_feature (448)..(448): n is a, c, g, or t
  misc_feature (460)..(461): n is a, c, g, or t
  misc_feature (464)..(464): n is a, c, g, or t
  misc_feature (469)..(469): n is a, c, g, or t
  misc_feature (478)..(478): n is a, c, g, or t
  misc_feature (492)..(492): n is a, c, g, or t
  misc_feature (494)..(494): n is a, c, g, or t
  misc_feature (507)..(507): n is a, c, g, or t
  misc_feature (515)..(515): n is a, c, g, or t
  misc_feature (609)..(609): n is a, c, g, or t
ctggaaaccagataatcacacaaaaatcacatttatttcaagagctcaaagtgcaaatacagcaagtcagttcacaaagtttcaagatacagtttttaatgacaatggaaatttgatatacaaaaatggaagggtaaatagaaataaagctcctcaatttnttaaaaaaattcaagtaatttgaaaagcctttagactaaaatactccacttacatccattcagaaatgccagtactgncactgcaatcaagaagggctcttcaaagagagnatcagctcaaactggtcagctctagnttagatggagttcttggtgccggctttctgattggagctcagtcactcactgctatcaattgatgngttcaatccagntntttgntctttaggtggattctaaaacagtttaangttaggccgggcgcannggcttccgtnatcccngcncttggggggccnnggngggcngatcattgnggtccgacgtttgngncccgcctggcccncatcgtgncccccctctctccccccctccccccttagctgggcgtggtggcgggtgcctgtaatcccagctacttgggaggctgaggcagaagaattgcttnaactgggaggcagaggttgcagtgagctgagactgtgccaccacactccagccaaggagacagagtgtggctttgtctc

SEQ ID NO: 724005 - DNA, 952 bp, Homo sapiens
  misc_feature (595)..(595): n is a, c, g, or t
taagctcggtacagacttctgtcaccaggtatcgtgggaggcattggcatagatgtgttctgattgtcggccaaaacaccaggctcacggaaatgcaggtgctgtttgcttcaggagagcattctctggatgccctcccatgcacacacgcctggagggggctcacctccacccagccctgagcttctgaggccagagactcaagggctcagggaagggtggctacagtgagcctgggccgtgaacactcaccccttttattgccttcagagggctcctgccacagcagatgaagcaaggaagttggaggaggccaagtcaagaggctccctggtggatttcattaaacggtttccatgcatctttctgaggctcctgatgaactcactcttcgtcctggtggtcctggcccagtgcaccttctcctccgtcattgctggcctctccaccttcctcaacaagttcctggagaagcagtatggcacctcagcagcctatgccaacttcctcattggtgctgtgaacctccctgctgcagccttggggatgctgtttggaggaatcctcatgaagcgctttgttttctctctacaanccattccccgcatagctaccaccatcatcaccatctccatgatcctttgtgttcctttgttcttcatgggatgctccaccccaactgtggccgaagtctaccccctctagagccatcaagttctatacatccgcagtctcctgcctgccgcagggactgctcgtgcctagattctatcttccacccggtctgtggagacaatggaatcgagtacctctccccttgccatgccggctgcagcaacatcaacatgagctctgcaacctccaagcaactgatctatttgaactgcagctgtgtgaccgggggatccgcttcacaaagacaggatcgtgccctgtcccctgggcccacttt

SEQ ID NO: 724006 - DNA, 121 bp, Homo sapiens
aacatcagtaattggacaatttacaatttaacaacatgatcctatcaataacaagcacatttggtaggggataaagacacattcagccatgcaatccaggtgtcaataccgttaaggataa

SEQ ID NO: 724007 - DNA, 255 bp, Homo sapiens
attatccccgtaacgccaatcgatccctgtattattgtagagacggggtttcaccacgttgcctaggctggtcttgaatgcctaggctcaagcgatccgcctgccttggcctctaaaagtgctgggattacaggcgcctgccaccatacccatctaatttttgtatttttagtagagacagagtttcaccatgttggccagcctggtctggaactcctgacctcaggtaatccacctaagttgggcgtacgggga

SEQ ID NO: 724008 - DNA, 200 bp, Homo sapiens
acgcgaaaactattgatctctcttccaaagtgaagaaaatagcagttcatagccgggtgtggtggctcactgcctctaatgccagcactttgagagactgaggcgggcagatcactatgaggccaggagttcatgaccatgcctatcccaatcatggatgaacgctctgtctctattttataaaacaaacaacactagac

SEQ ID NO: 724009 - DNA, 1158 bp, Homo sapiens
ggacagcatgaggctccctcgaaccgccccctggaatgagttgctaaccccccagggtcccgatgcccgtgaacgagcgatgtgaccaggagcgcttcccctgtccctgcccagccaatgcgcccctacagcgcatccgcatccacgtccactcccaacgatccatatggtcagcaccacggaccccatggactccaacctcatccagctcactggccagagtttcagcactgatgctgccggtagtagaggaggtagtgactggaaccccccgagcgggagcccagcccagacagcgtgtactcgcggaggaagtccccacatccgaagtcaccagacagagacagcgccacgccgcacctcctcgcccccaccgccaagaagaaacgcgacgaaccatgaggtaccagggacctcaggctatccctgcgccacacgataccaccacagtgagcgtgcacgcttcgctgacaccagcgctccgcgaccagcgcgcctcgctcacgacacacggcgatacccgaacgagcacgctggcatagagacagactgatggcacaggcaagcggtggacctacccaccggccgcacccccacaccccacgacgcctgaaaccgcggcccacgcgcccaccaccccacgcaaccgcagccatgccaacggaagccacacacgagaacgcaccgccgacccacctccacaccccacatcggcacagctaacacagggagctcccacatgcaccccgcgccccgcgcaatcggacacaaccaactacaacaccaacgagaccacccatccaacacgcccacaccaacaccccatcccgacaccacagccaacccactgcccaactgcagtagcgcaccccgaacccaccaaacaggccgcatcacgcaccacaatgcaaacacccagcgccatcacaataccagacacgaaacccacacccacgcgaccagccacgctggccccaccactaggccaaccacctgccgccaaccacaacacactacacaacgcgcagcaagaaaacaccacacacataccacacaccgcaagaaatctaccacaggcgaccacacgaccaaacgccatccatgcacacaccactccgacacgccgacaccacacacaggcgacgcaacgacacaccc

SEQ ID NO: 724010 - DNA, 106 bp, Homo sapiens
cccggcccaaccccgccccccccccgttgccttcgccatggggggtttttttaaggacacccgtgccccaaagccacctggggccccattaaaggtgggggggggg

SEQ ID NO: 724011 - DNA, 274 bp, Homo sapiens
  misc_feature (79)..(79): n is a, c, g, or t
cagctgctgttcgtatctttgcttcctccgcagcagcctgtagggcactctcccttattcttggtcccatacttcttgnggtagtatgtgagctcctgttgaatcttctgctccacactttcctgtttcttgatcattatcttctctgtctccttcagtttctgtattgcttcttcaggggttggcccttactccttcttccccttcccgcaatgagcctgccgtgaccactcatcgcgagctcgcctcttctccctgtacgtgtcgcagatgt

SEQ ID NO: 724012 - DNA, 440 bp, Homo sapiens
  misc_feature (407)..(407): n is a, c, g, or t
cggccgtacagttgcgtcacgtgaaacaacctgtagttccctcttattggcatttcattttctggttctgggttggtcacttaagaacacggctccactccattcaaggggtcaaggaaaataagctcattctgtcctttctatggctgctgcaaaccctagttctgtgggcagctggcagggaacagggagctggaattcctagccttaagaactggcttctggcttgaccccttgggttaactccgaaggaaccaacttcctgccattctggaagttgctgttaaggtaaggtggctggagccaaagggcagggtgggcctggcttgggaagcaggaggggaagccggcagaacgctacagtggggactcaccggaggcgaaccaggacgtccagcagctgcagnccgataaactcgttccgcaactggtacggcggg

SEQ ID NO: 724013 - DNA, 130 bp, Homo sapiens
caggtaggtcacacacgcctgtagctcaaatgatcctcctgccttggcctcccaatagtgctggaattacaggcatgagccaccacacccacacaagactatcatttataattgaccaagagcctagtat

SEQ ID NO: 724014 - DNA, 188 bp, Homo sapiens
cttggaaagaaagagacacagagacaaagtacagagaaagaaaaatgggcccaggggaccggcgttcagcatatggaggacccatgccagcactggcctctgagttcccattagtatttatatgatcattatcgtggcatttcccggagatggggatgtggcaggacaagtaggataataagtggaga

SEQ ID NO: 724015 - DNA, 291 bp, Homo sapiens
  misc_feature (9)..(9): n is a, c, g, or t
  misc_feature (17)..(17): n is a, c, g, or t
  misc_feature (66)..(67): n is a, c, g, or t
  misc_feature (75)..(75): n is a, c, g, or t
  misc_feature (142)..(142): n is a, c, g, or t
  misc_feature (159)..(159): n is a, c, g, or t
  misc_feature (273)..(273): n is a, c, g, or t
ggtagatantgtatganagtatattcagtgtcttacacttagtgtgtctaaatatgactagtgttnnccactgtnaatgatctgtatttggtttgcgaatttcaaacaaagaataaagaacatgaaattagactatatattnctgtatttcccctgagntttttctaatctggtcccttcatacttttccccaaaggttcagcgtcttccatttctttcaagctcaaatctttcactggatgttttgaggggtaatgatgagactattggatntgaggggaaaagaacctg

SEQ ID NO: 724016 - DNA, 99 bp, Homo sapiens
ggcagtttttgcttttattggtcaagaattctttacaaaacccacacacacacatccacacacacacacacatgatgcctgcccttctgtcgtcttctc

SEQ ID NO: 724017 - DNA, 164 bp, Homo sapiens
gagactgcgccactgcactccagcctggcgacagagcgagactccgtcctcagaacgaacaaagaaacaaacaaaccagatgactgggagactgaaggagggaaaaaggatggaagaaaaccgtagggaaaggatggggcctcacagactcagctgtgtctctt

SEQ ID NO: 724018 - DNA, 208 bp, Homo sapiens
gcgcgtgagttgtctagtccacgctcggagccatgccgtccaagggcccgctgcagtctgtccaggtcttcggacgcaagaagacagcaccacttttggccgcactgcaaacgcggcaattggtctcatcaaggtgaccggccgcccccttggagatgattaacccgcgcacgctacaagtccaagctgctggagcaagttcttgctt

SEQ ID NO: 724019 - DNA, 269 bp, Homo sapiens
tataggcgctagtgtagtcattatagagacggagagtagaataggggctgcgtggtgtgggaaggtgggagtggggattaggtgtttaatggggacagagtttccgtttgggaagatgaaagagttctggagatggatggcagggatggttgcacgacactgtgaatgtccgtaatgccactgaaccatacatttaaaaatgattaagatggtatattttatgttggtttggccacaatttaaaaaaaatcagttgtctaaaaaaaccc

SEQ ID NO: 724020 - DNA, 188 bp, Homo sapiens
tctcttactctcatctgcgcttttatactatatgtgtaggcattcataaacaacatgtattcataaatgtgtttcacgtttctgaacctgacatactgtataaattgtatttttttcagaatgatttacttgctttcatgatttcgattatgtattttaacttacatgtggttttcaattatatgatt

SEQ ID NO: 724021 - DNA, 292 bp, Homo sapiens
acgcgagttaaagcagctgagattagtggcggtacagccaagagcgatgaaagctgcatggcccgtggagaaaaagctgaagcagtgcacttgatggatcttcatgcccgtggtgttctgcccggactggatccccatctctgtgacttccgtggagactcacttcctagatgagagaagtgaatgcttatcaatgaagatgggtgaccactctgaccaagcctccacagtgctggtgtggcccgtgaggctgtggctgggtcgagtatctcgttcgaagaggctcacgtct

SEQ ID NO: 724022 - DNA, 138 bp, Homo sapiens
acagggccagtttcttgtgcactaaaggcgtttttttccccccgtgatggagtcttgctctttggcccaggcttgagtgcagtggtgccatattagctcactgcactccagcctcaatgacaatgaaactctgtctca

SEQ ID NO: 724023 - DNA, 604 bp, Homo sapiens
gagtataaatttgatcacgtccttggtgtctattgcccacttgagaaaggttttgccaggttccacagatcgcttcaagatgctttcgtttatgataggaaattaatatttaaataagactaattgaaaactagattatctggttctaatttcttcctcctgtgaaatgttcttttggtttgtatttctttaggtattttccaagttactgctgcttttacttcacgacctccaaccccacttttgttatcagcgtcatatgccagagtcatggcagatccagcctggacaacatagtgagacccatctctatcaaatatacatatatatatatatatatacacacacacacacacacacacaaatatacatatatatcaaatatatatgtatatttgatagagatgatagcaattatgtgtgtgtgtgtgtgtgtgtgtgtgtgtgtgttagccaagtgtggtttctcatgcctgtagtcccagctactttggaggctgaagtgtaagagttgcttgagcccatgagttagaggctgctgtgagctatgatcatgccactgcactccagcctgggcaacagagcaaaaccccatctctaaata

SEQ ID NO: 724024 - DNA, 306 bp, Homo sapiens
gtaaggaagggtccccaggttgtggagaccaagttgagaacaataatgaacaattattgtatgaacaattgttagagacagctaatcacaaacaacctgcgggcacaaatgacctcattccacacgtagcacccttcagcaggaccctataaaaccttcctccagcccttgcctctttgcaggtagccccttctctgctgagctgcccactgcaacatattttcacaatttctctaataaatctgcccttctttacctacaactatcttggtaaatggctttaccacctacaaaactgaccctagg

SEQ ID NO: 724025 - DNA, 175 bp, Homo sapiens
acccactactggctgcgcatgagccggctattcaaggtgtcctggacactggcaaggagctgtccgatgacaacaccatcgggaaagaggagatccagcatatgctgtcgcaatttgtggagcactgcaaacagctgacataacttgcaaatgcccgggggccttatgacagaac

SEQ ID NO: 724026 - DNA, 1393 bp, Homo sapiens
  misc_feature (429)..(429): n is a, c, g, or t
  misc_feature (551)..(551): n is a, c, g, or t
gcagtggtccaaaggaccagctccttggagaggggatgccctgtgtggtcgagtaacgcccacgtgaggatccacatccggtcttatgcaggaatcgtggtcaggatcttcgggcatcctatgggtgccggtccaatgatccctcctcctcgacgaggtgctctgccttgcgagatgttgtgctgcgtgggattagccaggcaacctcatggcgacggtaggaactgagtaggatgcaacgtaggttgctgcgtgttaggaccgtaggtgtggtggcgtcgcaagcgaggactaatcgtcctcggccgatgcgtacgtatagtattctacctagagggtccctggtgcctagcctggtgtctcgtggtggacacaggcatgtgtgtgagcagacattggaatggagttctacgagcgattgtcttgtgnccgaagactgcgtagcggctgtcaattaaccgtgcatggctcatgtgctctatgtgcagagctgtgacatgtcgtggtccatagtggtctaaagtcaccaatttatgcgtggcatgtgaagngattgaggcatgttagcgcgcgtacaaattcgtagggggacatacaattgtgcgtggaggaccccttgatagaacgataaacgctatggggttggctcgtgtcttggaaatgaacgctaagtactgcaatgtgggacccgaagaatggaagaacttgctttggaggagaacgcgtttctggtaaattgagattggtaaacaatgacgtgaaagtctatcagcacggggactttgcgagacaagtttgcttacctagagtgggaaggcttctttacgggggataggtctcgctttgtagttcagaaatcattttgggagtacgttgaagacgagttggcgattgagggaagcattgatgcaccaattcaaccgtcggtaacgaaaattattgttgcgccacacgagagggcccgaatttcgtgcacttggccccccctataggtgaaattgtgtcctacttagttgcgcgaacaacagagggtgtgatctctttcccacctttgaagcctttagttcgaaaacgcatatgggggcaccgacggaacccaaaggagcccccattggttttgcgcattaagttggaaagcccttggggggcttaaatagcctcggatccattccaaatttccaccaagtccgctgggacttcgcgttgacactgtgggttgtttggtccccacatgtttgaggaattgggcgagacgtgaacctgtatgagatagcggttaacggacttttcctcggaattccgggataatctaggaattctacccctaatggggcgcttggaggaccaaactttgggcattcttgacccatgtgttagactgtcttacgggtca

SEQ ID NO: 724027 - DNA, 118 bp, Homo sapiens
catggatttgctggtgcagtacaactaggcttaatagggagcagaggttgtggtgagctaagattgagccattgcattctagcctgggcaacaagagtgaaactctgtctcaggaaaa

SEQ ID NO: 724028 - DNA, 486 bp, Homo sapiens
  misc_feature (64)..(64): n is a, c, g, or t
  misc_feature (100)..(100): n is a, c, g, or t
  misc_feature (118)..(118): n is a, c, g, or t
  misc_feature (124)..(125): n is a, c, g, or t
  misc_feature (145)..(145): n is a, c, g, or t
  misc_feature (147)..(147): n is a, c, g, or t
  misc_feature (149)..(149): n is a, c, g, or t
  misc_feature (175)..(175): n is a, c, g, or t
  misc_feature (198)..(198): n is a, c, g, or t
  misc_feature (210)..(210): n is a, c, g, or t
  misc_feature (246)..(246): n is a, c, g, or t
  misc_feature (272)..(272): n is a, c, g, or t
  misc_feature (277)..(277): n is a, c, g, or t
acaggagctagagcagtgacaatgctggtggcaacagggcagtgtagcaggtgcttcatgttcnccttttcaaccttttcatttaattgtcacaactcgnaggtggattctgttaggnacaggnngccccaggaccactccgccncngntaactcaatgcagctgacccttaccntgaatactctgcagctgcattcntgaaccgttatntaggcgctatagcaaggtcaccagacttgctacacngaagccctctgggtggcacggggggntcatnagaaacgtggattgctcccccttgtcacttcctattttcgcaagatgatatattgtaaggcggtcagggccttagatgtggtatagttaattgtctcccagcagcagggtctctctcccccatataagcccctcgttttgtcagctcaggcctaccgccagcgcagggtggtaaagcatggcagggtaattaactttcctggcctgaaa

SEQ ID NO: 724029 - DNA, 415 bp, Homo sapiens
tagaaaaattagacacctaaggatttcatgactccagacctgtttccttagcataataccacaccagtaggagaaatacaacttacgaaatttctttgtaaataaattctataacattttgggtaaaaatttatcataaaaaaattattaaaagcaattgggttggaaggaagttctgtcaaaatacaatccaggtgtgcagttctctgataaatttagcagtggttactactgaggcagtctcaaaaaaaagtgtaaaaggactttaaggggtgatgaaaattttctacattgcctttgtggagatggttatacatttgtcaatactcatcaatttgtacatttaaaagaggtaaatttattgtatgtaaattgtatcttaataaaactgattaaaacagacatacaaacccca

SEQ ID NO: 724030 - DNA, 288 bp, Homo sapiens
  misc_feature (218)..(218): n is a, c, g, or t
  misc_feature (239)..(239): n is a, c, g, or t
taggtgtctagcaggaccttaaggcgagtcgggtactggctgagagctagcgggtgtgggagcatccgggcagcgaggggtgagtgcccaaagccacaggtgcacccttccctgaagcagagtgaggtttggggggctgagtcccggacaggttgtctcttgggttcccagactggggcagcacctactccgtgtcagtggtggagaccgactacgancagtacgcgctgctgtacagncagggcaggcaagggccctggggaggacttccgcatggccaccctctaa

SEQ ID NO: 724031 - DNA, 487 bp, Homo sapiens
tatttgggacaaatcacttaaccatacccaaccctatttcttaaaaatggaaaaaatttcccgcaaaccacattggcttgtttcaaaatcaaataagaaaatgtacacaattctgttggaaacccagagggtaccggatgctatttaagtcactagcccagcacaaatgcttcaccatggtgggtgagccattgtagatgcctagggtgtcaggaaaacaacatggagtaaaggtggtggctttattttaacttataaagctgtaacccttttaatcttgaactactttcgggcgggccaagatagtgtacagattccccatatacccttcaataatattccccaaatgataatgtcatcctaaaccccagcataataatcaagatcaggacacttaccagtgatacacacttataatctagttgacagatcttatacaaatttggtcaatggtccaaatgtccttggcgggtccaggatcccaatg

SEQ ID NO: 724032 - DNA, 133 bp, Homo sapiens
gattgtgtctggaaccttcgcatcttggaccactcacatgaaaaatactgtggacactcaattaatgggctagttcttacaatgaaatgttctctaggattctaaataggcaggtacttactatgttactgta

SEQ ID NO: 724033 - DNA, 102 bp, Homo sapiens
  misc_feature (16)..(16): n is a, c, g, or t
cagccccctgaaagtnttgtgtaccccacctctgaagatgctgggggaggcagctgggatgggagccagccccatgcctgtttgtaaccccacagtgggtga

SEQ ID NO: 724034 - DNA, 270 bp, Homo sapiens
  misc_feature (211)..(211): n is a, c, g, or t
  misc_feature (262)..(263): n is a, c, g, or t
tcgaatcgagctcggtaccttgatgtgactgtctcgcctcggcctcccaaagtgctggtactacaggtgtgagccaccacaccatgcctacagaaggctttagacatttccaacgtgaggtcatacagtaactcaaaaattacacgttgtcttctcttacaagcagtgacttcaaagaacacatcaaatttttccatactggttgtttacnttcttgtaaccttcatagacgaacgtctctacttacaggtgtttggtaacnnccttggt

SEQ ID NO: 724035 - DNA, 344 bp, Homo sapiens
ctgttgagggacttttttaaacccccacccatgaacagacgttggggttaaaagacaaagcagcctgcgccagtgtggccctccctgtagcagctagcaaaggcctttagcaggtacagtcccttctggagtctttatttgcatcccaaaagcaaaaggagtcctggtgccctccctccaaggcaggtgccctcctgaacactcccttggaaaccagtaaacatcattttggaatgtgaccacccagagactacccaggagaaaggaaaaaaaaattttgaaaatgcaaaattttggggggcttccccgttcagttttttaataaaaggaccaatatcccccca

SEQ ID NO: 724036 - DNA, 786 bp, Homo sapiens
  misc_feature (14)..(14): n is a, c, g, or t
  misc_feature (96)..(96): n is a, c, g, or t
  misc_feature (111)..(111): n is a, c, g, or t
  misc_feature (123)..(123): n is a, c, g, or t
  misc_feature (156)..(156): n is a, c, g, or t
  misc_feature (182)..(182): n is a, c, g, or t
  misc_feature (292)..(292): n is a, c, g, or t
  misc_feature (297)..(297): n is a, c, g, or t
  misc_feature (303)..(303): n is a, c, g, or t
  misc_feature (322)..(322): n is a, c, g, or t
  misc_feature (475)..(475): n is a, c, g, or t
  misc_feature (566)..(566): n is a, c, g, or t
  misc_feature (645)..(645): n is a, c, g, or t
  misc_feature (693)..(693): n is a, c, g, or t
  misc_feature (707)..(707): n is a, c, g, or t
  misc_feature (712)..(712): n is a, c, g, or t
  misc_feature (785)..(785): n is a, c, g, or t
ctcattccttgtgnagtttttaggagttcgggggaagatttcatggagaggtagctaaagggacatggttttttgtttcaggggtgggaggatggntctgaggaggaaagntcagttactgcncactggggaataaaggttagttttattcttttntagtgatcttccccagaatattaatnctttggatgcattatttgagaagagatggttggatgcaggaagcttgcaacactgaaagttacacagagatatgcataccattgcggataaatacacatctgcaacatgntgggnccaganaggttatcatgggaaaaanactggagggagagctgagaatgagtgagttgacattgtggaagcccagggatttctggtgaggaggaagagccctggagctgcggcatcttgggggcctctcaagaaaccaaggttcctgaccagactgcttagaggagaaagattcagcccnaaactcaagagaggagggcaggcgtcagcgccttttcctggcaatgtggagaagcagccagagggcagagggcgaggaagacttcacagcnagttccctccacccagggtcaccaggtgcaccgagaggtctcagcctacagaaaggttttttgctcgttgcttcttaancactaatgatggcataaaggtcttccggtgggggcggcactgaggccnttcagggaggtccnggacncgatccttgtgtacctgggaggatggcaagtggtacgttggctccactggggtttctgggagcttgggagggnt

SEQ ID NO: 724037 - DNA, 107 bp, Homo sapiens
aggagtatagggtgtgccctgtggcaaggcagcaggagtaacgaagctctcagtgactcctcccagtagaccagtggagagcagtgacacgtctcacggtggccctg

SEQ ID NO: 724038 - DNA, 1164 bp, Homo sapiens
  misc_feature (644)..(644): n is a, c, g, or t
  misc_feature (716)..(716): n is a, c, g, or t
  misc_feature (772)..(772): n is a, c, g, or t
  misc_feature (821)..(821): n is a, c, g, or t
  misc_feature (914)..(914): n is a, c, g, or t
  misc_feature (923)..(923): n is a, c, g, or t
  misc_feature (930)..(930): n is a, c, g, or t
  misc_feature (932)..(932): n is a, c, g, or t
  misc_feature (962)..(962): n is a, c, g, or t
  misc_feature (1008)..(1008): n is a, c, g, or t
  misc_feature (1041)..(1041): n is a, c, g, or t
  misc_feature (1065)..(1065): n is a, c, g, or t
gactgccggagaggcgccgccacttggggtggcgggcacccggtggatattgtggccacttatggctcggaggtgaggatatgtaaaaatagtttgcaatcaaagctcacacctcgacggatcactaacacaacggacatctcagagaaggatacatctaatatagaacaagtacataataaggtgccatgttggtcgctggtgctgcgcataacccaagaactgcgagctggcggggatggagaggagcggcgggcgggcatagttttaatttatgacttcctcaggtatagggatgagttgtgtttgtcagttttgtattttaggtggagttgctacagcgcccgtcgcgcgcccagcagtacactatgctacacattgctctccctctacccgtgccctgagtacggctgttgttcgtgctcgcttgttgtgcgtgtggttggagagtcggtagtcgtatcgagtgtgtatgtgtgtagtatagtagtaggaaggggtggtgggagtcttttgttatagtgatggactgcaacccgacagaaagatatgacactcatcaagggagaacggagagacgagtagtagaactgggagacaagacattctcgctattacttagatactgtctgtacattctattngatcgtagagcgaccgtcacggtggagagtcgagatgataatataaagtcgagtatacaagtgagagagtgnatgatatcggtttgcgtggctgaatacgctaagaggttgtcatcgttcagtacccnacacgagcccaataccacatcctcgtgtatcatggctacctctcatcangtccacgataccttgcacacagatgcgtgcaggaagcgctatgtagtacgagagattgagaggagcatagaacgatgtagcagacgtgtagtncatgtatcntctatgncntgcgctgtagtggaatgatgtgttgatcantgataacgactcatatcgtattcgtcgatcatggactatagacgtntcgtgtgcagaagcatcataatcattctcaaanagacacaatgacaaatataacaanacatacatgaagtagcgaacaatcacagcacagacaagctccgctctctctagcgcacagcgcagcgagcatgcgatatcacatccgacaagcacagtc

SEQ ID NO: 724039 - DNA, 139 bp, Homo sapiens
tttgtttgcaggaagagagccctaaacactatttgcggcactgctgtttcagcgtgagtctttcaagcaagttgcgaaaaattgatattttaggtgaatgtgaaaggttggtaataagtggaaggtggatgctcgttat

SEQ ID NO: 724040 - DNA, 647 bp, Homo sapiens
tcccagttggtttaagcttattataggtttgggaggaatttggccatttggtaatcttacaaatcattcttcacccttcctcacatcagtcttcctggcttttcccagtggtttaactggtaaattggttgtagctaataatgacaaatcttgagctggattttcctcttcacctggtaatgggctgggatgttatttcccaagacctggaggggactcacactttgtttggataacttgggatcacttctccgtgagtgttagagaagggtcaaatctaccaacaggaagccctgtatctctggtaattcccagggccattggtgtaatatggttgttggtgtgccatctggatcggactggtttatcgaccttaaaacaatgtccaccttatgtttccagtgaaatgggggaattatcctatggtctacctctttcatggattggctggtgaagaatcagattgtgcaacagggtacaggacttgccctttggaaatctatacctcgggatacttaagaggctttttattaacaaagggcccttctaatggtgctatttattggaccaatacctataaagattggccttaatttggggttataggcttttatcaaaaggtatcctcatagacttatgcaggttaa

SEQ ID NO: 724041 - DNA, 838 bp, Homo sapiens
ggggaagcgctcgtccgtggacgaggacctcggaaggtcccgaggaggccgcaggaaagtcgtcgagggacgggcggcccgcctcgacaggtccagctcctgttcggctcactgcaaggaaacccctggaggctgaggagagaggctggcaccgcctagcattcgtgccccagctcaggtgagccgcccagtcatccgtgcccgcctaccagggacctggccacccctcccaagctccacacttgtgagaagtgcagtaccagcatcgcgaaccaggcctgtgcgcatccaggagggccggtaccgccaccccgggtgctacagccgtgtgccgactgtgggcctgaaccgtgaagactgcgcgggcacttcatgggtgggtgacgagctgtactgtgagaagcaatgcgcacgcctagcagcgtacgtccggctaccctgccaacgcacgtcacgacgtgcttctgcggcctcgaggaccacgccgatgccgcatcaagcactgccgtctactgctggagcgcagggtcatgcctatataagtaggcatgccagggacacatggtgggcagcttgctcggtacactgagctaagtcttggacacgctgatggccccttatgtcctcgctagggtgggcacaaggtactgggacctgtcgtggatctgtgggagactcaccctctaccttgccaggcctctcccctgcaggactggcattgcactagtctgaggtggccactgcctttgatcaaccatttgtgtgccagggtctaagtagggtcgaacacagaagtgggaaggagagggtggatacggctagtgggtcacagtggtaa

SEQ ID NO: 724042 - DNA, 785 bp, Homo sapiens
ttagggatcggccgcgcgcgctatcattgacaccatgccgtgtgcatgctatcaagctggccagggtcaccaaggtcctgggtctggaccggttctcatgggacagtgcacgcaggtaatcgggtggtggcatttgggcgactgccggcgacctatctccctgatttgacctctaccctgtccctaacccctgccagccggaatccgggtagccgcattctcatttcatcacggggttcttgatggttccctttaagcgatctgtattctggccccgatcacgttctctgaattctatatctgcttcccactccgcggttgcctttccgcggaccgccctttacttcttcctccagctccggtggggacccgtaggtgcgcgtggaattcatggacttacacgagccgatccatcatccgcaatgtaaaaggccccgtgcgcgagggcgacgtgctcacccttttggagtcagagcgagaagcccggaggttgcgctgagcttggctgctcgctggtgggtgcaaagcatggacatccccttgatagacctttggcttggtggtagtggaggcttcgttaaggcccaggatgagagggtaagggaggcagagtctacatacagagactgacaagagggacggcggcgagtttgccaattgcttgcggggcctgtcacacatctcatgtttagggtctgttcacaggggtcttggatgtcggggttcgaccacttggcccgatgggcatggtctgtccaatctgctccttgattttgtccgcccaa

SEQ ID NO: 724043 - DNA, 134 bp, Homo sapiens
tataggcatcgctaccgcctgggcaccatccgccatcttcctcggtcatgaacatgcataaatttatacagtgctgaacccacggagaggtgcttcccacagccttcgaggcctctgagaagtgcgcctgggtg

SEQ ID NO: 724044 - DNA, 1130 bp, Homo sapiens
  misc_feature (478)..(478): n is a, c, g, or t
tgggtcagcaaaatttcttttaaataaagaagagtagggatccagggtttagttttgtggtacgcctcggtttggccccgtcggcctcgggcacgctcagaacttccgggcccttgagagcggagactgtagggtttgggtggtgggctggtgcgggggtcccggggcgccttgccagaaatggccgtgatacaccctctcggcccttgtacagaaggaccgagaagagcaggagacagtgtgccaacagcccttataggggaggttccaggggccagcctgtggtctcaggaaagttgaggagattcttgtgccccctgtgcccgtgaagagattgcgcggtgtgcggcgcccgggctgtggctcacggcgcaggtgcacattacccttttaaggttgtgggtatacctctgctgtaaaacccgcgacaacatctcatctcaagttatagtggtctcccacaaaaagcacagcgtgncgcgttctttgttttctctccgcggccacgagagaaagtctttccattcttctcgcggaactcatctcgcgggaagagagggtgaacacagagagtgcgggccccgagtgttggggtgtggccagaactctctatataaaacaaacactctctctgtttccacacaacaaacagccgctgtggtcttgtgacagagttgcgtggaaagtgttgggggtatctccttctcggtggggcccagagagaaacacccctgtgtattaatcaaactgtgtttgcaccccaagacgaggcaccctacgaggggtattaagaaattatctcgcgtggggacccatctatggtgggagacccatccctgttattgcggcgccacacaaaaacctcctatatagggagagggctcccttagtggtatgaagtcggggagaggggcaatgttgtctcccaaagcctccccccaatgatgaagtggcgacgggcagagaacaaggcctcccaggagacttgatgaaccacggcggccggtattagtaggcgtggcaagaaagacaccacaaggtggtctgttggccgagaagcggggcggacaaaaaagcgcttagaattgaggcaaggcacccccaccaaggggttagaccaggtgagaaaa

SEQ ID NO: 724045 - DNA, 607 bp, Homo sapiens
cttcctcctgtggaatgtaagctgcttgagagcaaggaccttatctgttcattaacgtaacctccagtgtcttgaacctcctggcataggttggtgtttgggtaactttgtatgtactgggctgcctgtaacggaaaccacaggtcaaactgacttaagcagtaccgcattaactgcttcacttaaaaaggaattctaaacgtaggcttaaaagattttggattaagggccgtacctatgtcagggcctcaaaggctttcaatctttacactctggccttcaaattaatcctaatcctaactctagccttaaggatgattgcaaagtacctgttaaggctgctggcttcttctctcaggttcagtggaagggagagaaagaagttacacatcattctctaaagattagggaaacacttacatagatgccaccagtgaactgtgtttacacttttatggccttttgtgaacccatttgtttacccaagagtggattcactgttaggccaaaagggcccatcactgtcgctacagatggggttgctttgacctgagtcatgtggactctgagaggaattagagatccctgataaaatcggagttctctt

SEQ ID NO: 724046 - DNA, 194 bp, Homo sapiens
ttttccagttgggcccccccttccccccccccgaacaaaccccctttgaggcctcaccaaagagacaatagggggccaaatgggcccccctttttttagcccctttttccggggataaatagggtttggggccccttaaatggatgtttcccgggtgtttttttttcggcccaataaactaaagaattgggtta

SEQ ID NO: 724047 - DNA, 247 bp, Homo sapiens
ctgtgttcatcgctgggcaaactgaggcccagagaggtcggcacactggcctgcggtcacaccgcaagtctgtagggctgggagaccgagggtacgggcaaacggggtcccccgtgatccagccagggacagagcgggggattccacggtttaggtcccgaggacgacgtgcctccccacagatctggcacgtcattacgacacgggatactggtgacggctgacgactgggccgggaccacggctg

SEQ ID NO: 724048 - DNA, 254 bp, Homo sapiens
ccccaagaagagtactccaagagtatggacgggacatgaggaagaagattcagaagattacagatttcatctcattcttccgagataacgatacttgcccaacctgcacccaacctattactgaagacttcaaggcgcaagtcatcgaagctaaagcaaataacagaacagaacttcagagtagccttgaaaatcttaatgcgctacttcaaaagacagaatcagaaatcgaaaagctagatgaagggtaccga

SEQ ID NO: 724049 - DNA, 190 bp, Homo sapiens
ggggttttttgaccctaaggaaaccaggccctgggtgatttttcaaatttgttccccctcggtgagcaacagtttcacccatgcaaccaggacaaaatggttattgggtgcccttggttagctgtgtttttcctaggaggtaaaaaactttgggaaactgtggttaataaaaacaaatgtttgggggtca

SEQ ID NO: 724050 - DNA, 152 bp, Homo sapiens
tgggagacagcagcaccagcgtgcagagaccccagacatcaagctctttgggaagtttagcaccgatgatgtgcatgatcaatgacatttccctgcaggattacttgcgtgaaggagatgtatgccaagtacctgcctcacagtgcaggcgg

SEQ ID NO: 724051 - DNA, 1140 bp, Homo sapiens
  misc_feature (900)..(900): n is a, c, g, or t
  misc_feature (1005)..(1005): n is a, c, g, or t
caagaaactgatcctggagatcgagaccatcctggctaacatggtgaaaccccgtctctactaaacatacaaaaaattagccgggtgtagtggtgggcacctgtagtcctagctactcgagaggctgaggtaggagaatggcgtgaacccgggaggtggagcttgcagtgagcggagatcgcgccactgcactccagcctgggcaacagggcaagactctgtctcaaaaaaaaaaaaaaaaaaagagggactcctttttttgtggggcgcaagtggggtgtagactaagggcattgtgattctcagaatttttaaaaattttttggaagtggggtgtggctaatatattcaaattttgggacacaagaaaccttgaggttctcgaaaagaacctcttaaatgaggtctagaagtgaaccgttgtggcccctaggaggggtaaccgctaacaagacaaccatgtgggcccccttagagttttctattaccccagggttattcgtggtgaacatgggagaatctcccggaataatggagatggcgcgtgtccctcagtatgggacgccatattgcttggataaccaggtcctggaagatcgcttaaaaaatggcccaaggtcactcaagagggacaattacccatatttccaagactctgagctggttccccttcttaccaacttcttttttggccaaattacgctggtttagacagggggaggttcttcacaactttttttcacgcaacgctgttgacactctccacggtaatttggaggccccctcaaaggtaggcgagccggggaatataacactctgtgtgtgaccaaccgtgtgggactccccaatttgcactcagagaccccgtggggcgccttaacaaatcaggggggccggggnccccagggacactcaacacgagcacacctgcgggacaccccccaggggggcgcaaactggcgtcgtgccgtcaacccatctttcggagagaaagacccctcgggngaaaaaggggcgccaatactactcttgcacaacacttcgccacattgcgagaacaagtagaacaacgccaggcggcgaacacagacaacacggaccagcccccacgacagggcgagcaaacaatacacgcagacg

SEQ ID NO: 724052 - DNA, 284 bp, Homo sapiens
  misc_feature (29)..(29): n is a, c, g, or t
  misc_feature (34)..(34): n is a, c, g, or t
  misc_feature (58)..(58): n is a, c, g, or t
  misc_feature (93)..(94): n is a, c, g, or t
  misc_feature (98)..(98): n is a, c, g, or t
  misc_feature (105)..(105): n is a, c, g, or t
  misc_feature (137)..(137): n is a, c, g, or t
  misc_feature (142)..(142): n is a, c, g, or t
  misc_feature (167)..(167): n is a, c, g, or t
  misc_feature (170)..(170): n is a, c, g, or t
  misc_feature (190)..(190): n is a, c, g, or t
  misc_feature (209)..(209): n is a, c, g, or t
  misc_feature (220)..(220): n is a, c, g, or t
  misc_feature (224)..(225): n is a, c, g, or t
  misc_feature (257)..(257): n is a, c, g, or t
  misc_feature (271)..(271): n is a, c, g, or t
  misc_feature (273)..(273): n is a, c, g, or t
accacacctactgagattatttgtaaganttggngcaatgttggcctatacgcccttnatgagaaagccttgcattattgttgggctatttgnnatgntttcctnaaatatctggcaaagaattctgcatctctctntactnccagtgcattacaaagtggcttctnctnagtaccaccgcaaagccctntgagcgtctacagacagcncaccattttgntccnntatctgtaaacactttttgttcttagtctttntccttgtaaaattngntgttctttaaa

SEQ ID NO: 724053 - DNA, 152 bp, Homo sapiens
tggacagcacaggtaggacggatggcagcagagtcttcgaaagcagaaaccgaggtggccgggggcacggtgtcagtagctgagggtggagtcatcccactccagctgctgctgccgggttgcgttctgggggtcgccctgctccccctcct

SEQ ID NO: 724054 - DNA, 202 bp, Homo sapiens
tcagatcataagggttttttaaaaaaatcttaccattatgaaagttaaaaaaaatatagcactcgggacagtgaattactgcatttaatattcaaacactcaaggcgcatttctcacagtttacatgtgagaattgagcatgatccaaactgaaatatccgttggtcgtgtctttcaatgtctgcagcaaacactggcttag

SEQ ID NO: 724055 - DNA, 1126 bp, Homo sapiens
  misc_feature (1126)..(1126): n is a, c, g, or t
tgagatggagtctcgctccgtcgcccaggctggctggagtgcagtggcgcgaatctcggctcactgcaggctccacctcccgggttcacgccattctcctgcctcggcctcctgggtggctgggacttcaggcgcctgccaccgtgtctggctaatttttgggtatttttttttaggtggagaacggggtattaagcgttgtttggccaggagtggtcctccaatcttccgtgaccctcggtgtatcttgcccgccctcggccctccccacaggtgcgtgggatttacagggcgtgtgagccaccagtgtcccggccacctcatttttattaacagtggaaagttttgtggaacagatgatacagtataccgagggttttgccatttcaaattttaacgcctatattttgaaatctcacactattttatacccttttccctttcttaggaaaagctgatactgaaacataggaactacggttggggggggaatatgccaattttgtagctcccccaaattcccaaatcacaggtatggacttgctccgaaaagcttagttatacccagagctggggtattcgaagaagctttgtgctataatctcgtggacccgcggtaattaaatgggtctgggagtcttcatacagttgccaaaggagacccataattttagtttattcacaaatccaccattttactcacagctaaatttatgaagcttgtagagcccttagtacccttttaagggggacaacatgatgacctttgggaaagagcccgcggtatataacagacatattggcaaattgcggctacaggacaaagggaggtatagggcgataaccgaaaagcaaaggacccgctatttggggtatcccccgtgaggaccaccaactttgggaacacaaccggcaagaatatataagccgcgggtatataaaacaacggggaaagacgctcgtttaccaaaaaaaaataacagaaagaggaggaggacacagagagatgcaaatcacgctccacagcgaatacatacgacacatactcaggcaacctcgttgtaacacaaagaacggtgtcaaactagcatgatctgacctacactgagaaatagtcatcgccagn

SEQ ID NO: 724056 - DNA, 146 bp, Homo sapiens
cgcaggcttggatcctccaccattaagatagacaataacgcttaatgtctagatctgggtgtctaatattgcattagctagtagcatgtcctctacactgtagtgggtgacccgacgtacattatatttgtataacagaacatttg

SEQ ID NO: 724057 - DNA, 289 bp, Homo sapiens
tgagagaccgtgtagcatgtgtgtttaaggcacgacgccagtagatccgtgtacacccatgtgccaataagacaatgggcacagcacaaattggcaggagaaaaatggggactataaatggcgtgtggaaaaggccttaatagttaagttacaggctaagaatgtcatgtctggggtaagaatttccattttaagcaccggtcaactgtatccactttaacatctaatgtcagcaccttgtctccaggcagaacaacaaaccatccaaacattttaaacatttggggga

SEQ ID NO: 724058 - DNA, 756 bp, Homo sapiens
gcctccctcttggcctctcatccattggctctgcagggcagggtgaggcaggtttctgctcataagtgctttggaagtcacctacctttttaacacagccgaactagtcccaacgcgtttgcaaatattcccctggtagcctacttccttacccccgaatatggtaagatcgagcaatggcttcaggacatgggttctcttctcctgtgatcattcaagtgctcactgcatgaagactggcttgtctcagtgtttcaacctcaccagggctgtctcttggtccacacctcgctccctgttagtgccgtatgacagcccccatcaaatgaccttggccaagtcacggtttctctgtggtcaaggttggttggctgattggtggaaagtagggtggaccaaaggaggccacgtgagcagtcagcaccagttctgcaccagcagcgcctccgtcctagtgggtgttcctgtttctcctggccctgggtgggctagggcctgattcgggaagatgcctttgcagggaggggaggataagtgggatctaccaattgattctggccctgggtgggctagggcctgattcgggaagatgccttttgcaggcaggggaggatacgtgggatctaccaattgattctggcaaaacaattctaagattttgctttatgtgggaaacagatctaatctcatttatgctggatttatattcttagttgtgtttgaaacgtttgatttgggaaaacttaaataatatgg

SEQ ID NO: 724059 - DNA, 294 bp, Homo sapiens
tggggaactatagagagaatcatcacccgccgagggagcgtattaattgtcaagggtgagctgcacctatgcctcaaacactgcccattgggctccacttaaacatgggggagcaaatcttaactttagcttgggaggggccacgtatctaaaccatagcagagtctctttgtgatgctcttgagatgacatggtttgggccttggttcctgagcaggggtcttgcctttcattcagccagtcatatttgatactcagcataaaattcttcactcatcctttaaaccgtggggc

SEQ ID NO: 724060 - DNA, 867 bp, Homo sapiens
ggaagggaaggggccttcactaaggaccaatgagcataagcaggagacaaatgtcacacagcacacatgaggcagaccgagggttatgaggactggcaagcgttggatgaggagtcagtggagggagaggagtaagagagggctctgagatgacaagtgcaggtaaagtgtagagatgtgtgggtatgtgttgcgtgtagctatggtaactaaagggctgggatgatcacagtatgttgggcaccatatatttggaatgaccatttgattttcagggacatcacaaccttgacagaattacctcagctgtgaggtcctagcatattccagcatgctcctgctccctttgttcccagctacagaaatacaagaactcacgggctgtacttcccatttcacaatcctctggcatctcattaacatccaccttgtattctacacagatccactcttcactctgagagagttaaataaatacattctcaccaaggtcattgcagagcttacatagaaaccatcctatatcctgaagatcctgcagtatgcagttttaggaagcttgtttttgtcttttcagggtcattatgaccaaagaatttgatgcttggtagctaattttcaaaggctacttggattctgttactgcgaccacacagagagatcaggaggatgtacttcccttgcctatcttttcatttctatgtgtatatctgggctctggagaagtggactttggacttctcttccctgctgtgctccggggcttgtgcatttgaattgaatggtataataagctcttgaaggagcgggtgtgctgggagagtttggagttcctgatgaagcgtgcacaaagaactgtagggggtg

SEQ ID NO: 724061 - DNA, 108 bp, Homo sapiens
  misc_feature (40)..(40): n is a, c, g, or t
ctcagaaggagacgctattgctgcgatgctgcgtcacagngcgggaagcaattatccccgctgttggaactgcggcggccatggggccccgggcgggaggacagggtt

SEQ ID NO: 724062 - DNA, 326 bp, Homo sapiens
ctcccgtgttcacgccattctcctgcctcagcctccctagtagctaggaatacaggcgcccgccaccacgcccggctaattttttgtatttttagtagagacagcgtttcaccgtgttagccaagatggtctcgatctcctataggcacgtgctactaacccctggctaatttttgtcttttaagtagagacggggttttgccatgttggccaggctggtctcaaactcctgacctcaagtgatcctcttgccttagcctcctgaagtgttgggattacaggtgtgagccaccacacctggcctattttgagttagattttttgtt

SEQ ID NO: 724063 - DNA, 150 bp, Homo sapiens
gaccccatcgccccggcggagaagttcgaaacgctcaaggtcaagctgggcgacggctttgtcgggaccaccttcccggatgaggtcgccaatcccgatggcatgatggccaaggggcgcaagccgcactcggtgttcaccggcgctgtg

SEQ ID NO: 724064 - DNA, 353 bp, Homo sapiens
caggacaagatcctctgatgccaaaaccagaggctcataatagtctcatcttcatttagcatgctaatgaaaatagccgagtaagtaagagaccgtgcatatatatcaagcacttataattatgatcacaggctctcatcagcgtaagtgcatatgtccatagcaagcgattcatcctggacctatatcattagaccggcaacaggtccccattctatttattgcgtatatacacacagaagtctacagttaatcagttatataatatgtaaagtatattactagggtgaagttaatgacacgcatatttcgtgaatctgttgctgttccacaccgttatttgtacatgacac

SEQ ID NO: 724065 - DNA, 166 bp, Homo sapiens
ctccctcccccctcccccccgacatcccggaacaaataaataaataaggcgcgcgagagaggccaacacgtcgcggagggagatgttgttattttttgctgttgtgcgtccctgacgtcacatccacctgctgggtaaacaaccgggctcccagaaaaaaaaaaaa

SEQ ID NO: 724066 - DNA, 349 bp, Homo sapiens
taccggaccgaaacttatagtgctctatctatatgacaattacagctatgacccgctagctcgagtggacggtacggggaaacaccagtgtgtacggtattaccacaatgacctgaacggactgccagagtacctcactgagactgatgggctcatagtttggcaagcgcgctacgaagcatggggcgcgccccttgaagaagtgcgagaagcgtacttcatcgaggagcaaaacctgcgattccagggtcagtatcttgatcgagaaaccgggttgcatttcaataccttgcggtattacgaccccgacgttggccgttttacgacaccactataaggttcggctgta

SEQ ID NO: 724067 - DNA, 124 bp, Homo sapiens
aggccgttgtcagtgggaacattttagccctgccactcaaagtgtgatccaaggaccagaagcaacagcacagcaacgtcaaccagtatctcaggagcttgtaagacatggagaatctggggca

SEQ ID NO: 724068 - DNA, 155 bp, Homo sapiens
atcgagttataaagcagcatagacatcgtgatgttgaaagggcttactcttatccctttcaggtccttcacgtgagaccaaagaccgggtcaggggatgcacaaatcactcaccgacgtggccctggagcaccatgaggagtgtgactatgtgtg

SEQ ID NO: 724069 - DNA, 692 bp, Homo sapiens
gccagtccagtggaaaaaatctgttttacttgccacatggcttgagtatagataaagatgggaattattgggtcacagacgtggctctccatcaggtgttcaaactggatccaaacaataaagaaggccctgtattaatcctgggaaggagcatgcaaccaggcagtgaccagaatcacttctgtcaacccactgatgtggctgtggatccaggcactggagccatttatgtatcagatggttactgcaacagcaggattgtgcagttttcaccaagtggaaagttcatcacacagtggggagaagagtcttcagggagcagtcctctgccaggccagttcactgttcctcacagcttggctcttgtgcctcttttgggccaattatgtgtggcagaccgggaaaatggtcggatccagtgttttaaaactgacaccaaagaatttgtgagagagattaagcattcatcatttggaagaaatgtatttgcaatttcatatataccaggcttgctctttgcagtgaatgggaagcctcattttggggaccaagaacctgtacaaggatttgtgatgaacttttccaatggggaaattatagacatcttcaagccagtgcgcaagcactttgatatgccctcatgatattgttgcatctgaagatgggactgtgtacattggaagatgctcata

SEQ ID NO: 724070 - DNA, 105 bp, Homo sapiens
gcggccgcctactactactactgctcgaattcaagcttctaacgatgtacggggacatgccactgcactccagcctggtgacagaacgagactccatcgcaaaaa

SEQ ID NO: 724071 - DNA, 776 bp, Homo sapiens
acactgaagatcctggggtcgccatgggccgctgccccggccgttgttaccggtgtatggtgagaacaagccgtacccaaagtctcgctatctgccgaggtgtccctgatgccaaggattcgcatttttgaggctggggtcggaaaaacagtgcaagaagtggatgagtttccgcctttgtggccacatggtgtcagatgaatatgagcagctgtcctctgaagccctggtaggctgcgccgagattatgttggccaaataagttacagtggtaaaaagttgtggcaaagatggcttccatatccgggtgcggctccaccgcttccacgtcatccgcatcaacaagatgtagtcctgtgctggggctgacggggctccaatacaggcatgcgaggtgcctttggaaagtcccaggcactgtggccagggtttcaactatatggtccaagttatcagtgtcgcatccgcaccaagctgcaggaacaaggagcatgtggattgaggccctgtcgcagggccacagttcaagtttcctggccgtcagaagatgcacatctcaacagaagtggggcttcacccagagttcaatgcttgcatgaatctgagagacatggtggctgaaaagcggctcatcccagatggtgtggggtcaagtgcatcccctagtgcgtggcctctgggacgagtggcgggccgcatttcatgcacggctgccaaatgttgctgcccgctctttatactcatgcattcatgctactgcgggtctaaaaaaaaga

SEQ ID NO: 724072 - DNA, 229 bp, Homo sapiens
acaccaatcagtgaccgtgtgtgggctggcggctctttcttccccaccaacggaacccctggtgcaccaaccttccccagagctccggagcgccctctcctcatttgcaggttttggagcaagagcgtgcaggaagcccgcacccagcttccttctggcgttcagttcaattggtcgcccgtggagaaacctgtttttctttaactaaaaatatcccaaatgctaaaaa

SEQ ID NO: 724073 - DNA, 930 bp, Homo sapiens
  misc_feature (24)..(24): n is a, c, g, or t
  misc_feature (110)..(110): n is a, c, g, or t
  misc_feature (116)..(116): n is a, c, g, or t
  misc_feature (126)..(126): n is a, c, g, or t
  misc_feature (139)..(140): n is a, c, g, or t
  misc_feature (142)..(142): n is a, c, g, or t
  misc_feature (146)..(146): n is a, c, g, or t
  misc_feature (149)..(149): n is a, c, g, or t
  misc_feature (171)..(171): n is a, c, g, or t
  misc_feature (192)..(193): n is a, c, g, or t
  misc_feature (198)..(198): n is a, c, g, or t
  misc_feature (201)..(201): n is a, c, g, or t
  misc_feature (230)..(230): n is a, c, g, or t
  misc_feature (237)..(238): n is a, c, g, or t
  misc_feature (246)..(246): n is a, c, g, or t
  misc_feature (257)..(257): n is a, c, g, or t
  misc_feature (273)..(273): n is a, c, g, or t
  misc_feature (277)..(277): n is a, c, g, or t
  misc_feature (309)..(309): n is a, c, g, or t
  misc_feature (347)..(347): n is a, c, g, or t
  misc_feature (460)..(460): n is a, c, g, or t
  misc_feature (499)..(499): n is a, c, g, or t
  misc_feature (508)..(508): n is a, c, g, or t
  misc_feature (518)..(518): n is a, c, g, or t
  misc_feature (535)..(535): n is a, c, g, or t
  misc_feature (600)..(600): n is a, c, g, or t
  misc_feature (747)..(747): n is a, c, g, or t
  misc_feature (754)..(754): n is a, c, g, or t
  misc_feature (765)..(765): n is a, c, g, or t
  misc_feature (916)..(916): n is a, c, g, or t
gaggagcggcggggcggggggggnggtcgaaagcggagtgaaagagggaggcagggagccggagagccggaaccggagtcgcagcggggagacccctgtgcggtgcggangggggnggggcccgantctgacccgcgcnngnggtnggncatgggggagatcagcgacctngaccggaagatcgagcagctnngtcgntgngagctcatcaaggagagcgaagtcaaggncctgtgnnctaagggnagagagatctnggtagaggagagcaangtgnagagggtggactcgccagtcacagtgtgcggngacatccatggacaattctatgacctcaaagagctgtncagagtaggtggcgacgtccctgagaccaactacctcttccatgggggatttgtggacgtgggttctatagcgtcgaaacgttctcctgctgtgggacttaaggttcgctatnctgatcgcatcacactgatccggggggaccatgagagtnggagatcanaaaatgtatngtttctacgatgagtgncgtgcgcgagtacggctcggtgagtgtgtggcgctactgcactgagatctttgactatctcagcntgtgagccatcatcgatggcaagatcttctgcgtgcacggggggctctcccctcatcagacctggataatcgacatgaggaagcagagtgctcatgatggcatgtgtgactctctgtctgagcagagaacacagctggggtgagccngaggagnggctactattngagtagtgtgccattcagcagcatacataatgatctgcgtgcacaatgtgatgtagtatagtgagtcatgagagtgtatgttgtcgacactatctacgtgtggattgacatttgagtgaggattcagagatatattttagtgtcgagaaangggatcatcagagc

SEQ ID NO: 724074 - DNA, 818 bp, Homo sapiens
  misc_feature (24)..(24): n is a, c, g, or t
  misc_feature (110)..(110): n is a, c, g, or t
  misc_feature (116)..(116): n is a, c, g, or t
  misc_feature (126)..(126): n is a, c, g, or t
  misc_feature (139)..(140): n is a, c, g, or t
  misc_feature (142)..(142): n is a, c, g, or t
  misc_feature (146)..(146): n is a, c, g, or t
  misc_feature (149)..(149): n is a, c, g, or t
  misc_feature (171)..(171): n is a, c, g, or t
  misc_feature (192)..(193): n is a, c, g, or t
  misc_feature (198)..(198): n is a, c, g, or t
  misc_feature (201)..(201): n is a, c, g, or t
  misc_feature (230)..(230): n is a, c, g, or t
  misc_feature (237)..(238): n is a, c, g, or t
  misc_feature (246)..(246): n is a, c, g, or t
  misc_feature (257)..(257): n is a, c, g, or t
  misc_feature (273)..(273): n is a, c, g, or t
  misc_feature (277)..(277): n is a, c, g, or t
  misc_feature (309)..(309): n is a, c, g, or t
  misc_feature (347)..(347): n is a, c, g, or t
gaggagcggcggggcggggggggnggtcgaaagcggagtgaaagagggaggcagggagccggagagccggaaccggagtcgcagcggggagacccctgtgcggtgcggangggggnggggcccgantctgacccgcgcnngnggtnggncatgggggagatcagcgacctngaccggaagatcgagcagctnngtcgntgngagctcatcaaggagagcgaagtcaaggncctgtgnnctaagggnagagagatctnggtagaggagagcaangtgnagagggtggactcgccagtcacagtgtgcggngacatccatggacaattctatgacctcaaagagctgtncagagtaggtggcgacgtccccttgaaaaccaaattaccttcttttcagtggggggactttgtggtgggaccgtggtggtttctatagaggtcgaaaactgttcctccgtgttggcttgacaacttcaggggttccggttatccctggatcgcattcaaccattgatccgggggcaaccattgaggaagtcgccaaagaattcacggcaggtcttagtggatttatacagaatggatttgccttgcgcaaagttagggcttgcggatgaacttgtgttgtgggggctattggacttgaagaattttgtgagttactttaaggcgtggtaaggccattattcgaggggaaagaatctttttgcgttgaaggggggggccttttctccccttcctattcaaggaccgtgtgttcaagatttcggacacattcgagccgaaagaagagtggtgcgtctattgtgttgggcccat

SEQ ID NO: 724075 - DNA, 332 bp, Homo sapiens
cggcagtggcatgatcttagacatcactgcaaccttcaccttcacggttcaagcaattctcctgccttagcctcctgaggagctgggattacaggtgcatgccaccacgaccggctcatttttgtatttttaatagagacagggttttgccatgttggccaggctggtcttgaactcctgacctcaggtgatccactcacctcggcctcccaaagtgctgggataacaggcatgagccaccgttttcaggttgtcataactacattctaattgactgcatatttttaaacacaaattaaactagttatgttctccaccctactcagttttgg

SEQ ID NO: 724076 - DNA, 826 bp, Homo sapiens
  misc_feature (40)..(40): n is a, c, g, or t
  misc_feature (94)..(94): n is a, c, g, or t
  misc_feature (102)..(102): n is a, c, g, or t
  misc_feature (104)..(104): n is a, c, g, or t
  misc_feature (117)..(117): n is a, c, g, or t
  misc_feature (125)..(125): n is a, c, g, or t
  misc_feature (147)..(147): n is a, c, g, or t
  misc_feature (149)..(149): n is a, c, g, or t
  misc_feature (174)..(174): n is a, c, g, or t
  misc_feature (178)..(178): n is a, c, g, or t
  misc_feature (189)..(189): n is a, c, g, or t
  misc_feature (192)..(193): n is a, c, g, or t
  misc_feature (199)..(199): n is a, c, g, or t
  misc_feature (212)..(212): n is a, c, g, or t
  misc_feature (217)..(217): n is a, c, g, or t
  misc_feature (222)..(222): n is a, c, g, or t
  misc_feature (233)..(234): n is a, c, g, or t
  misc_feature (236)..(237): n is a, c, g, or t
  misc_feature (241)..(241): n is a, c, g, or t
  misc_feature (246)..(246): n is a, c, g, or t
  misc_feature (250)..(251): n is a, c, g, or t
  misc_feature (263)..(263): n is a, c, g, or t
  misc_feature (272)..(272): n is a, c, g, or t
  misc_feature (288)..(288): n is a, c, g, or t
  misc_feature (304)..(304): n is a, c, g, or t
  misc_feature (309)..(309): n is a, c, g, or t
  misc_feature (318)..(318): n is a, c, g, or t
  misc_feature (326)..(326): n is a, c, g, or t
  misc_feature (346)..(346): n is a, c, g, or t
  misc_feature (362)..(362): n is a, c, g, or t
  misc_feature (367)..(367): n is a, c, g, or t
  misc_feature (376)..(376): n is a, c, g, or t
  misc_feature (386)..(386): n is a, c, g, or t
  misc_feature (411)..(411): n is a, c, g, or t
  misc_feature (436)..(436): n is a, c, g, or t
  misc_feature (473)..(473): n is a, c, g, or t
  misc_feature (600)..(600): n is a, c, g, or t
  misc_feature (626)..(626): n is a, c, g, or t
  misc_feature (628)..(628): n is a, c, g, or t
  misc_feature (654)..(654): n is a, c, g, or t
  misc_feature (659)..(659): n is a, c, g, or t
  misc_feature (792)..(792): n is a, c, g, or t
aaaataatatgaaatgcagacttgtttaaattctcttgcngattctcttgaagacaatgtcacccaatgtcatggcctgaaagccagacaaganattatgangngttcatctgacgncgtattgnaaaaaacaaaattaagcctaananacaaaattaagcctaaaaaacagcnccanatatgtcggcntannacacanttcaaaaattcgnctggnttccngtaggaccggnngnnaggntggcnatgnnttccaaaatccnatgccaagnctttgtcacttctccncctcacctgggaagtnctccngcctttggntgagttcntttctacatcaatgactgtnatagcgagggcatccnggccngcccaatcnaatttctcanaatttcattgagtacctactatgcnccaaatacatgttgagcaccaaggntacatgtacatggccacaactaggcacacagcctggnaggcagtgcggtcgtgcataattgtcctcctatagctgtgaagcatataaaaacagtggatgcatcagcttttgagtttttaaggatgtttcctccacccctgccagttctcttgaataagactgcnggcatgacataccatgtcatcagggngnaaaggagcccctcagtttcagcagcnatgcnatagttgctgcttgatgggtttgagccctggatttaacatttattagctgatgacttggacaggtcaacctgtctattgaatccctcatccagcctccctcgaaggagacaggaggattaggtgagatggaanctatcaaagggcgttggccaggacttactgcagg

SEQ ID NO: 724077 - DNA, 260 bp, Homo sapiens
agcgagttatagagtgaccaagtagctcctctttaaccctctatggtctcaattactacagaagggctaggtgggaggatcgcttgagcctgggagttcacggctacagtgagctgtgatcgcaccactgcacctcagcctgggcaacagattgcgactctatctaaaacaaaacaaaacaaaaattaccccagggatcggatttgatggacatggtaatggcggtggtggagagagggacagtacaatctgacggtgga

SEQ ID NO: 724078 - DNA, 150 bp, Homo sapiens
gcacagaagatatcattcgatgtaggattcagcagagaaatattacaactgtaggtggaaaattgcaggtattgcctcccgctgctagagaatgtacagagataggtgtagagagacagagtgtagatatccacaaagggtatctatatc

SEQ ID NO: 724079 - DNA, 234 bp, Homo sapiens
gatctagaggatcccgtggtagggctgcaagcttataaacaaccagatcccacaagcgctcactcaatatcacgagaacagcaatggggaagtcggcccccatgagctaatcacctcccaccaggtccctcccacaaaactgggaattacaatttgacatgagatttgggtgtggatacagagctgaaccacgtcaagggtagttcaaccgctgagagggatcttctgcacgat

SEQ ID NO: 724080 - DNA, 1598 bp, Homo sapiens
  misc_feature (1377)..(1377): n is a, c, g, or t
ttcgtaccgggagggacctctatcagcctggactcggaggaccccgagcccacgccagcaccccacacatccgatcctccgggagatagtctctgtccctcggacagacgaaaaagtactgattccccacatgactccatggcctctagggatgcagatgatccagtacactgactggtagacctgggcacctgccttcccacaggcccacgacgcacttgacgacacacctatgggacacgacacgacgacgacaaccctgcaacgacatcaccaacaccacggcaccggttcgccgggacaacagacggacgcgacgacgacggtgtgacgctgtcggtgtggtgtgtatcttatgctacatagaaccagcctggtagctgtgcagtgatgtgtgataaatactactatgacagcaccctactagacgacgagtgtggtgtgttgaaaacatactatgaaaccatactactataggagatgagatgtgtgacgtagtgatgtatatatcaaatacgaaacaaccatacttcagaacgaacacatggaacatgacatttatatgatgaagattcatgcaataataaaacgaactgacagaagactagtcaaatcagtatataacacagcgacacgcggagcatgctaacacaatgataagacaacaacagcacggataagacgcacacacgaacagtctgaaacaggagaagacacggccacagacaagtacgctagccatacacaccaccaggacactcggcgaaaacacatgacaacaggaccacagtcaacggagggtacgacgcgaagcccccaatccaggctccacgcagacccttgatccgcccatcaaccagagccgaccccgtcgcacaaagaacagtcccatacaccgcgacagcatccacacactaacaccgccgaggatggcacatgacacacgacgaggcggcactcacaacagggctcgatcataaccccgacatcgacgcgaaccctcaatcggggcggcacacagaggcttcaccatatcacgagcgagtgcacgagcacgacacgaagacgccaccagggaagagagataacaaaacagagaacgaaacacaactaagatgacaaacacacgcggacacatcatctgcacagctacccagcgaaccccaacagcccaggtggaccgacgagggcaggggacctgtgagagactgccggggagcacaacagaccacaccacaagacacgacgcaaaacaaaaacaacaccacaatatacagagccgatgcgaaatcgagcggtggcgagacagactgaagcacagaaggcagacacggagcactgacaaccccaaacgcacaacgacatagagtgcgcaanctatactaagcacccgcaggcgcccagcccagggcggagctaagcacgagcgccaccgatgcgacgcggagcgaaaagacaaggtacatagacggtcagcagcgacgctacgtccgacatgcgacaccagatacgaagagagacgtgacagcgagcagccacacagcagcgacgacgacaacacgaagccacagagggcaccacatcaatacgatcccccg

SEQ ID NO: 724081 - DNA, 359 bp, Homo sapiens
tttatttatttagagacagagtctcactcttgtcaccaaggctggagtccaatggcatgatctcagctcacaacaacctccgccttccgggttcaagcaattctcctgcctcagcctcccaagtagctgggcctacagcagccaccgccacgcttggctaagttttgtatttttagtagagatggggtttcaccatgttggccaggctggtctcaaactccggacctcaggtgatccacccgtctcagcctcccaaagtgctggaattacaggcatgagcaaccgtgcccgtcagcttatttcttttaaaaatcagaacaaaacttggtttagatgtaagaaatgtggaagaaaagtag

SEQ ID NO: 724082 - DNA, 221 bp, Homo sapiens
tgtgtaccgtcatacgcaaattaagcagtgtcatacacgacattcacaaaagaaagtcaaaacatcatatgatcatctcaatagatgcagaaaaagcatttgacaaagtccaacatccattcatgatcaagaccctcgccaacagtgggtatagacgggaacactccctgaacattgatcactagtaacttagtgacaaaccccagcatcaaacgataact

SEQ ID NO: 724083 - DNA, 123 bp, Homo sapiens
gtttcacgctggggcttcgaggacttttacctgaggctgcacaaacaaaccaaggtatccggacccgccaagcagcattggagaggggccgaaccccagagcaggtgtactattccaaccttt

SEQ ID NO: 724084 - DNA, 699 bp, Homo sapiens
  misc_feature (1)..(1): n is a, c, g, or t
  misc_feature (633)..(633): n is a, c, g, or t
  misc_feature (640)..(640): n is a, c, g, or t
  misc_feature (681)..(681): n is a, c, g, or t
ntggccgggggcggcttgtttattcacactcagactggggggcgcatttagtaccacacacgccgacaataaccacagcacaaactcacgggcttcgaaatggacattcatcttttcgtgactacagctgcagaggccatatcaattcatgcgcaggactctaaagctacactgtacctttttataacgatgacgaggggggggcaagttcaccgacgatctttttctcaggttctatggatataccactaagctccttttcaataaaagcttgctttgaaaaatatagctataagattcgcgaggtaaccaagacatgggctcatagtcacagctgtttttaaaacagatgcggagctaaagccaataccaacctggttgataactttaaactggcaaattatgacctcataacggagaaacccatttctaaatcaacaaaaaaagttacgggtgctaaagattagacaaaaacttcctggcgggccttcccacaacccagaaaaaaggggcaatttatggaccctttccctttttatagaaagacccaataattctttaagtgtgtaaacgcaaccttttatccacccccctcctcataaaacagacccctgttatttccctctattgccngaggaanaccgcgacttaccccgggcttttgaagccccaaatttaaanaaacccccccacaaccct

SEQ ID NO: 724085 - DNA, 80 bp, Homo sapiens
caggggctgaagacagtgttggagcatccacagactggtttgtctcaagaagcatgttactaaatatgaaatagcaaaaa

SEQ ID NO: 724086 - DNA, 1728 bp, Homo sapiens
  misc_feature (1728)..(1728): n is a, c, g, or t
taatttttaattttcgtggggcccatagtttattggaaaattttttttttttgtggaaagggcgggggctcctcattatgtgttcccccagaactatagaaggtgcaggggctatattctcacggggccccgctctataccgcactatacaaccttataaacctccggggcctcaagcaatttcctccgtgccctcagcccttggggaagttaccgtgggtattatcacaggtgtgccccgcccacacccgcgccgcgtggtctctgtgccgcaatatactttctctatatctcgagcctcgtgctcgagtgtgttccagtgtggtcttttctcctctccatatcacaaaaagagttctattctcactctctctctcgagtgtggaggtctcaggtctccctgtgtgacaccctcttctctgtgtgtctcaccgagccctgtgtgagagtgtgttgtgtgtgtgtctctcaccagctgtgatagacacagagagcgtgtgcgcccgctgtgtgctctctctcacacttttctctgtggccacgagcgctattctcgagggtctctcgaggctctcctatgagcccgagtgtttctctctctatatattttatctccgctctcgcgcgctgttggcccccgagagagagcgctgtggcgcgtgggggcaattctcccagtgtgtgccccgcgtgacaccccctctctctctacgaggcccccgagggggttgttagagagcctctgcggtgcccgccgttgggggagttccccccagaggagagcactcttttctcccgccggaatctggggggggagactctgtgtctcggtggggtgtgcaccaagacccccgcggggtctcccgagagtctctcttttctccgcggggtctcctcttggcccgagtataacaccctgggaggggggggtggtactacacaaaacccccgcggtggtgataagacgccctccctcgtgggggagactgtgtccgacgcggtcaacagatgtgtccccccacgggtggggtgctcccccctacaacagaagagggggcgcccaccctggggtctcatacaacgcctcgtgtgagacaaagaaaaccctcgtggtccatgacacgacttgtttggcacagcccaccgacactttttggggctggttgcggcatcaaaccacaacgcacaatgagggagcgccctatataagactatcaccccaaggggggcgccccaggaaatcattcctgattgaaggaaaaaccccacaaagccttttcccccccgaggaagggaaccgccctttaacacgagcgggaggcagccaccaaaactgggcgatgggcgacacgattgggaggcccccctctatacaaaagagagggagaaatcccccgcggggaagggaggtggcgaaccaacgataacagaagagcgcacctctggaaagagccgcccacgagtatataacacacaccgcgcggggaccacatgtctttaaccaggggaggccccagaaataagagcccgcccccaaagggggagccactacaaaagagggccccggggggcaccacgagcacgacaccgggggagggacactcacccacgaggggtctctatatagatagagacccagctggatacagtaggcccacagaaaggagcatcacggccacatcctggtcgaccgcagacaacatagtggagtgattttacacacccgcn

SEQ ID NO: 724087 - DNA, 277 bp, Homo sapiens
  misc_feature (9)..(9): n is a, c, g, or t
  misc_feature (192)..(192): n is a, c, g, or t
  misc_feature (206)..(206): n is a, c, g, or t
  misc_feature (245)..(245): n is a, c, g, or t
cggaccacnaagagagccagggctgctgtttcgcgactcaccagcacagatttgactcagaaaactctgcccaagattgggcagaagttactttaaaaagaacttggttcagctggtcaacgagtgtcacgcctgtaatcccagcactttgggaggccaagccagatggatcatgaagccaggagttcgagnccagcctgaccaanaaggtgaaaccccatctctactaaaaatacaaaaattantcagcagagacgagactctgtctcaaaaaaaa

SEQ ID NO: 724088 - DNA, 426 bp, Homo sapiens
  misc_feature (426)..(426): n is a, c, g, or t
tttttttaagagatcacgtttagggcacttgtaataacagtaaagtttgaaaggtaacaaaggctgcccttggggagagactttttttatatatgtggactggagggtggcctcggccttacagggggtggaaaggatcgtgaaatagtgcacctcataatacaacacacatcatggtcttgagggaaggaaccttacttacaagttatttcaaaattgggggagagtttcaatgacaaaaatttgattattttactcgggccacgttaacatccacaggtgataacaccaacgcatttacataaacactgtgtaccatctgctgatatagtccagaaaacaaaactgtaaaccagtattccttctcgaaatctataggctcaagcaggacaatcgcttgaacttgggagactgaactcgcagtgn

SEQ ID NO: 724089 - DNA, 124 bp, Homo sapiens
gggaaaacaagaagatgtcccagccaggtcaccctccccaaaaactcctacaccctccactccagggacacgcagcccaacactcctgcacctgtcccacctgctgaagatgggataaaaatag

SEQ ID NO: 724090 - DNA, 81 bp, Homo sapiens
gccgaggacacggctgtatattactgtgtgagaggggactattggacgggcccacaaggagttgactactggggccaggga

SEQ ID NO: 724091 - DNA, 400 bp, Homo sapiens
  misc_feature (168)..(168): n is a, c, g, or t
gggatttgcatttctctgatgattagtgatgttgagtatgttttcatacatttgttgaccatttgtgtatcttcttttgagaaatgtttattcagatcatttgcctattttaaaatcagattgtttattttttgctgttgaaatgtttgaactccttgtctattctgnctattaacccctgtcatatgaataatttgcaaatattttctcccattctgtaggttgttttttcactctgctgattgtttcctttgctgtacagaagattgttagtttgatataatcccatttgtttgtttttgcttttgttgcctatgcttttggggtcttattagcaaaatctgtttctagaccaatgtcctgcaagttcctcccctatgttttcttcctgtagttttat

SEQ ID NO: 724092 - DNA, 297 bp, Homo sapiens
tcaaacatataaaaagtcaaatgctacaccaggactcgggctatcattattacatcattagaaataacgagtacaccttattaagattctgcaaagctagcacaatgaagatcttgccttctgaacatatctacaaacacacatacaaaaaaaccatataatttatctttacaaaaattacagccaagcaatagaaaagaaggatgttcatgatagaaatagcaacacatatgtttagtacatctatcttacaccttgaaatgctacatcttataccctgatatgccattcttgcag

SEQ ID NO: 724093 - DNA, 383 bp, Homo sapiens
ctgaaagagatccttagtatctgtattcggtagtggatgttacatacaggaacgttccggtttattcacaatgaggtgagacatctaccaggctttgagaccaagttcaatcttttcctatgaatctctatctctaaagcacgtcacagggaaaaaaagggtttaaagagaaataacttctccgggcaaaaactgaggttagcgggcctatcagctgtttcttctcactccaccactgctgctgactggaggagcagcctggaaagcagccgccctcccgcaaacaggtaaaccacattacctattcctgtggcggaggcaaatggatggtcaaacctaacggggtagtgctgaagttcggggacaaaagcccatcggggagt

SEQ ID NO: 724094 - DNA, 716 bp, Homo sapiens
  misc_feature (124)..(124): n is a, c, g, or t
  misc_feature (165)..(165): n is a, c, g, or t
  misc_feature (171)..(171): n is a, c, g, or t
gtggagaccttggcgcccctggccctctggagcaagaggcgagagaggtttccctgagagagcgtggtgtgcaaggtccccactggtcctgctggtccccgtggggccaacggtgctcccggcnacgatggtgctaagggtgatgctggtgccctggagctcccntagccnggcgcccctgccttcgggaatgcctggttggaacgtggtgcagctggtcttccagggcctaggggtgacagaggtgatgctggtcccaaaggtgctgatggctctcctggcgaagatggcgtccgtggtctgaccggccccatttggtcctccgtggtcgctgctggttgccccttgtgtgactaacgggtgacgaggtggtcccagcgggcctgcttggtcccactggagctcgtgttgccccgctggtaggacctgctgtgtgattcctggtccgccccggtcgcttgctggcttctgcctggtccccctggttgctgctacgggacaatacctggttggctagtaggggcgaatactggtgatgcctggtgcctaagccggctgatgcttggtcccgccttggccctcggctgtgatcccggctggaacccctgagcccatctggctggacttgtttggtggctccgtgagagccatgggctgctcgctgggaagcgtcgggtaccctcgtggtgcctactgggtttccactgtgtgctgca

SEQ ID NO: 724095 - DNA, 613 bp, Homo sapiens
ggggggcgaacacgccgcggtcctcgtcgatggtgagcgcagccattcaggtctggtccgtggagggtggggctgtaggggaaagttgctaaagaattaggttgagggctcttgacagacgggtttacaaaaacgaagtttaatcgaaattcgggggagtatagtggtttacgacagattgcttgtcggtttgcagaatcagacagcaagtgtggtacaaagactgcaaaatgttaagagaattcaagcaggactctgcagcaggcattgcaacagtattttaacctaagagtgaaattcaaataaagacgtgtggacatgtgaaacgcatcaggtgaaatgtgtgcctttgaaagtgggaaaaagctgccagggcggacaacgcttatttaaaggccaaaggggagaacgggcccggggttttggcattaggagggaggactccatttgttgggaaaataacaccgccgaatgatagaacggacaacgaaatagtttggggccttgtggagaatttcttgtacacgaaagtcttggtgtagacaaacttctttaacaagggaacaccatttgataggcgccgaaaaaaactctaattttttaaaagaatcac

SEQ ID NO: 724096 - DNA, 857 bp, Homo sapiens
tgcgcgaaccggttatcgctgacgtccaggtccatccggacatcctggccgcattggaccggacggccgccaccttggagtccatgggccacgtcgtcgagcagacgagtgccccgttcggcccgcgtgagtgggactcttttcggtgcgtgtgggagtgggggcggcggcgataccggtcctgtccgaacgtgaggagctcttcacacccatgtctcgttggctgcgggccgggggccgacgtcgcagcggagtcgagctggccgaggcgttggccggtatccagatggtggcccgtcaagtcgggcagcattggcagcggttcgacgtcattgttagcccgaccttggcccagcctcctttgccagttggggctttgcgggacgatgaggatccggcggccgattttgacgcccagtgtcgcttcacaccgtggaccagcttgtggaatatcaccgggcgcccggcaatgagcctgccgctgcacaacacgaggatcgatggtgtcgagctgccgatcggcatcatgattggcggtcggctgtacgacgaggccaccctgctggcactcggatgtgccctagaaaatactcgggactgcgaacgcagctgccgatgatcaaaactcccgccttacctgcggtggcagcactgacatgcctgcccacgggcccgggcgggagtttttgcatgtcgacctgtgcgcagccacggccgcgcacaatgacgtgacgtgacgaaaatcgtcacttgccgcgactgccgcacataatgatcgccccagaaccgaaacggtcctggggcgaatgtgggtcagggttgtaagtaagacctcagtccttcttcatggtgccggt

SEQ ID NO: 724097 - DNA, 390 bp, Homo sapiens
aatgatatcagaatatactactggaagtacctaaaatactcagtcaatcgagggttatctgtaaaggctaacgctgagcacaaggcaagagcaacgtcggtctctatatagaatgtgaggcatgtagaataactggcttatatcaagaattgattacaacaggtgtatacattcgcatttaatttacatagacatatatcaattgttacaaaagaaaatcgtttactttcatttccttaggaatatgagaataacagacacgttgagaagaaaattggcagatcatggaccccaaaaagaaataacagaactcattcctctctagggcctaacatcaaagctctggagtgattttaaaatgtttttaaaatcgctccaaagcctgttagg

SEQ ID NO: 724098 - DNA, 141 bp, Homo sapiens
tggcgttaagataaggcttcaagcagaaacaaaaagaggagcagaagaaactcgaggagacttaagcgaaggccgcggggaaggggcccttgcgcacaggtggaattaagaaatctggcaaaaattaagctgttccttgtg

SEQ ID NO: 724099 - DNA, 235 bp, Homo sapiens
gctgtgaggggcggtgggacccaggcatcaggagcgggatccacctgagttctcaaagaccttgtcggcccgtggcccttcctgtccggcctccagggggcacccagatctccacccatgtgcgtgaccacccgcctccccaccaatccctcagcgagattctagcagagtgggagagagccacggggccgtggggacccaaggagtgagaaaaggggctggcagacgagcaggg

SEQ ID NO: 724100 - DNA, 455 bp, Homo sapiens
  misc_feature (282)..(282): n is a, c, g, or t
tgagcgcgcggcggccgacgagatcgccgtggaccgcgacgtgccctggggcgtcgactcgctcatcaccctcgccttccaggaccagcgctacagcgtgcagaccgccgaccaccgcttcctgcgccacgacgggcgccttggttggcgccgcccctgagctcggcccactggctacacgcctggagttccgctccggcaaggtggccttccgcgactgcgagggcgttacctggcgccgtcggggcccagcggcacgctcaaggcgggcaaggccaccanaggtgcggcaaagggaccgaatgctccttgtgctctggacgcagaagctggcagcccaagggatcagtgctggcaggcggccaacgagaggaacgtgtccacgcgccaggtatggacctgtctgccaatcaggacgaggagaccggaccagcgagaacctttcccaagcctgg

SEQ ID NO: 724101 - DNA, 307 bp, Homo sapiens
  misc_feature (45)..(45): n is a, c, g, or t
gggatgactgtggtggtttgtcgctaaggaggcaacagtagggtnccaggcggcggggcacgtagagcagttagcatggatccatggttattccttaggtcatgagacagtgtcggtgcacctcatgagctgtgcatttgttgttcctgggcagtcctgtcggccagttaatccggcggctcttaggaagtaaatacggatttttttctttccttttttttttgttaaagattttatactgcgtcttgttaaagtcctagggatgtgtgtgtgtgtgtgctattaaaactgctttttctgggtggga

SEQ ID NO: 724102 - DNA, 216 bp, Homo sapiens
  misc_feature (209)..(209): n is a, c, g, or t
tgatctagacatccctaagctggtctgggtcggggatgggcaggagctgagacagcaggctgcacagcggacagttcagaggcaagggttctaggcccttgagaatccacagtgccaaacagacccagatagctacggggtttggtaccctgggcgaggccttaggacaggcagaaagtcccagaggcgagggcgatctggctgcgacnattctgt

SEQ ID NO: 724103 - DNA, 111 bp, Homo sapiens
cgactctagcaggatccccacatacttctatgtggtcctggtcaaaagtggtgcactatatagggaatagggtgcaatttgagatgcaaacagagtttcagtgaagaacaa

SEQ ID NO: 724104 - DNA, 992 bp, Homo sapiens
  misc_feature (51)..(51): n is a, c, g, or t
  misc_feature (76)..(76): n is a, c, g, or t
  misc_feature (84)..(84): n is a, c, g, or t
  misc_feature (111)..(112): n is a, c, g, or t
  misc_feature (120)..(120): n is a, c, g, or t
  misc_feature (140)..(140): n is a, c, g, or t
  misc_feature (149)..(149): n is a, c, g, or t
  misc_feature (167)..(167): n is a, c, g, or t
  misc_feature (172)..(172): n is a, c, g, or t
  misc_feature (201)..(201): n is a, c, g, or t
  misc_feature (208)..(208): n is a, c, g, or t
  misc_feature (212)..(212): n is a, c, g, or t
  misc_feature (225)..(225): n is a, c, g, or t
  misc_feature (229)..(229): n is a, c, g, or t
  misc_feature (250)..(250): n is a, c, g, or t
  misc_feature (252)..(252): n is a, c, g, or t
  misc_feature (254)..(254): n is a, c, g, or t
  misc_feature (257)..(257): n is a, c, g, or t
  misc_feature (268)..(268): n is a, c, g, or t
  misc_feature (280)..(280): n is a, c, g, or t
  misc_feature (283)..(283): n is a, c, g, or t
  misc_feature (289)..(289): n is a, c, g, or t
  misc_feature (298)..(298): n is a, c, g, or t
  misc_feature (304)..(304): n is a, c, g, or t
  misc_feature (311)..(311): n is a, c, g, or t
  misc_feature (315)..(315): n is a, c, g, or t
  misc_feature (317)..(317): n is a, c, g, or t
  misc_feature (319)..(319): n is a, c, g, or t
  misc_feature (323)..(323): n is a, c, g, or t
  misc_feature (331)..(331): n is a, c, g, or t
  misc_feature (341)..(341): n is a, c, g, or t
  misc_feature (344)..(344): n is a, c, g, or t
  misc_feature (364)..(364): n is a, c, g, or t
  misc_feature (379)..(380): n is a, c, g, or t
  misc_feature (390)..(390): n is a, c, g, or t
  misc_feature (397)..(397): n is a, c, g, or t
  misc_feature (403)..(403): n is a, c, g, or t
  misc_feature (406)..(406): n is a, c, g, or t
  misc_feature (408)..(408): n is a, c, g, or t
  misc_feature (412)..(412): n is a, c, g, or t
  misc_feature (426)..(426): n is a, c, g, or t
  misc_feature (429)..(430): n is a, c, g, or t
  misc_feature (445)..(446): n is a, c, g, or t
  misc_feature (456)..(456): n is a, c, g, or t
  misc_feature (458)..(458): n is a, c, g, or t
  misc_feature (460)..(460): n is a, c, g, or t
  misc_feature (463)..(463): n is a, c, g, or t
  misc_feature (466)..(466): n is a, c, g, or t
  misc_feature (476)..(476): n is a, c, g, or t
  misc_feature (480)..(480): n is a, c, g, or t
  misc_feature (486)..(486): n is a, c, g, or t
  misc_feature (492)..(492): n is a, c, g, or t
  misc_feature (507)..(508): n is a, c, g, or t
  misc_feature (511)..(511): n is a, c, g, or t
  misc_feature (563)..(563): n is a, c, g, or t
  misc_feature (573)..(573): n is a, c, g, or t
  misc_feature (577)..(577): n is a, c, g, or t
  misc_feature (579)..(579): n is a, c, g, or t
  misc_feature (599)..(599): n is a, c, g, or t
  misc_feature (605)..(605): n is a, c, g, or t
  misc_feature (610)..(610): n is a, c, g, or t
  misc_feature (615)..(615): n is a, c, g, or t
  misc_feature (626)..(626): n is a, c, g, or t
  misc_feature (629)..(629): n is a, c, g, or t
  misc_feature (665)..(665): n is a, c, g, or t
  misc_feature (734)..(734): n is a, c, g, or t
  misc_feature (778)..(778): n is a, c, g, or t
tctcttcataattgaccccaatggagtcatcaagcatttgagcgtcaacgntctcccagtgggccgaagcgtgaanaaaccctnccgcttggtgaaggcgttccagtatgnnaaaccaanatgaaaaagtctgcccagcnaactggacnccggattctcctacaatnaagcnaagtccagctgcttcaaaagagtactttnagaaggnaaanaagaaaataaccnatgngaatctgcaccttctaaactnananaanaaccacagttnaaacctgctttnatnattttnaagatggtnatttgnagaaggnaagnancnaatnatgcttgnattcaaaagnatnactcaaaatgttttgttttngaaattctggcaaanncctttaaaanatggtangttgcnagnanaagnaatcgtttattggnaanntcttggtggctggcnngctagtttcnananaanaanatttgcctcnaaanaacgcnactctncactcatcactcaannganacactcctctcccttaccctcaccccaccctcccctataataaactagagcnacacacaccnaacncntctcatcaacgccccccacncccccntcttnaatcnctttctattanacncaattttcttttaagctaacaaagatcataatttcnaatgattagccgtgtaactcctgcaatgaatgtttatgtgattgaagcaaatgtgaatcgtattatttnaaaagtggcagagtgacttaactgatcatgcatgatccctcatncctgaaattgagtttatgtagtcattttacttattttattcattagctaactttgtctatgtatatttctagatattgattagtgtaatcgattataaaggatatttatcaaatccagggattgcattttgaaattataattattttctttgctgaagtattcattgtaaaacatacaaaataaacatatttaaaacatttgcattttaccacc

SEQ ID NO: 724105 - DNA, 210 bp, Homo sapiens
atcaactcggtgcaggcactgctcctgtacaatatcggtgacaaggaactgaccgccggcgagttgcgcacccgaggctactatctcggctccaacgtctcctacaatctgaagaagctcgtcgagctaggcttcctcgatcatcagcgctcgcgcgtcgatcgccgctcggtgcgtatccgtctgaccccgcagggccaggaagtccgc

SEQ ID NO: 724106 - DNA, 685 bp, Homo sapiens
  misc_feature (47)..(47): n is a, c, g, or t
  misc_feature (235)..(235): n is a, c, g, or t
  misc_feature (259)..(259): n is a, c, g, or t
  misc_feature (358)..(358): n is a, c, g, or t
  misc_feature (427)..(427): n is a, c, g, or t
  misc_feature (471)..(471): n is a, c, g, or t
tgtaaacgcaagggcccatataagcgtgtattcaaaagtatccctcnaaatttttggttttgggtaattggggatgagacttttaaacatggttagttgttagtcaaagaattggtaattgataacatctggggccggcaacgctagtttctacagaacatatttcgcttatataaaaggtattcttagctcatgtctcaatgaaacacttttctttttagccttacttaattcntgcgtatattaaagtagaccaccncacattgaaagcttctgatcagcggtcctgaaattttcatctgaaatgtctttgtattaaactgatttttcttttaagctaacaaagatcataatttcnaatgattagccgtgtaactcctgcaatgaatgtttatgtgattgaagcaaatgtgaatcgtattatttnaaaagtggcagagtgacttaactgatcatgcatgatccctcatncctgaaattgagtttatgtagtcattttacttattttattcattagctaactttgtctatgtatatttctagatattgattagtgtaatcgattataaaggatatttatcaaatccagggattgcattttgaaattataattattttctttgctgaagtattcattgtaaaacatacaaaataaacatatttaaaacatttgcattttaccacc

SEQ ID NO: 724107 - DNA, 457 bp, Homo sapiens
ttttttttgagacagaatctcactccatcgcccaggctggagtgcagtggccaatcccggctcactgcaacctccacctcctgagttcaagtgattctcttgcctcagcctccacagtagctgggactacaggcacccaccaccacgcctggctaattttgtaattttagcagaggcagggcttcgccatgttggccaggttgatctcgaactcctgacctcaagtgatccaccccctttcggctcccaaaatgctgggattacaggcgtgacgaccactcccgggcttaagacacatttttatgtgaacaaaaagttacaaactacagatagaacatgattctatttgagttatttcgtgtatatacataaatatacactatataaacagggggttcagggatacaccaccccaaagtattggcacgtcgacgcgggcgcaattttagtaataata

SEQ ID NO: 724108 - DNA, 954 bp, Homo sapiens
gcgtgagaggtctgtcggatgtggccattatcatggaatgataagaccctgtgtcttgaccttgcgtcgtacctcaggagacccgcacccctgaaaatactccttggcgtgaagaagtgaccagtctctgtgaccttccttgaatccgataccgcattggaagtgaccggggagacaggagggtcatcgcatcagccagtctgctgaatggtcgtcgggtgaaagactagcggctgttacggcgtcttcgtcaacgaattcaagtattggctccgcggaacgcggccaggtcaaccactccagtggtggttccaagcaccggggacgaggccccaagggagctggaaaagcatgtgacagcgtgtgtccaggccacagtctgagtactagtctgcaatggaaccagtagggacaaccttgtaccagggttcaacatgcctgggtcacagcgctaccagtggtgttgggcgcagacagcgcaaaccggtcgacacgaatagaaccgcagggatgtgcagggatggagcgcgtggcagcggatggccactcaaaaggtggagaaaagccatacggaatattactgggggtccctgacggttggtttcccagagaaggatgcggggatggaatcccctggaatcttgggagtagtgaacaacccgggactgcgcgagcggggcgcttattcataaacaaggtactgtgaatctgggaataggtagagggtacaaggtacgcttgctataatacatgatgttccaaccaacataagaatatatcggacccagattgttaaaagtgccacgggccctcgagcctgccaataactggttactagaccccctttgttagagtccataatataataatgtaagatcaacagacacctgaatcacactgtgtgaagctagagatgatttgaaccaaaggagtgagacacgttgctcaagggcc

SEQ ID NO: 724109 - DNA, 453 bp, Homo sapiens
  misc_feature (22)..(22): n is a, c, g, or t
  misc_feature (44)..(44): n is a, c, g, or t
  misc_feature (126)..(126): n is a, c, g, or t
  misc_feature (195)..(195): n is a, c, g, or t
  misc_feature (239)..(239): n is a, c, g, or t
gctcagggaacctctcctagcntactgatctgctatataagtgngcaccccttgaagctcgatcacgtccggactcctgatgtcttgaaacgattttcttttaagctaacaaagatcataatttcnaatgattagccgtgtaactcctgcaatgaatgtttatgtgattgaagcaaatgtgaatcgtattatttnaaaagtggcagagtgacttaactgatcatgcatgatccctcatncctgaaattgagtttatgtagtcattttacttattttattcattagctaactttgtctatgtatatttctagatattgattagtgtaatcgattataaaggatatttatcaaatccagggattgcattttgaaattataattattttctttgctgaagtattcattgtaaaacatacaaaataaacatatttaaaacatttgcattttaccacc

SEQ ID NO: 724110 - DNA, 114 bp, Homo sapiens
ggtgatctaaggatccccaactggtcgagtcgagacagctgacacatgtgaacctgttctactaaaaatacaaaattagcaggtgtggtgtggcgagcctgtaatcccagctaa

SEQ ID NO: 724111 - DNA, 695 bp, Homo sapiens
ggtccatcgatccttgagtactatggctctagctagatgaacgatgatggtgttatcgtgccttctggacacaggacatatgcagaaataaactcagtagcctgagtttatctggcacaatacgtggacagagcatgagagagacggctccggctgggtaggcaggagtacaaatggcaagtacggaggcaggacgccgcagggaaggatgctcaaatattctcatgactgttccaccgcgcggaggactcggttacgagtgccaggtgggtccaagtgaggacagacgtgatgggttgagccggatcatggctcaagtcactagaggtgtcactttcgtcattcaaacggtttgccccgtggtgatccccctacgataagcacacgtacgatagtatagaggcgatagtggcaccatggagtatgcccgtagcctcgcgacacgtacatgactggttgaatctactcattcacaaggaaagcttactagctaagaggcaagaccgaatacgcattgaataggtgagctgcgcttagagggccttgacatacaataggtcctaagtacattgtgacctaccgttgcgcagggtaactttgaagtggaaccccccatggcatcgcgcagggcgttcatcaccttagggcactggttgccgtttcaccatcacacacccaagttggtggtactcttc

SEQ ID NO: 724112 - DNA, 576 bp, Homo sapiens
gtacatcgatttactcagacttacgtcttaaataggtagctaacattagctgactatctacagatgtgtgccactaaatctcatgtgccagaatagaaggttttactcgactcctatgaacacaggttaaatagcatattttgttgttgttgtttccgtgtatgctgttacagaaagttacttaggtccattcatttatccccctatatatgaaacaaaattctgctttcttacaagccccttttcagttaatctcaggtggctatcatacttaaaattgtggagaattattttcatccataaggcctgtaggaagatgcccctacctcaaaacttattgggataaagtcaaaaaagggtcatcctcttaaaggtaaaacaggaaaatataaatcaatcctagatttggaacaataatacactgtgcaatagagtctggacatgtgtggctggtgggtggagattctgcaaagccatgagtccctggaaggtaaccagcagactaattttacagtgtgacatagcttatcacaatagcggacaggaacctgggttaaaagaggactcacttgggca

SEQ ID NO: 724113 - DNA, 91 bp, Homo sapiens
tttttttttaagcaaaggagattgcctgtctaagagtcacaggggcaaactgggggcctgaaaagagtgaataacttttgtatgattccta

SEQ ID NO: 724114 - DNA, 406 bp, Homo sapiens
gactttttgggttctgtttgctcatgccttccaaaagttaactgaccacattatattacaatttaaaaatatcccatccacaatgatttgatactgtagctttggaaatattatctttaaagtatttctttacaaccaagaaaatgataaatatggagcaacattagtatttaccaaatattggccacatagagtaacagaattttagaaatgaagggggaatcaatgcttatcagttagctgcctcactttacatatattaaactaaggctcagaaatttaaatgacattgcaaggttgtagaaccagaaagggaacctaggtctcttaatttttaacttcaatgcttttggctctcagtaatgttaatatcagaattcatactggctaaaatggttaccttgac

SEQ ID NO: 724115 - DNA, 818 bp, Homo sapiens
gagatatcgacttcgcgaggtggtgtggcgcacggtcccattgccagaatgatgaggctctggtcaaggtaaaatgcattgataaggactactaccatactgcatcattagacgaatgtacattgataaacatgattgtaggatgaggaatgtgcatatagtgatcaggactatatggtctgtagcaggcgagtcataacattaaacagaccatagttccttgcgagagtgcgactgtacctcattaaatatcgatacgtggagattttccacagataaagatatgtgggatcaaaatgttgaacaactttcctgatcattataaagggaggaggaggaaaggcttttgtgcaagaggggttggatatcatgagtgatcttcagagatagcttggaagaaggcgaagatactagtaaagtatatgcttccaagatatattctttgagtagaagcaagtatcattctgaactacatgctgttgggctctcttgtgccatgtaaaactttattgttgcaacattagttcatggatattacaaagtggcgtgggggggaggtgtggatcgttgtcagatccaatgggccaaatttgcgagtggtgtacagcacacaaggtgtcatttttgcttatgcgcagaaagtgcacataggacttgttgcggtgcatgtgggttggagggttatttgctttgtccacgattccaaggaaatagtggaagaaggttccttgcgattaatcaggattcagagtaaaaggaaggaggatgtgtacagagcaaggacttgttaggcacttgaaagattttgaaaagtgggc

SEQ ID NO: 724116 - DNA, 539 bp, Homo sapiens
tcagtcggtaccatgtaacatctatgagagatatgggcttcacgactgtaggacagctgtactcagaagtcatgggctctggtgatccgccgtgcctcacctttctatcgtgctgggattacgaggcatgagccatagctgctggccctttccaattctttcatgctctttgcactaatagaggacagggtatcattatatggcccaggcgggtctcgaactcctggcgatcaaagtaatctgtgcaccgttggatcgtcccaaagtgctgggattataggcatgagccatcacacctagcgagttttgtgtaatgctgtcacgtgtatgtaccaggggaatcaaggtattgaacagattgattagcacaagggtcccaatgtgctactgacttagagccatagttaatctcttcccccatcttggccacctgataacccttcatctgtctccatctgtggtttcgtcatttcaaaaagttacacagatgaactcatggtatgtagctttccctgggtggcttatttcacttagcatag

SEQ ID NO: 724117 - DNA, 259 bp, Homo sapiens
ctttatactcgtgaggtatttgcagcttcctggttgccctgatgcacaagaaccggcggaaggaccggaatgctaggggccatgtctcttcaccattgcgcttcgccactctacgaggttccctaagagatgcacgggaacaagcagcacctgcagaaggacttcttcctgtacaacgcctccaaggccaggagcaaaacctacatcaacatgcgggaggtgtcccagcgcttccgcctgcctcccagcgagtacgtca

SEQ ID NO: 724118 - DNA, 742 bp, Homo sapiens
gggcaggttgcctggatgcctcatgagggttgcgaggcggccacacggctgagtctgggaaggaggtgaggaagcctggggagcgagaaggcctgctccagacgttgggatggtctggagtcccctccgtgcacctcagggtaagtgggatcgtagacccgcctcgcattgagcacgggaacacaagttcagagattacactcgtcaaggtctgagaaggctggagggaggatggtggatgttggtggacaggtgggcccacgagcccgggctctttgatcagtcttggtacactgagacaccagagtgtctggacactgtggtgttggcgcctgaacacaggaacaggcactcgccaccggcatagtccgccggccatgctggccacgggccgggagcatcaagccacacctatagcctcctggatggcgtcgcacaagcgaactttcgagcttttcgcgtggaccgctttgcgggaggcgaccgaattctcttgctaggtaaccattcgcttagggcgggcggtttaagttcaatggggcgctcggcttaaacccattgtgggggtaaggggacctaggacgtaggacccccaagcggtcctgtaattgatatccgccttagacaggcagaaccacgagaagtaggcaagtcctctcctggatgaagctccttccacggagtggccccccggcaaccgtatgattgtgaggaacggccacctgtgaactggaaccattcg

SEQ ID NO: 724119 - DNA, 719 bp, Homo sapiens
agaaatagcgtgaggcgggtgttctacctcaccccacacaccatgcttacatggatcaccgcgatcaacatccacatccgtgacctccaccacccaccatgtcagctgcagcttagcacacacactgttctggtactgatgctgggtctgctgcataggattaagctgctgggggatgtctaaaggcaggaccactcataaggacttaatgcgaagcccaggcgtatgcctacacgcccaaatacatatacactatgaccctgagaatgggcatcactgtgaacatggggatcatgccaaggcgcttgtcagagactctgacagtgctccatagaatgacacagactatacaggtcggagagactctttgaacgtccatgacaccgcaagatgaggactcccactgtgcaccagctggaccatccgcgactgtggctagtggtgaatggcccactgggtgctgaacatacatacactgagagaatacccacacactctgtgacgagtgtgtcgcccgcaatatgactatacacgtatcataccaagacttggcgaatgaaacacatggctaccagatacactacccaactgactaactggatctatgaatcgaagtgccaggttactggaatactaaggcttcagaatgcgcgacccatcgggaacagagagcaccgcaactctcaagacatctaagaaggctgccataacaggacgct

SEQ ID NO: 724120 - DNA, 157 bp, Homo sapiens
tgtgtggcgactctagaggtcccaacgtcagcacctcctggccctctagaacttggccaacaccacatgctgccaacacggaccaataaaaaaaaaggtgggttttttttttttttttttttttttttttttttttttttttttttttttttttttt

SEQ ID NO: 724121 - DNA, 123 bp, Homo sapiens
caaagcttgttgttgatcagattcactgtttcatcatatttattgtaaaaaattttttgttttgtaaatatgttccaacaaaatgtgattggtctaaaatatttgtaatgtatataaggttca

SEQ ID NO: 724122 - DNA, 1207 bp, Homo sapiens
gttctttatctgctctctctctcttgctttccctcttaggtatattgtgcttttcttcttccttgtgttctttcgtttcttcctctctttttttgtttgtctcctttcgtctccttgattctccctggtcctctcgtcctttgtcacgctgttttgttcccctttggtcctcctctccttgttccccctgttttctcttcaccacctttgtctccttctctttttctatcctttttctgtccacgatttctcatgctcgtgccgcaacaatgttattgtgtctggcttccccaatacctttatatttaaaatccctcttttgggtcccctttgtgactctccttaacccaatgtcgaagccccccatcctgcgtcaataaggactttccccagtactcgtgtaatatacgcgggctatggtataatactccctcacactcattctctaaccccctggccttacactttgcctaccccttgccttgtgactatccctatgagccataattatcaccagcgtccatcttgcctacgacacttaccagaccttaataatccgctccattgcataactctgtcaatctacgcccaccattaggccctctgtagtacaccacgcccattttcgatcccaaaccccctttgaagcttctcacccggccgcacaatcaattcttccataaatccgccccccggacattacaatccctccattacgtattcttgctcctagcccaactccacaatctatcgaaaacgccacactcaccacggtcgccactcactaagtcctcttctccaaggaacttcacaaacttctaactccccctaatagcctttttgaatgaactttctagccaagccttcgctatacctcgcccttacgcccccccacctatttataccctatctgggaggaaactcttctgtgtctatgtaacccaccgtttctcctgagtcacaaataatcacacttctcctaacttaccacggaactcacacacatactagtcaccagccctataactcccgtctacatatgttaccaccacacaccacatggggctcaactcacccacccaccacttaacacaccattaaaaccctcattcaccaccgaggaaaacacccctcaatgttcaaaacccctatcccccattttcctcctatccctcaaccccgacatcattaccgggttttcctctta

SEQ ID NO: 724123 - DNA, 750 bp, Homo sapiens
ggccgccgcgcgccaagttcctcagccctggctcctgcccagatgtttagggtgttggcggagcacaaaggggacagagtcatcgccgtgtcggggctaggatatgatgggtgtgttctgtagttgctgctaagcgaacgcccgttggagcttacggaggccttctgaaagacttcatctgcgtactgacttgtctgaatgggctgccaaggctgcctgtctgctggcaaagtctcaccatgaaacagttgacagtgtgagttatgggcaatgtcctgcagagttcttcagatgctatagtatttggctaaggcagtgtgggtttgctgtgtgggaatcccgaaaggagacccgcagctctcactgattaataggctctgtggtgctggtgttcagtccattgtgaagggatgtcaggaaatctgtgttaaagaagctgaagtcgtttatgtggaggaacggaaagcatgagccaagctcgctagtgtgtcagaaatgtgcgtctgggaaccaagcttggatcagatatcaaggctggaagattctttatgggtatcattcccggatcagcatgtccagctccccatggcaatgactgcagagaatcttgctgtaaaagacaggaataagcagagaagaaatgtgacaaatatgccctgcagtcacagcagagatggaaagctgttgaatgatgctgtgtactttaatgatgatactggcaccaatgtgatgtgaagagaatgataggaa

SEQ ID NO: 724124 - DNA, 186 bp, Homo sapiens
gccatctacctgcacgttatgtagtaaagtacaaaaatccagccaggtacgtggcaggcacctgtagtcccagctacttgagaggctgcggcgggagacctgcttgaacctgggaggcggaagttgcagtgagccaagatggcgccactgcactccagcctgggcgacagagtgagacgctatctc

SEQ ID NO: 724125 - DNA, 368 bp, Homo sapiens
  misc_feature (174)..(174): n is a, c, g, or t
  misc_feature (203)..(203): n is a, c, g, or t
  misc_feature (218)..(218): n is a, c, g, or t
  misc_feature (299)..(299): n is a, c, g, or t
  misc_feature (301)..(302): n is a, c, g, or t
  misc_feature (321)..(321): n is a, c, g, or t
  misc_feature (360)..(360): n is a, c, g, or t
ttttcgaaatggcttttccactagcgactcttttgtgtgattgtctggttaagttaagcagaaaaaagcacgctaccgccccaggctcaacagctacctgaatactgataacgcacttactttgacgtgctagtgtatcatttctttcgcagcaatccgacccgaatgattttnatacacaaaatatactttaatcataaaantcaaatagataaaanatagcatttcgataatgtcagtacggctatgtagatttgaaaatggggcgagtttcaatgaatcgcataaaaatacaaaananntgaagatgtagcggcagancaacggttgtaccaacagcttggccttaccggcgcacgnggtgaagc

SEQ ID NO: 724126 - DNA, 193 bp, Homo sapiens
tagaggatccttataaagcgttcaggaggcttgggattgagcacatgttcaggtcccagctgaagtcaagtgtcatctgtccctaggcccaggcatgggtatgatggggaggagaagagcggtgaagtgatagcttcgggcctggagaagtgggatgaacgtgaaagtgcgaaacaacttttaattcgaaagg

SEQ ID NO: 724127 - DNA, 160 bp, Homo sapiens
cagctcaaatagagtgcaacaaattaaagctttgtctacaagttgtagggtaaggaaagctgtaaactaatattaaaaagcttccctcaaggtcatcctccagaaatgaaattaatcaaaatgctttttcatgcgtacacattttcctacaatgcaactt

SEQ ID NO: 724128 - DNA, 166 bp, Homo sapiens
gtcgctctatcacgctcacctagtccagtaatcagatgtggggagaagttacacgcagatggacctataccctagttatccggctgcggcacaacgtgattcatacaggtgtacgcatatcagcctctcctattcccgaatctccttggctgacatcgcccagaat

SEQ ID NO: 724129 - DNA, 141 bp, Homo sapiens
ggtcgtgcttgctgctggtgcctccacgtgcgcgcctgcctgctgtcctgtgcatcgcagcgtgttccctggccagcaaagttgcctgacgtcctgcctgcctggctgcccatgtgccgttctcgctgctctgcatccagt

SEQ ID NO: 724130 - DNA, 249 bp, Homo sapiens
  misc_feature (168)..(168): n is a, c, g, or t
cccagcagagtccagccctgacgtcaagaccccaatggctaacgaagctaacccttgcccatgtgacattggtcacaaactagagtatggtggcatgggccacgaagttcaggttgagcacatcaaggcatatgtcacccggtcccccgtggatgcaggcaaagcgtngattgtcgtccaggatatatttggctggcagctgccaacaccaggtatatggctgacatgattgccagaaaatggatacac

SEQ ID NO: 724131 - DNA, 103 bp, Homo sapiens
  misc_feature (49)..(49): n is a, c, g, or t
  misc_feature (86)..(86): n is a, c, g, or t
ttctttcccactttattgaaagactacaggtagggataaaagaaaactnccaagtaacagatctgaaagtacaaaatatttttaancatgacctcccccctcc

SEQ ID NO: 724132 - DNA, 328 bp, Homo sapiens
ggggggggggaccccccccccccccccccccctttttaaggggggcccggggccccggtttgggcccccgggggggggggggggttccccccccccccccccccccccccagggggggggccggtttttttaaggggggggaaagggacccaaaattttttttttttttttttccccccggaaataagggggggtttttttttttgggcccccccccactttttttggggggggggggttttcccaaaaagggggggttttttttcccccttttttttcccccccccccggggttttttttttttttttgggtttttttggggggcca

SEQ ID NO: 724133 - DNA, 1117 bp, Homo sapiens
  misc_feature (225)..(225): n is a, c, g, or t
gctgccaatctctcgccactctgttcttccgccgctccgccgtacggcgtttctctgaccggtacgcaatggaagaagacatcgccgcgctggtcattgacgaatggctccggctatgtgctaaccgctggtttttgctgggcgtacagacgctccccgtgcccgctcgtttccttccatccgtcgtgcgtcgccccacgtacacccaccgggcgtccataggtngggccatcgtgcgcctatgaatgcgactcctgacgttgggctgaccgcaggccctagacgcacagcagtggcatcactgagcgcctgagaaggtaccgcccagttagagcattggcatctgtgctccaagcttgggacgatcatgtggagaagagatcttggtccaccacacgcttctacaatctggatgctgcgctgttgcgcccacggatggacgcaccacaggtgctagctagaccagaggccccccctgagaccccaagtgccaacagagacgtaagatgactcagtattatgttatgagaccttcatatctaccccggctcatgtacgtggtccatccaggccgtgtctgtccctctactgtcctctggtgcgcaccgactggtcattgtcactggactctggagtacggggtcacctcacgacggtgcccatctacgagggctacgcccttccccacagcctatccgtgctgtcttggacctggctggcctgggacctgaccgactacctcatgaagatcctcactgatgcgaggctacaggcttcaccaccacgagcccgagcgggcaagatcgtgcgcgactatcctggccgaatgctgtgctacgttcgccctggacttccgagcccgggagattgccctccggcgcatcctcctctcctcttggagcaagagctcacgaggctgccggatggccgaagttcatcgccatttggcaatgacgcggtcccggtgtcccggaggctcgctggtcccaaggcttcctttcctgggtattcgaatcttggcggatccccgagaacgccttttattccatctgaagttggcttgacatcccgaaagacctgtaagccaacccggtgctttggcgggccccatgttccg

SEQ ID NO: 724134 - DNA, 437 bp, Homo sapiens
  misc_feature (2)..(2): n is a, c, g, or t
  misc_feature (66)..(66): n is a, c, g, or t
  misc_feature (68)..(68): n is a, c, g, or t
  misc_feature (75)..(75): n is a, c, g, or t
  misc_feature (83)..(83): n is a, c, g, or t
  misc_feature (94)..(95): n is a, c, g, or t
  misc_feature (106)..(106): n is a, c, g, or t
  misc_feature (114)..(114): n is a, c, g, or t
  misc_feature (165)..(165): n is a, c, g, or t
  misc_feature (209)..(209): n is a, c, g, or t
  misc_feature (269)..(269): n is a, c, g, or t
  misc_feature (278)..(278): n is a, c, g, or t
  misc_feature (284)..(284): n is a, c, g, or t
  misc_feature (286)..(287): n is a, c, g, or t
  misc_feature (302)..(303): n is a, c, g, or t
  misc_feature (309)..(309): n is a, c, g, or t
  misc_feature (320)..(320): n is a, c, g, or t
  misc_feature (326)..(326): n is a, c, g, or t
cnggcacgggcacatgagcggaggtgccaatattagggtgactttccttcttacgggctatgattngncctctgnttggatgnggggctacccnnccccatgctgnactatttnggtcaaagaacctctatagaagcatctgtcttcaaaggcattccagtttgngactcaattttagaataaggcataacaaatatgttaacaaaagncatacacaaagtggtggggggggggttctataattccccacatactctgaacctaataanacaaatctnggtttngnntttaaacaattgccnngactgngatcaaaggtnaatggngggcacaacagttttgctctggttgttatctgggttttggggatttttttgctttttgtttttttacaaatacaaattaaacatgaaaaaactacttcaaaaaaactaaca

SEQ ID NO: 724135 - DNA, 563 bp, Homo sapiens
ttatgaatctcatttgtgaattggataacaacgtatacctttgaaaaaatgtgtacaacatttgaaaacaagccctttaagactgtacttaaccaatgacatcccatgaagcagaactcaggttccatagaatattaggaaaatatggcgacttggagaataagaactgtcttacttgctgggtactctgaagagtccaggatccaacggtctgctactaacgtagccttcttattgagcccagcattttgatggcgcgatcccagattcattctctacggtactaccacaattaaagagagaggttcagaatatgatcttctttattgtttacgacgataaacgatattgcttatgtataaaaaagactactaatgactaacaagcgctttaatgtgagagtaaatgctaccaagaggattgctgttaagggatactgataggatttctgtagatcacatataaagagcctattgataaaattcctacggagacgtgtgatggtgactgtaagctcatgaagcaaggaatgacaccagacagggataatcatggtattctgg

SEQ ID NO: 724136 - DNA, 339 bp, Homo sapiens
  misc_feature (55)..(55): n is a, c, g, or t
atagtttcaccgcgatatggtttggatctgtgtcctacccaaatctcatgttganttgtgatctccaacgttggaggaggggcctggtgaaagatgactgagtcatgggggcacacttcccccttgctgttcttgtgattgtgagttctcacgagatttggttgtttaaaagcatgtagcacctaccccacctctctctttctccttctccagccatataagatgtgcctgcttccccttcaccttcctccatgattgtaagtttcctgaggcctcccagccatgcttcctatacaccccgcagaactgtgagtcaattaaacctttttttttttaata

SEQ ID NO: 724137 - DNA, 1128 bp, Homo sapiens
gcgatcgattgacaaggaactggtctgttcacacttgctggcttgcgcatcaggactggactttatctcctgacctcacggtgccaagcgctgcactctgtcaagcgttaagttcggtcggcccacagcgcttgtgagagtcgctaccagggccccagcaggctgcgatcccctcgatccttccacaggtacctcaggctccgcgtggacgctagaagtaactaggcactccatagggagctactaggttagtagggcttccgttgctcgcgtccggtacctaggcgtctcggctcgtgctcgtcatgtcgtagtgcgtgaccgcagcatgctcgcgatgctaggcgctgtgtactggacctttcaattcggactagcacatcgagttcgtccatctgtctgcagtaccgagtctgaatatcgtgcctaattgcactgaaccatgcggtgttgtagcatagtcacacggccagatttgcgaattgcaaagttgttgctacttcgcgtgctggtcacgtgccgcaggacctgtccggcgtgcgccgcggacccatctggtctatcatccatccatctatctgctgcgcatgcatcgtgcgtgcggtgtcgtgcatgttccagctgcgttggcgtggtgcacatgtgtacccaaactgctcttgtgagcgattgaacattggcgccagagggccaacggacccatgactctgtgcgacggcgctgttggtagttccttgttggcctggccttattggtgatatgtagcctgtgtgtccttggacgtgcaccaccaacgatcatccaacgtacttctatcgatcgcgctggtagtgcgctccgcgtgcagaaggcgggatgattggcgtgcctcgctctactgtcgtgctggagcccgctctcgggcttgctgtctcctttggctggggggctagctttgctgggaacttgtaacagccccgcatcagaccaaagccttttactccggccaaggtaattcttgctgccccggtcctgcttgcttgccaacaaagatacgtgtaagggtgcccccgggtttccaactcctgttcctctactggcgtttggtcttaccttgggactgaagtcaagggaaggttgttgaaccca

SEQ ID NO: 724138 - DNA, 254 bp, Homo sapiens
acaggatctgcaggcgtgtcagtgtataaaaggactattaattctacagcagaatgtctagatattcaaaatattaaatggtcattctgcatgatgctggaagtcactatatttcttagaaataacttctttatgcacaatcctttaggccacggaattatgtaccttgcagacattagataactatgggcaataaccatgcttatggcctaggacagttattgcatcctatccgtttgtgtatgacaacgttg

SEQ ID NO: 724139 - DNA, 84 bp, Homo sapiens
gcggccgcctactactactactactgctcgaattcaagcttctaacgatgtacggggacatgggttatttagtttaactctggc

SEQ ID NO: 724140 - DNA, 600 bp, Homo sapiens
  misc_feature (11)..(11): n is a, c, g, or t
  misc_feature (34)..(34): n is a, c, g, or t
  misc_feature (58)..(58): n is a, c, g, or t
  misc_feature (78)..(78): n is a, c, g, or t
  misc_feature (84)..(84): n is a, c, g, or t
  misc_feature (128)..(128): n is a, c, g, or t
  misc_feature (162)..(162): n is a, c, g, or t
  misc_feature (179)..(179): n is a, c, g, or t
  misc_feature (199)..(199): n is a, c, g, or t
  misc_feature (212)..(212): n is a, c, g, or t
  misc_feature (222)..(222): n is a, c, g, or t
  misc_feature (245)..(245): n is a, c, g, or t
  misc_feature (280)..(280): n is a, c, g, or t
  misc_feature (318)..(318): n is a, c, g, or t
  misc_feature (335)..(335): n is a, c, g, or t
  misc_feature (398)..(398): n is a, c, g, or t
  misc_feature (448)..(448): n is a, c, g, or t
  misc_feature (598)..(598): n is a, c, g, or t
aagaacagtanagtttctgcccattgagctatancccttgacattgaagtgaattatnccttccgtggattccaaaantcccanatttctctgaagtgggtttcattgtgccacaaaaaagacattgntgccctgtataggaaaggaagtggctcttcaaancacccatatgtggtganttgagggcaaagctgtgganaacgctgggtcanagggttgtanaaagagtgaatcaaccctggaancatgtgatggggatcatgaggactcaggaaacaanactcctggactacagccaagaagaagttagaagtaaancctatgcggtggctganacctgtaatcccagcactttgggaggccaaggagagagcatcacttgaggccaggagttcaanaccagcttgggcaacatagggagtctttgtctctataaaaattagctgantgtggtgatgcacacgtatggtcccagctacttgggaggctgaagagggaggatcacctgtgactgggaggtcaaagctatagtgagccatgatcacgccgctgcactctaacctgggcaactgagcaagatcctgtctcaaaaacaaanaa

SEQ ID NO: 724141 - DNA, 334 bp, Homo sapiens
  misc_feature (11)..(11): n is a, c, g, or t
  misc_feature (24)..(24): n is a, c, g, or t
  misc_feature (43)..(43): n is a, c, g, or t
  misc_feature (102)..(102): n is a, c, g, or t
  misc_feature (126)..(127): n is a, c, g, or t
  misc_feature (160)..(161): n is a, c, g, or t
  misc_feature (164)..(164): n is a, c, g, or t
  misc_feature (286)..(286): n is a, c, g, or t
tttcagttagnttattacttgggncaaataccagtacacacancttcttacaatgatagagaatagacctattgcaaatgtcatcatatacaattccataanctgcataattctaaatttccccannctacaagttgaaattgaagtacttatcaccggnngancttaacaactttagtgaagagattgagagtcaaatctgccaagatgttgatgttggataagagaatctctctccccacctctaagttgccaccctcctagactacctgtggacaacctgctnagatacatcaacatggagacagcactcaagtagaatataaagaagatc

SEQ ID NO: 724142 - DNA, 412 bp, Homo sapiens
  misc_feature (7)..(7): n is a, c, g, or t
  misc_feature (97)..(97): n is a, c, g, or t
  misc_feature (99)..(99): n is a, c, g, or t
  misc_feature (140)..(140): n is a, c, g, or t
  misc_feature (146)..(146): n is a, c, g, or t
  misc_feature (151)..(151): n is a, c, g, or t
  misc_feature (174)..(174): n is a, c, g, or t
  misc_feature (212)..(212): n is a, c, g, or t
  misc_feature (258)..(258): n is a, c, g, or t
  misc_feature (273)..(273): n is a, c, g, or t
  misc_feature (289)..(289): n is a, c, g, or t
  misc_feature (326)..(326): n is a, c, g, or t
  misc_feature (379)..(380): n is a, c, g, or t
gggggcnggggggcctgcccccagcagaaacagcgggtctcggcggctacatgtgctttagggcttggctggggggcaaaggtgggggggggggggngnccggcctcttggctcggctggtcgggcgttagggggccagntgctgnccccnaatccccggcggcccccctggcnaatgggtctgtttcaaggattctgtccggctggttttnggggtggggggcacctttgggggctttatttattgggcggggggcngggggtgtggcgggntcggggggtggctgtncggccggcggcctgggcctctggcgcccctgcgtgcnggcccccggggccacctgccctctgtggcccgcgggtctccccgggtgggttnngtggggtgctctcctgccggtctcggcccctc

SEQ ID NO: 724143 - DNA, 241 bp, Homo sapiens
  misc_feature (32)..(32): n is a, c, g, or t
  misc_feature (155)..(156): n is a, c, g, or t
  misc_feature (236)..(236): n is a, c, g, or t
cacgtaatgtacacttcagcttcttatgatgntaggagtatatatttccatccatctagttgaactatcacgagtagacacttatattatcgtaatagtcactatgcctgggtttaatctaccatcttattttttaattggtccatgtgatcttnnagtccctttttcttattggctttgattaaatttgggcatttaaatgattccattctatcatataagcattgttacatatntacgg

SEQ ID NO: 724144 - DNA, 274 bp, Homo sapiens
agatcctcgtctctgttcaaaatatacaaattagccggatgtcgtggcacacacctatagttccagctactcaggaggctgaggtgggaggatggcttaatgagcctggaatggcagaggttgcagtgatgccaatgcagccaaggatcattccactgtcactccagacctggagtgacagtccacgaccctggtcccaacaaatgtatatgatactacaaaaaagttacagcgaaaaaagtgaacaacacatttaaactttagaattaaaaga

SEQ ID NO: 724145 - DNA, 143 bp, Homo sapiens
tgggacggtcctactttccacaggtatctattcactgaaatttgataaaacattaaattacaggagacattggtgtatttctttaaaaataacttctacatgacagccgctctatttttctctgagggaaaatacttcccata

SEQ ID NO: 724146 - DNA, 378 bp, Homo sapiens
  misc_feature (17)..(17): n is a, c, g, or t
  misc_feature (134)..(134): n is a, c, g, or t
  misc_feature (360)..(360): n is a, c, g, or t
ccagtttggtgattctnttctgtgtctgctgatctattggcgtgagaagctgaaagtgaccagccaacagccataactttatgtttagtgagactcataatgggtctcctgctggaagatctcccctctaagantcagtaattctagacctgcaaagtttgaagttgtaagcatgggaaacacaaattccccaaataggtccagatagtgatagagaataagacacttacttgcctacttccatttctcagcccagatattctacctatagtggacatgcccatgcaatgggctattgggtttgaggtatacattgcacggttgaaggacagtgcctcatccttgcaggggtgccctttnccagttggcaccacagct

SEQ ID NO: 724147 - DNA, 279 bp, Homo sapiens
cgcagatcaatgtagctaatgagttagttgtaggatgatgcattatgtaacgagtaaagagacttgccatgtcacgagattgacctagctattgagatactggcaatcgaatctcgggcaagtaacataccattgccaaagggaacaacgtatgttgttatgcggttcgaccgaataaagatcttggtagaatatgtaggagccaatatgagcttccaggtcccgctatgggttattggaccagagccgtgtctggtccatgtctacataagtactcaa

SEQ ID NO: 724148 - DNA, 257 bp, Homo sapiens
ccagccccgtgtgcaggaagatgaaccgctctggcctcctgccttacccggtgcccagagaccaggcttccaagcaacagccctgttccttagcactcctattcccaaaccagtgcctggactgaccaacctcaaacgagagccggagcttggagcaggaccagaactttgccaggatggccccggcaccagagggccccattgttgctgtcccgaccccaggatggggactttccactgtccgacttacccccatt

SEQ ID NO: 724149 - DNA, 104 bp, Homo sapiens
ccagtaattcattcagtagcaattacatagaatactataatattccagagaaatgaaaagagccaaagtcctcgccttaaagtagctcacaaactcatgggagg

SEQ ID NO: 724150 - DNA, 1742 bp, Homo sapiens
  misc_feature (1)..(1): n is a, c, g, or t
  misc_feature (1169)..(1169): n is a, c, g, or t
ngctatgtatgaagaatcggtggtagttgaataagacgtagtgagatgtgtcgcctccctccctcgcgtgacctccgtcagacccctctgttcgttgcccgtgccttcccccggctgacgccgcgggggtatccctgataaaactcgatgatactgttgtgattggtgtggttcgggtgtttgtgtgtgtttgttttgtgctgctgtgaatgtctttgtggtgttggacccaccttttgctcccgtagtatgatgagtgacgttgtttgtgtcggtgttggtgtgttggtgtgctcccccgccccgcgcgcgccccggtcgccccttgcttattgtgctgtagtgttttgccggtttttgtagtgttctcgcctggtgcgccggggcggtgtgcgtcctgactcccgtgccgtcgaagcgacgtatcccctcgaatacgcgttgggactgcggccctcgaaacaccggaggcgcgttgcgctcctagcctagtaaggtctctctcttcactgcctcctgttctgagttccgtatttgtgtctgccaatatatgtgtgtttttctccgggcctgtgtgatgtcccgtgttgcgttccccgccccctttcccatggtctttgttggtgacgggactttaccctttgtcgtgtggggggggctaaaacaaccccatccatagcggccgaaccctttccggtgggggggttggcacgcacaaacaaaaccggggggcttgtataatccatttaggtgtggagtgaccgtccctcccctctcttgggtgggccgtccgtatgtaagctaacgcttgtggttgggtgcaatcaagcgaaggcttccttgctggaaattaattaaggtactgtctctcctccctatgcgtgcccgccgagcgagccacgcatgtttgtgtgggagggcccgccaaccaaccaccaaccaaccacggacgtccttgtatctttcataccttctgggggacgacccacccccgcgggttgttgaagaccttcctgttggttccgctccttctccccaccagaactatgtgagaagtgcccccctcctcctcctcgggtggtgccttcttgtgcttctggaaagagcggcccctcatcagcggagttgtgtggccccacagcagcccccactactgttgttaataatgnggagttttctctctacacacggcagtatagggccgacacacaacacacccttctgtgacgacacaccgccctgagaggagttgtggcgttgtggggagagacaactctcactctctacacaccgcgccgcctctgcggtgggtgcttgttttcacgagaccgctctccattacactccccttcattacttcggggcttcggtggtgggctttggccacacacagagtcctccactcgacactctcacacagagttctcgcgcgagtttatatagagaggtgatacatagagtcccacatcttgtcatagagtggagactctcgagaacccacagagaattaatccagtatcccagcccacccatagagccagtaacccacccccaggtgccaccctcccctggccctggtcttgtctgtatggcccagaacatcttgttttgcctggcataacccggacacacacacctggtgcgcaatttgccccgtgacccttggcaccccctagaaatttatggccgagacctttacccaattaaaaaaaaactggcctaaaacaaaaggaaaaaataaa

SEQ ID NO: 724151 - DNA, 147 bp, Homo sapiens
gaaattatagataataatacctatgtctcctaaggatgctggtaggattagtcagtacttagtaagtatagctattattactactagtatcagaggtgtttttttgttgttttttgtttgtttgttttttaagacagagtctcactc

SEQ ID NO: 724152 - DNA, 603 bp, Homo sapiens
  misc_feature (124)..(124): n is a, c, g, or t
  misc_feature (368)..(369): n is a, c, g, or t
  misc_feature (382)..(382): n is a, c, g, or t
  misc_feature (394)..(394): n is a, c, g, or t
  misc_feature (405)..(405): n is a, c, g, or t
  misc_feature (411)..(411): n is a, c, g, or t
  misc_feature (445)..(445): n is a, c, g, or t
gggcgaggcatgtccttggtggaccatctgctctgcttgctgtgacttatgagagatcgaatgtagcctccgcatgtaactctctctaccatggcgtccggtgaggaatacgcaacagatgtgntggcgcacgccaatcaaagcgcgacaagtacgtagtgagattgtctacggatgtagtgcaaggagacgctactgaacagtgcaagacgtgtggaaataggcttcacgtgactgcttcaagctgcctgccctagtcgcaggtcatagtggacgagaacaggatcttactgctgatcatcggtatggcctgtccccggatcgctggcacgtctatgagaagcgatgattgcgcgaggcaatcgatnngcggttcgctacnagcaatgctagncccattgaatnccaagngcgaccctgtgtctgtgttgctgtagccctcgcnttgattggcttctagagcgctctcgacgataggtggaccggtgccaaggcgtcatcgcgcgtgcggagcaacgatacgtgggggtcatcttttacactttcggagtccgaggtggtgtgccaagttcctccataaagacacgaccttggacctcatct

SEQ ID NO: 724153 - DNA, 890 bp, Homo sapiens
ctcagtggtagcttaatgggaagcaggactgtatctcaccatgtgagagccgtcctctcgagatttcttgctccctccattcagggacgtttgtggagccaccccttcatatttttaaaaaaatgtatttctctgtgacctgactgtgcctgtgtggccttctttgactgtgtcattgatgtgtcttatgcatatgtgtgccatgtcacgctcctgatcactgtgtcctgcgtgatgtgtgagtgtgaatgtgaataaagcatgtgtgctgattgatgcttcatctgctctgccaccaccctgtggtgcttctatgtgtgctgcagtgtctggagccttgtggattgtgtgctctgtgccttcccctgtgcccacttgtgacttttgagaggctgaacacgattgtcgctggcattcactgcccatggcatgacattgtgactgtgaagtgatgcattggccagcactctttactgaggaccataagaacttgcagatgtgaatggcttcctcaactttatgatgacacaatcgcgcggtaacgactgcctctaatggatttattatacaatgggtaacatggtgagccatggagacttgacgtgatgtgtgacattgggctaatgggccgaagcctactactacagccctatcattgccaccccaagacaagcagccattacaagatgatttgagcccatataacgcatcccacgaacgaaactcccattgaacagcctcctttatattggacggccacattgacagggtaacctttgaagacaaaaaacaggactttacttcggcaacaagccccaggttggccactaagatgaaccccttgccaaccgtggccacctgatgtgccccttagcaatgggagaggccaa

SEQ ID NO: 724154 - DNA, 539 bp, Homo sapiens
atcatgagatagctgggtcaaatggtattactggttctagaagcatgtgacatttatcacagaggcctgaatgaaatgagataagacaaaccaagtggatatctgtggagcaatctttgcagacagaaggaaaacagatgcaaagagtactggaggcaagaatggacttgccagatgattgatgcaaggcagggactagaacagtacatctacaatttaccccacattaaccttactccaatttatgagtactttaatgaacataatgattgcttattagtccatctgtaagaatgtcaacaagatcaaagccattctataatggtaagataagtctttggctaagaaatgctactccaccatgacaatagaaattctaactatggtcctatcattgattgctatattaaaatcctttattctaaataacctcttctacttggtccagagctatgggagaaagaattcgagggtggataagcagctggctagaggcagaggctcagacagaagccgcagagctgagggctgcagcaagc

SEQ ID NO: 724155 - DNA, 272 bp, Homo sapiens
ctcgttgagcagtgtcacacagttcacattgcatgcaaatatgctgagctgcaggaaaagattgatcgccgttctggtagatagctggaagattggccttaattcttcaagttcttggtgatgctgcctttgttgatctttttcctggcaagcccatgtgtgtttagagcttctcagactatccaccttttgggtcgctttgctgtgcgtgatttgatacagcctgttgcgctgggtgtcctcactgcagtgcactacaaggctgctggagc

SEQ ID NO: 724156 - DNA, 235 bp, Homo sapiens
aaagcctgcaccatgctcgagtatttggaacgagcacagacgatttttaaagtcgtgactgggacagcccgcgggtcctcaggagatggaacgaataccaatggacagccttggatcccctatttcttcacgatcgttctgattcagagcgagaggagattgacgtggatgttgaaagcacagagttctcccatggagaagtgcgacatataagtaccaccagcatcagtgacat

SEQ ID NO: 724157 - DNA, 1595 bp, Homo sapiens
tattggttatttagttttaatttcataatcataaacttaactctgcaatccagctaggcttgggagggaacaaggaaaaacagtggaaacccaagagggaaacgtgcagcgaagaagcacaaagaatatcataggaatcacgtggcaagacaaagtgggggtgggagggggtgcctcctccgggagtctacagaagaggaagtgactcggggtggtatagagaaataaaacacagagtctcaaaccttatattctcgagttgtgctcccacgaggctcagcagagggggtgaactctttcgtgtggcgtgggctcgtgtggccatctcgcgtggacacccaaagaggcgccctccgagtgggccctcacaaaaaaaaatatcagagtagccttatctttatctcacactgtgtgtggccaaaaacacaacaacccactagagtgtctgtgtgccccaaacttccacacacccccactctcagcagtctctgtgtggggcaagagtagtgaccccagaaagtgtcaaacacacactgtggggaacacacccaatgtgtgcgtgtgttggtggggggcctctccgaggccaatatgttagtgctcagaggtgtgtagacacaaaagaaaattgtcgcggaggagagcaccccgcgtgttaagtgtcctttatatgaggagagaagtgacaagaagtttctcctctcttaatcttctctccaaaaaattgtttctcttccccccgccaatgaggagaagttgtgccgactcgtgtggaccacacccccgactgtggtgggcccacaaaataataatgtggcgggccggtgttggggtagaaaagtcttccaccacccagcgctccgttgagaagccacaacatattaataaaccgcggccggtgggagggagaataatataacctcttcggtggtgcgtggaacaacagcggcgcaggtgagaaacacccccttttattattattaaaaccacccaaaaaatctaccccattgctaatcacgctactctcccacgaaggagggggccctcacaagaagaggaacgcacgcgacaaaaaacaatatttatatccgtggggcgcggggagccacattatgtagggggcgacaccccctctgggtgttgctgttgtgggcaaaaaacagacagaggaacgcaccacacaccagcagagggagaagacaaacacgcggcgcgggcccccccacaagaggcgggggcgccatccagcgcgcggtacgtcacggcaactagctgaccacacattagtctgcttcgacaaaaaggaaaaacaccagccggcgcgtggtggtgggtggtgatgtatgaccgaccccaagagggcggcgataacacaagtagagagacacaaccacgcggggtgaatatatacccccactccgagggagaaggggaggaggccaggggaaggaaacgggccccaccactccagggtggtatatagagcctccaaactgctacggggagggcgcgggcgaaaccaaccacagaagtacacaaacactcacccgcaagcagacagcacgatactagtggcagaccaaacaacgaaagac

SEQ ID NO: 724158 - DNA, 1180 bp, Homo sapiens
ggcttgctgtggccctgtcaggaagagtagagctctggtaccatgctccgcgcagggatgggaggctgtccaccagtgccgtgcctgcgtgcagctggcagctgagtggtcttgtccaggtagtgagaccgaatgaccggtcactcgggctccagcagcatgaaattatgagcgagccgagttaagatgggttcgtgccacggtgagtcaatcgttttccgtacgtttgagcgtttgcattctgggtgacgtgacacagctgtagccagcgggaaagagccctgtgcatcaagttcttgtgcaccaccagaggtgaacggggaatagcagagggtgaagagacggacgatcgctggagcaactggagtgacagaagttggtgcaccagtgtcttggagaccgcagaacgtacagcttccctttgcaggggaactctttcttcggtgatgacaaactttcgtcaaaacagacggccaagagcagcggttgtgtcccgagtatgccagaccgcaggactgcgtctgatgcctcgtgaccgaggtttgtaaaaaagggatggatggacccgcagagcagaggaatcagacgcaattgaatgtgagcaaacaacaccccaacgtgaggggacagctagcaggtgtcacccccttgaaggtgtcctcaaagatagacgatgatacccgagagaatcggggaccgcaaggtccgcacccgaacagggcgccgagaaaaaaagaggcaaaggacagggccggaccgccatcaaagagtgaccggggccacacggccactggagcaacgttgatgaaacaagggacaccgtaacgctacatgcgagtgcggaccacaagtggggcgaacgaacaccacgggcggatacaagccacccacgcgaccaccacgacgcacacaacgaaacaagcgggacgcggcaccgcaatgatgcggtccaacgaaatgggacccggacaccacaacagaagaaataataggagaaggacagaaaaataacacacagagagggacagcggccaacgccgacaacaccacgagcaacaaagcagcgccagaaggacgcacgacaacaaccaaccggcacagagcgcaagcaacgcagcaacacagaaaggacaagcacgagcagagcaccagcacccgacacaacacacaccacaaccca

SEQ ID NO: 724159 - DNA, 318 bp, Homo sapiens
ttattttttcaagaacagcaacctaaaatactcatacagttagctctaacaatgtttacaagtcttaaaactattcctgcaaattgttgtattacataaatgttattgactcctcaaccatggttttttaaagtaatatttgttaattataaagtaagaaaatacaagccgggcatgatggcacatgcctgtagtcccatctactggggaggctgagtcaggaggattgtttgagcctggagtttgaggctacagtgagctatgatcacattattgcacgttagcctgggtaacacaatgagaccctgtctctttaac

SEQ ID NO: 724160 - DNA, 712 bp, Homo sapiens
gcttgcttgtgataaattccgcggatcccacctccagctcctgcagaggtggaaggaataggagaggcactgggtcctgaggagctgaggctgacaggctgggaacctggggccctactcatggaggtgagccgccgcggaggagctagagatcggcaagccgatgccaggatggagaggaaggacaggacacaccccagcgcatcgcgtcgagagggcgaacgggagtgagcgcggtgacagtagggggcatgggacagaggagaatcagagagtaaggcacacggagagaagaagccagagagacagagtgcagaacacacgcaagagagcacaatgcaacgggaaaatgatagcacacaatgcgagaggacagagacaagacaaacaggagagagagaaacgagaaacaaagaacaggcgcacagaagagagaagaaaggaaaacaggcaaaccacacacacaaggagacataatgagcagtggaggcaggagactccacgccacaggcaaagaagcataagcggcagggggggagtacgatccaatgagggaggacgacaagatgaggagtggagacgacaagaaagacagaagcggcacagagaaaacaaaggagcggcgttccaaggggacgggaagacaggacatggagccagtggagaggaaggggacaggtgacgcggaagggtgaagcagaaaggagacaca

SEQ ID NO: 724161 - DNA, 300 bp, Homo sapiens
  misc_feature (168)..(168): n is a, c, g, or t
  misc_feature (207)..(207): n is a, c, g, or t
  misc_feature (227)..(227): n is a, c, g, or t
  misc_feature (265)..(265): n is a, c, g, or t
  misc_feature (280)..(280): n is a, c, g, or t
  misc_feature (295)..(295): n is a, c, g, or t
acttggagaaactgcccaagtttactggaaaacccacaataatgtcatttatccagttgatggaagtaaatccttcaattttgatcgtgtccttcatggtaatgaaactcccaaaaatgtgtatgaagccaatagcagcaccaatcatccattctgccatacaaggcnccaatggtactatatttgccctatggacagactgcttcnggaaaaacatataccatgcntgggttcagaagatcatttgggagttatacccagggcnattcatgacattttnccaaaaaattaagangtttc

SEQ ID NO: 724162 - DNA, 216 bp, Homo sapiens
tctagaggatcctctagatagatccgccatagtctagaggatcgccaagtgaggaaattccaccaggaaggattcaaatatttgctttgtaccacttcctctacctcacacgagcaagccttgatcctacgcacggctaacacgaggtgacgattcgtgagtacctaatctcccagtggctgactcttgaacctgttcgttttagtagggatgttc

SEQ ID NO: 724163 - DNA, 148 bp, Homo sapiens
agtctccccacttcggagtcacagcagttcaactagacaggacgtatgcttatcaacctgggaaatacccaccagacatatcccagcttcgttctcgggaaatttgttactgtggatagttagtgtgagctttcatctatttacatgt

SEQ ID NO: 724164 - DNA, 612 bp, Homo sapiens
ggggaagaggtggttgtgaggcagacgaactcgcggttctccggcttccgaggcttccgagtagtctggagtgaagggggcgggagcaataagaagcccgccggatccggtcctcagtcgactcttctgacctccgcgcgacgtacccgccgccgcgttggctggagcatttgacattgtgcagcaatagaaatggttatggagaagccacagtccgttgcgttgtagggcgggagttgtagaggcaatattatagctttgctgaataagagctcgccggaatatgtagcacaggtttatggcaggaattcttccgtatgttcatggtggagtagatgctagtggaaagcccaggaagctgttgatgggcaaaatgatatacagcatggagtagttatctctgagacttcgagctgaatgtcataactaaaattcgtcatgtggatgctcatgcaaccttgagtgagtggagtagttgtccaggtcatgggtttgctgtctaacagtggagaatcagatggaaagtttatgcgaaacttggttctgggctgcctgaaggatctgttccaaataaatttgatgtgcacaaggatatgttgggcatgaggatga

SEQ ID NO: 724165 - DNA, 466 bp, Homo sapiens
  misc_feature (124)..(124): n is a, c, g, or t
  misc_feature (138)..(138): n is a, c, g, or t
  misc_feature (170)..(170): n is a, c, g, or t
  misc_feature (182)..(182): n is a, c, g, or t
  misc_feature (313)..(313): n is a, c, g, or t
  misc_feature (337)..(337): n is a, c, g, or t
  misc_feature (344)..(344): n is a, c, g, or t
  misc_feature (354)..(354): n is a, c, g, or t
  misc_feature (371)..(371): n is a, c, g, or t
  misc_feature (373)..(373): n is a, c, g, or t
  misc_feature (383)..(383): n is a, c, g, or t
  misc_feature (386)..(386): n is a, c, g, or t
  misc_feature (395)..(395): n is a, c, g, or t
  misc_feature (400)..(400): n is a, c, g, or t
  misc_feature (403)..(403): n is a, c, g, or t
aaggacagagacgctggctaggcgccctccccactgttaccaacatgaagctgctcgcagaactgtgctactcctcaccatctgcagccttgaaggagctttggttcggagacaggcaaagganccatgtgtggagancctggtttctcagtacttccagaccgtgactngactatggcaanggacctgatggagaaggtcaaagagcccagaagctttcaggccgaggccaagtctttacttttgaaaagttcaaaggagcagctgacacccctgatccaagaaggctggaacggaactggttaacttcttnagctatttcgtggaacttggaacncaacctnccacccagtnaagtgtccagaccattntnttccaacccnagntggccttanaacanccnctggccagtcctagagctcctgtccctacccactctttgctacaataaatgctgaatgaatcc

SEQ ID NO: 724166 - DNA, 418 bp, Homo sapiens
ctttttgtagtgtttgtatgtgaatacatttatagtctcacatttggtgcccattgtgttagacatagaacattctcaaaactatatttgaaagctgaatgtctggaagttgaacaataaacttacattataaggtcttgaaaaaaaaatatatatatatttttgagacagagttttatttccatctctcaggctggagtgcagtggtgcaatcttggctcactgcaacttcagcctcctgggctcaaaagatactcctaccttagcctcccaagtagctgggaccacaagtgcccaccagcatggccagctaattttttgtagagatggagttttgccatgttgcccaagctggtctccaactcctagagctcctgtccctacccactctttgctacaataaatgctgaatgaatcc

SEQ ID NO: 724167 - DNA, 180 bp, Homo sapiens
ggacgcgtgggtggtgttggtaatgctatcatcatttgaagactgaggtaatgagaacacgaaaggttggccaacgtgtctagtagcacacagctggtaactagttccccaatccggattctctgtcctagagctcctgtccctacccactctttgctacaataaatgctgaatgaatcc

SEQ ID NO: 724168 - DNA, 200 bp, Homo sapiens
cctgcgaagcattgaaaaatactgatccctggcaggtgtgatggctcacacttataatcccagcacttgagaggccgaggcgggtggattgcatgaggcccggcgttcgagaccagcttggacaacatggtgaacacccttctctcatcacaatcaaaaaattagccaggcatgttggcaggtgcctctcaatcccagct

SEQ ID NO: 724169 - DNA, 403 bp, Homo sapiens
ctgagtctgaccacgtacaatgaccaacaccacagggtgacttgtacaacagaccatgcctgcatagactgaagtactgcttacatcctacggttcattacctattatttcacacgctaataccggattaggacacatgagagaacaaggatcagatgttcgaacccatccctcatagaagactaagaatggtaacaaataccatagatgagaatttacctctctggactgtgcaatttatgatggactatgtgtcagcctagctttacccaacaggatacatattggctaacatcgttcatacaatcacgctcactgactctgctgagtatgtactagaggaggcctacatgctattcatgagaatgcaacagctacatgcagccaatgccgacagtgggtg

SEQ ID NO: 724170 - DNA, 181 bp, Homo sapiens
tctagatcacatgcgactgcagagtgatgagagctgtagagttttgatttgtgacagagtctgaaatgcgatcagatattgagaccgacttcaaagacataggatctataaggtcatgcatgtgtgtaacccgtgagaaataatcgcttgtcttatgtgaaccactttcctatcttgctag

SEQ ID NO: 724171 - DNA, 354 bp, Homo sapiens
ttacggacagagggacatttgaacaccatacatacttgacacttacatcgaacaagaaacggagagactgagactgtgacatgggaagggtacggaggacatcacctgactcactggagggaaggagcgggacgcgaacaaggacttggcaagcgggtaactaacttttgaggggcatttaaaacaagaaccttttgggctaatggcggcaacggctttatttttaggggacaatcggcaggggggactaccaagcctactgggaacactttcagtaccaagctctctactgacttggggcttgcgactcacaaggattgacatcgtacccaactgctaactttgggggcgggg

SEQ ID NO: 724172 - DNA, 137 bp, Homo sapiens
cacgaggtgtacctccctgctgccgctggaggacgtggggtctgtagtgccgcatgaggactgcatcactgacgtgaagaatggcctatgtgaacttcctgacccactgctatgtggacacggaggtggagatgaag

SEQ ID NO: 724173 - DNA, 333 bp, Homo sapiens
tgatgctgctggtctctctacaggatcccccttgccaagaacctcattcttgctgtcatcttaaaggatctgaatttctacttcttttttcttcttggaattatattttgtatttgtgaacaagagactattaaatattatttcaaacgtacaccttatcaaatgctaacccccactttacattcacctattttatcaacagcaatggttgagaggactcatagtacatttcttgtagaacattgcattgtatggcattgcctcaattaatcagtgagttggaggtatcagtaatctcccaatagctttttagggtgagggtctcttggctag

SEQ ID NO: 724174 - DNA, 833 bp, Homo sapiens
  misc_feature (480)..(480): n is a, c, g, or t
gagcttgggtcgcctctgaaggagaaccattttccagtctctttcatagttttttcccccagtcagcgtggtagcggtattctccgcggcagtgaccagtgaatgtgttggtctctttagccgaagacttccgccctcgatcaagatggtggttggacggcttcctaacctttacggggcctggcggtgctgacgcctgatctggtaggggtggacgcaggtatggacaaacagtcaatagtgcagaagctgctgcgcgggagctcggccactggactggaaagaagttctgcgtcggcgcctagcgacgcccaacacctgtccaaacaaaaaaaaacgtgaagcaagaagttagaacagatgagaagaaatggattaatttacaagatttattgactcggagtggaaaggaggtagaataaaaccactaagatgaattttataagatccattccccggtgagaatcataggttgtgtgnctgaagatgaggtcttactacagaaattacgagaggaatcaaatgagctggcttatcgtacgaagaaataggcagtagaactggttagatgaattgacagaattgacagaactcatggttgaggcgggagcaaacacccagatgaccacctatgatcgggaggaagcgactgactcattttccgacaccttcctgaaggtggtgagaaggctgggagcaaaggtgcagcgattttcccagcgaaggtctttggctaaaactccttcgatacagcattcatattggaagactcgccatcatgcagtcttgttatgtcctgacgacaagttgggttcatccaacaagaataggct

SEQ ID NO: 724175 - DNA, 199 bp, Homo sapiens
atagattataacaagcagcatttgccttcgactgacagacgtaaaaccgcacatggcatactcttcaatcggccgcctatgccctcgtagtagcagtcattctcatccgaaccgccctgaagcttcaccggcgcattcattctcatagatcgcccacgggcttccatcctcattactattctgcctagcaaactcaaac

SEQ ID NO: 724176 - DNA, 1128 bp, Homo sapiens
gggaggctggatgtgacggcccgttatgcagccgacggcaggatactgcaaaggcaaaaagcaggagtggacgctgtcttttgaaactgctgctctttcacttactcaggcgtcaccgagagctcagcacccaggctgaactctgtaccatgtggacagaactgggaaagctgatgcatctgtggacatgtgtaccaaagtccctggagcatcacagcttgacttatcaggaacatacccaaacactggctgccaaggaacaatattgagaattcatgacacattccaaaacacactgggactcacgaatgcgacttgcggcgactgacctgggcacaacgcccgtttaccaggcacatacgagactttcccagggcacataacggggaacaagcttcaaagacgacaggaaaccgaaggaacttggcctttcctacaagggaccattgtgcggaaataccacggagaaacattccctaagttggcaacggaggagcttatctgtttccaacgcacacggtcaacgcgaaggcagttgacacacattgctgcgtcatgcggcattatatcttacctgacgcactttcccacactttccaggcttgtcaaaagattaccttaagaaccaggcaacatttctggaccaaagttatttgggttcccaaatgagaaggacgaagcccttcggggagaaccccccgaaacttctttgtggcaaagcgtgctgaacatttgcttgacaacaaaagaggcccaccaatatgtacccactttaggcacgaccacataacgttgggggattatccacaagaggtaaattatcccgaaacacataagccaccactgccttagacacccgacatgaggcgacaaacgccgacaacgacagctaactcgctaaggtccggcggcgcttaaccttggcgcctatcaggaaaaaactccacggcattgcgcttacagcacacagaacacctttccacgcacgtgagacgacctccgggttcataccccggacgacatctttaatttcaacgcgtgcgaactttaagtgggagccagccaatttcacgcaccccgaacgcgaagttgggcacacagacgtctacacagctggcacaaaactat

SEQ ID NO: 724177 - DNA, 275 bp, Homo sapiens
  misc_feature (161)..(161): n is a, c, g, or t
acgcttctggtcatttcaggcaagatcaattctcccagacgacgaggaccagaacccaaaaatcgaaaatcatttgctatcttcatcagactgcaggcaggtagtgttcatggctccacgtgagctcaaccatgagcgtcatgagcagccatgagcttcanattttattccggagacagtgacaaataggcaatgcctgtaatgtgcagccacttttggcagcaacccttttctggcaaaggccaagttctactgtatttaaaccgttgtaccaa

SEQ ID NO: 724178 - DNA, 208 bp, Homo sapiens
  misc_feature (6)..(6): n is a, c, g, or t
  misc_feature (56)..(56): n is a, c, g, or t
  misc_feature (62)..(62): n is a, c, g, or t
  misc_feature (89)..(89): n is a, c, g, or t
  misc_feature (98)..(98): n is a, c, g, or t
  misc_feature (101)..(101): n is a, c, g, or t
  misc_feature (104)..(104): n is a, c, g, or t
  misc_feature (107)..(107): n is a, c, g, or t
  misc_feature (113)..(113): n is a, c, g, or t
  misc_feature (128)..(128): n is a, c, g, or t
  misc_feature (131)..(131): n is a, c, g, or t
  misc_feature (144)..(144): n is a, c, g, or t
  misc_feature (148)..(148): n is a, c, g, or t
taaagntccaaaacattttttaatgaaaaaatttttggcacggggaggctgggganaggctncccccaggcctggctgggtggccccantgcaggctnggnctnagngggggntaccactcacgtggnggngatggagcaggtnattnccatcctcatcctcgtgggcctcaaccacagtcactgagcgcaccagcttgcgcatggcc

SEQ ID NO: 724179 - DNA, 853 bp, Homo sapiens
agctctcaccatcgctcttctactatgaaccccccctccccatacccaatcccctggtcaactcaacctaggcctcctattatattctatggcacctcatagctctagcctgttgtactcaatcctactgatcacgtggctgaagcactcaaatcatcatagaactacgtcaccctgcatcaggacagtcactgcgagcacgatacgcccaatatcatatctcagtatgcaagttactacccgtagccatcatctcgtactatctaatcatttactaatacatgtggcttccttttatacctcatccacctctttatcgaccaacagcaaagtaactacactactggaattacttctctgtctcagtacaaatgcacccctttgggtccactaaataattgagtcttagtcattccaacaccgtatggcaaggagcacccaaagcccgagaacaccgcccctttgcagaacgctatggccggaaatgggtgagcttcactgtacatcataagctcattcaaagtgacttgtctacaccatttccgcacactaaaccgtcccaggtccacaggggcccccacattttctgacccccttactttccctatccaacttactgtcacgggacaattaaccatcacaaaaaaccaattttcactttcacttaacatttcaaaaaatctatcccactttctgaccccaacttaaccaacattgctttttcaccttatgcggatagcaaaaaccaataacttagaacttgtcaaacttacttgcaccctccattgaaaatcattccttcaacaatccaaacccaattaatatttagggtaccaaccccaatagacctccg

SEQ ID NO: 724180 - DNA, 489 bp, Homo sapiens
tcacttatatttactctctctctctttcctcctttccccacttcttacttattttttagaaatgcaatgatagtggccaggcacggtgctcatgcctgtaatcccagcactttgggaggctgaggcgggcagatcacgaggtcaggagatagagaccagcctggctaacacagtgaaacctcgtctctactaaaaatacaaaaaattagccgggcatggtggcgggcgactgtagtcccagctactcgggaggcagaggcaggagaatggcgtgaacccaggaggtggagcttgcagtgagccgagatttgccactgcactccagcctgggcgacagagcaagactctgtctcaaaaaaaaaaaaaaaaaaaaaaaaagaaatgcaatgatagccttccacctcctgttcaccagacactccctacagggcaagctcatctatccatgtgcttagaggctcagagcagaactcgcctgcaggaggccgc

SEQ ID NO: 724181 - DNA, 205 bp, Homo sapiens
catcactcggaccggtagagcggctgggtattgttgtgtttggtactgttatggtgggatgttgttggagatgataaagccagcgaagatgcttccgattaaaaggcgtttaatagagttaattagtagggggttattttcattaattaggactaggggtgggaaacgtggttgtcctgttagtaacagtatgagaccgctctta

SEQ ID NO: 724182 - DNA, 135 bp, Homo sapiens
tcagtcgcccctctttacccatagcacaggtagaaggcaggtacactggaagcaggcaggtgggtgatgggtgtgggtgcttgtggaagttacatatttattttaatatgcattaggtaaaataaccatatcaaa

SEQ ID NO: 724183 - DNA, 1967 bp, Homo sapiens
  misc_feature (39)..(39): n is a, c, g, or t
  misc_feature (64)..(64): n is a, c, g, or t
  misc_feature (930)..(930): n is a, c, g, or t
gtcatgaaatcgggtcaggagacagctcttcctggttgntccctgtatcgcgaggagcataagncttgtagtcatgtgcggagacagtgaagcctcatcacgcacgatggcagactggccccgaggaattggcagcggcgatcacacgaggaggcgactgaccgctacctcggtcacagctatctagaggactctcactcgcgcgcaaggagagaacgtcactcacagggaaggagttcgatagcacgacttgcgtacacaacgtgaccggaaccgcatgcactgtccccttggccgatcaaggtaccagagcgcgatgagaccctctgcatcgcgcgtcacgtcgcttgcgcgggatgtataccgtgacagagaacacactaaacttgttccctcaaacgctctgatagagtcggcgtcgtgtctgtagattggactttagctgggttgtcatagacctctcgggacctcatctcgcggccgtgcgcctggcgtaggtaacgacttagttaaacctatggatctcgagcgcctttgaggcctgtagaggaaagcacagacttgtacaaaaggaatatagctatagaccaggattgtcgttaggcctcggatggcggagtcatgggggcatctggtgggtagggtcctcactgggaaaggcactcttgagggacaattctttcggttggcccctccgggggtggtatattagaattccctggtaaaggttagcaaatctgcttgctggtctcaccgggcgggcacaggtaagtaataatgcgtaacccttaatttccccttggggaccaatttatactccgggttaagctgggagcgggtatacatgtgagaccgggattctaattgggggaagtctagagagacggaaaaagccaaacgttgtgtaacgctttaatccaagtattgcgnttacgtgggcccagcgcactttttttacacaggggggagctcccaattaggcgtcttccccttcggaggcaattctccaactctggagggtataacaagaagctgtgttaaaccccaaagaaaaaggccgggaaacacacaaacgcacttatgtgtcaccctccgttgcggcaggcacagttgggggtaccacctttcgtccaacaggcaaaggttcccacaaagcgacaccagggcatcgcatgagggcgataccgttagtgacctctggcggtattggcaccccacaattcgcccttagggtagacgcggtccagggatagcacgactaattgtaaacaacacgtaccctattggataactttgtgcacccattaggtataacagggagttccgcgacatactaagagcgggcggcgcctcgatagttggtttcacaaccgacagcgatctataggagtccactatccatttaaagcagccgacccatagatgacggtttacaacgcaactatctatgattaatctggaaccgcttataacaaatttcacttaagaggttaaagaaacttggtggttgggaaaaaatttgttgttaagaaggggttacaagagagtatatattttttgagctaaagcagaaaaacgacttgcctctaatgggtagtagcagagccacattttaaccttataaagagatgtaagcgaggtgttcgaaaaacaaaatattgaaacgcgtcttcccttttcccgtcaaacacactgttgtacattacgcatcagtcatatctcatacagtgcactccacacatatgtatgttacaccgtcataaatatttgatagccggcaaagcagaccattaattaatcgaggaacagacatgcctcactagagcacgaacagtgttacacaaagtacgccagagcacacagaaggattgctggttgcagcaccagagcaagtccagctacgctcagtcagctagaaacagatgcggtacgcacacgagctaatcatgatgaccacatagcgagca

SEQ ID NO: 724184 - DNA, 946 bp, Homo sapiens
caaggtgtaactctgattcccatttcggcaaaatttgacagtaacttgtcacaatcctaagacattatcgggagcagtgtcttccataatgtataaagaacaaggtagtgatcacctaccacagtgtctgtatcaggagacagtgatctccatatgtgacagtaagggtgtaagtaatgatcgggaacagtgtttccctataatttatcttcatgcaatgacgttctacaaagcttgaagatctgttagtatctcatcgatgtatcccgaactcctatagatatcccatatcttgcagttgttagttgcagaacacatatagtggtcgattaagcatagggtgggtaaatgcaaccactgtaaaatgaaattacgtacaaaatttgaaatctagcttgggtttttggttacctttatggtttctccaggtcctctacttaatgagactagtagcatacgatttataatgtttatgctattgacacacgtcatttctagcttgtatcacattattctgtatgtagacctcctataaacttagtgcggacaagtgttaatccagaattgaccttttgacttactgctgatggactttgtctacgaaggttgggggcgtggggaaggagagtcccctgaaggtctgagacgttgactagccattcgtggtgatcgacttaatgtagttgaataggtcgaagctcgtaggaacgatcatataaaggagaccagacgttgtatagggggcgggaagggcccaagggaagaccaaggggcctccggccctaaggctgacgcaatagcggccttgggcgacccacgttaacaaggacaccccacaatgcgcgaacagcaagaggaggagacactcgtgtgcccataagtgttgtaacaaaaatggtgtacaatgaaacgacaaaacacagctgagcgtccgtcacaaattcct

SEQ ID NO: 724185 - DNA, 492 bp, Homo sapiens
  misc_feature (20)..(20): n is a, c, g, or t
  misc_feature (30)..(31): n is a, c, g, or t
  misc_feature (47)..(47): n is a, c, g, or t
  misc_feature (116)..(116): n is a, c, g, or t
  misc_feature (170)..(170): n is a, c, g, or t
  misc_feature (209)..(209): n is a, c, g, or t
  misc_feature (349)..(349): n is a, c, g, or t
gggatgacaggtgtgagccnccgcgcccgnncctgagttctatttgntgtcaagcctgaaaagagactccttttctccaccagacctctccaaactggcgagtagaatacagacantatgagaactggaggctgcaggggattctaacaatgctgagggtatggacgttnctgtttgtggttcagatttaagagacagaaggcagaagntagggatgatagctgccttccaccaggatgtgtagcgacacccagaccccgttccagtcagaaggttacgggattctctaggtcggaaccctggttgctgtgttaccactggtgccaagtagttgaggtgcattcgtggnaaagaatgccagatccacgctgcttgttgaaagcttgcccaccctcaccatgcccaagtgcccgttgtttgccattgcattatgatcaggtaatcagtagccccagagatacctgctatagctgttgagaattttacgcatat

SEQ ID NO: 724186 - DNA, 233 bp, Homo sapiens
gcgtatctagaggatcccagcactgtgcagctccttggcactttttaattaggcgttggtctttttattactgagttgtaagagttctttatatattctggattcgagacccttatcaggtacgtggttggcaaatattttctcccattctgtgggtggtgttttcgctttatcgataatgtccttagacatataataaattggtattttaaaagtgacttgattgggctgtg

SEQ ID NO: 724187 - DNA, 172 bp, Homo sapiens
tctagagttatcccctccataggtccgcaggctacgacctgaggacggctctagccaacagtcagaacaacgccaggatccctcactatgagagccacgaggaaatgaattctgccaaacaatcctgcagtgagcttggcaagcttgatttttccctctagtttatgtttcc

SEQ ID NO: 724188 - DNA, 139 bp, Homo sapiens
gggcccaaagggggggggaaaatggggggccccattgggggcctggaatttaaaagggccccccctcccccccccccccggtttatttgggtttagggcccaaaaaaatggggttttggcccaaggaaaaaccctttta

SEQ ID NO: 724189 - DNA, 1301 bp, Homo sapiens
ggctgatgtcccagcacctttcgcgggtatcattcggtttattgttgtccgacacaggttcccctccccggtgtcaaccggctgttgtgtaacagcacaatgtgttctttggggaccgctgtcccacgaagttcttcgtatccaaagtggtgtgatttccccccctggggccgaatgttctggctcataccctggggggcacccccctgggaggttgggggaccctttgtcccacaccttgggccgagaggccccttcgcgggaagcttccaggtgccccgggctggtgtgttacttctaccgggaactcttgtggggggcccccttgggctgtggcgattccctccggcaacacgtgggaacctgggccccccaccttggggggaaccctgggttttcacacgggcgctggggaaaacgccctaatttgggagtcctttttttggggcttgtgacccgaggagataaaatttcggggacccctgtgtacaacggggaaacctgggagaagctttgagttgggacccccgcacccccaataggaatgaaatggtctggccccccgaccccgacagtaaaatgggagaacaatatgggagaacacttccaccacttcccccaatttttctgagaccacgagcgctttcactgtctctctagaagaccacgccttttggggccacggctgtaatacacccacgagaaataattgttgaaatctgagagttgggaccacacccgcagaggggctcgcccaccttggagaatgttgtctttctccacagggccacttgagagcttggcacgtggagactcgtgttaaggtgcctcgtgtgtggtaccacagtccacagggcccacacccccgtgcacacatagataaccacacaaggaggcctcgccctcgcctgcgtttttggctctgtgtgtttgaaacttctttacacttcttgctgagagcttcctataatggagaaaaagcttttctttctgaactgtgagacccttcttgagaactgagatcacgagcccacctggagaattcccacgagccgaggtttggctttgctgtgcctagttgaacggccaagctcggcaatctgttgggtaaccagagtccacgaacttgggccgagagcggtccccacgcccttttcacaagttccgagaagtgtatagtcttgagaggccctggtggccgcacacttttaagcatgttggtctcctttagatggggctatttttaatgagagaaaatctgttcttttcccgccatggaaaacctttagtctcctccaagg

SEQ ID NO: 724190 - DNA, 323 bp, Homo sapiens
cccgggccgttgttgagtcttcatggataggcctgactgacaattctgtattaatgtgactgggtaagggtatgacctaatactgataggctgagtggggaaacacagcaaggcctgtccaaattcttggcctctctgtgcagcattaatcttcctccaggatatggtgcaggaccccttttggagatcctgccttgggctggtgaaaggagggcaggagaaggtcaaagagagattcttttttctaagggctgctcctgaggcctaaagtgccccaacattatgtataataagggatatgggagtcatgagctaggaaccat

SEQ ID NO: 724191 - DNA, 169 bp, Homo sapiens
tgactgtaccgaacatgggatgaagaagcaccttgctgaagggcagctgccctgtagagctagggtccccgaacatgaccatgacggaccacccacagcacagcagaaggtcgctgccctgtttccaaacagtgacacgggggtagacaacgacgcaaggtgcgtgggg

SEQ ID NO: 724192 - DNA, 92 bp, Homo sapiens
gcggccgcctactactactactgctcgaattcaagcttctaacgatgtacggggacatgctcataaaaaaaataattaaaaagttgtactgc

SEQ ID NO: 724193 - DNA, 94 bp, Homo sapiens
gtctgctcggtccgaacactgacattgaggcaggctgactgtactaaagtacgcaataacgcattatcagccaaagctggaatggccccagcag

SEQ ID NO: 724194 - DNA, 101 bp, Homo sapiens
  misc_feature (14)..(14): n is a, c, g, or t
  misc_feature (53)..(53): n is a, c, g, or t
ttcactaaatgagnagtgactacacattatctctacttttatagcagaagagnaaatgaagaaatcaaggagatataattactgagactccactgtggatc

SEQ ID NO: 724195 - DNA, 208 bp, Homo sapiens
aaggctcatctgaattccatgatttaaatttaaaaaaaaaaaaaaaggtggattggtttggaagggcgtagaaggccaaaggtggttaacagtttcggccaggtaaaaagatttaccgggccaggcgtggtggctcacgcctgaaatcctagcacttgggccgcccgagcagaacggatggcctagagtcaggagtacgaaaacagcc

SEQ ID NO: 724196 - DNA, 467 bp, Homo sapiens
ttagactgtcgatcaggtagaaatttcccacagtgaatacgaacatctccagctagggatactcctatcacttagtgcacaatcccacaacggatagaagatgacagatgagtataagagactgtccagaagcaggaggaagacgactggcagacgtgctcagaagaagacggtcccaaggaagaggactgcagtcaggactgtaaggaaagctcaacagcagatactgaggctcggagacaggaaaaccccatagaagaggcagatacacaatattaaagccatctggtatccaagcaggagtaactggaagctactttaaggagctaacacactgggagaaaggtagaaagatgggcaactaacggtcggactggtgggctacccataatgtaggtaagagtacaacaatcaagaacatcatgggcaacaagaaagtatctgagtcagccacacctggtcacaca

SEQ ID NO: 724197 - DNA, 183 bp, Homo sapiens
tgggtagagtgggtggaagagggagcggagctgagaccgaggagagaatgaccttaggggaagataaggatcgggcggggaccgagagacgaatggtgcggaaacgcggtgaagtgagggcttaactgcgggtgatggtttggggaacgggacgtggctggggtgtatactgtagacggggta

SEQ ID NO: 724198 - DNA, 102 bp, Homo sapiens
gagacgacgtgcagaaatggcacctcgaaaggggaaggaaaagagggaggaccaggtcaatcagccttggccctcaggtgcttgagggagagatgtatttgg

SEQ ID NO: 724199 - DNA, 219 bp, Homo sapiens
tcacgccactacactccagcctggtgacagagcaagactccatctcaaaaaaaaaaaatctaagcaaactatctttgagtcaaaaaaagttggataactcatctatatttgaaataatgctgtctgaatggccaacatcccaagaatgtattaaaaacagcaacctgcctaccgttttgatgacctttttccatattaaacaagttgagaacaaaaaaa

SEQ ID NO: 724200 - DNA, 164 bp, Homo sapiens
accggttagggggtttgggttttaccagggaaacttaaatccaggcttttggttaaagggggtttttcccacttaaatttaaaagccgcctttttaaaaatttccaatccaaggtttttccggattggttggttattttttaaaaaaatcctggtcagggggga

SEQ ID NO: 724201 - DNA, 108 bp, Homo sapiens
aatgatgggtcacgatggacgaggatgaatggtggtacaggcagctatataatgtttaaacttttaagatcatcgaacctacaggcagaaaagatggtagatcgtgaa

SEQ ID NO: 724202 - DNA, 130 bp, Homo sapiens
tgccagcgtcgctctagcaggatcccccgttatagcaccgtaggtaaatatgttgagcggacgctatagcggcctgtgactagctatgttcgacgtccctgtactgcttggatcagctgatatttcgatc

SEQ ID NO: 724203 - DNA, 895 bp, Homo sapiens
  misc_feature (12)..(12): n is a, c, g, or t
  misc_feature (378)..(378): n is a, c, g, or t
  misc_feature (382)..(382): n is a, c, g, or t
  misc_feature (428)..(428): n is a, c, g, or t
  misc_feature (433)..(433): n is a, c, g, or t
  misc_feature (440)..(440): n is a, c, g, or t
  misc_feature (444)..(444): n is a, c, g, or t
  misc_feature (505)..(505): n is a, c, g, or t
  misc_feature (578)..(578): n is a, c, g, or t
  misc_feature (649)..(649): n is a, c, g, or t
  misc_feature (652)..(652): n is a, c, g, or t
  misc_feature (659)..(659): n is a, c, g, or t
  misc_feature (682)..(682): n is a, c, g, or t
  misc_feature (686)..(686): n is a, c, g, or t
  misc_feature (693)..(693): n is a, c, g, or t
  misc_feature (710)..(710): n is a, c, g, or t
  misc_feature (749)..(749): n is a, c, g, or t
  misc_feature (775)..(775): n is a, c, g, or t
  misc_feature (815)..(815): n is a, c, g, or t
  misc_feature (890)..(890): n is a, c, g, or t
tattcaaaaggntcacaagcctcacatcaatttggcttcaaaaagacctcatgtcttaaaactaagtcccgtgacaatcattttgccaccggtgaaagtctcacgtcgaaaaagcctcaacataaaaaaattacctccaaaacccactgagacattctcacataaaccaggatactgcacaaacaataaagtgctttcttcaatagtgaatcttttcaatttcatccatgtctgcagcgtggagtggcttaatactgccgtgaaagtggtcctggattttcatgagcgagggcagcccacctacttcaatcatgtggaaggcaaggccttttttcccaaagcgccccgtccgccccaggcggtggagggagggctcanagtncggctcccctccttgttttacagggagaccaaagtgcacaacaatngtganccgcctnacancaatccctcgggcacaaacattagtggtgatgagaaccttctctttcccatcccgaaaccnctgaatgagggaagcgcgccgcgccacggtcagcgccccgcttaacaaagacacctggcggccatcctgtatnatctccacggtcaaccacttagcgtttcgacgagttttgcagaagaagaaggcctgaccaatggtgaagcngcnataaatnttgcacagagcttggtatttgtntttnctgttcncacacagcacgtaatantgccggatgttgttcagtgttagcccctctttgcgtaanttgataacattagggtgagggatgantcgctcagcaaagtgccaaacagagttctcaaaggttgcngaaaagaggagcatttggcattcggagggtagagctctttgaatacgaatactatgatctgagaattcttgagtntgaat

SEQ ID NO: 724204 - DNA, 154 bp, Homo sapiens
atctaagatccgttgggtgaggccaccatgctcacagttgcgctgctggatctcggggtactccagggcactcttctccagctttcctgggaggcgcacttggatctgggaactcctttggtctaacaaaaattagaattcctcaaaagttttc

SEQ ID NO: 724205 - DNA, 114 bp, Homo sapiens
cgcgcgtattcaaagtgaataatcaagatagaatctacacctagggttgcgacagttagaaaattttacataaaaataacctatcccagcaaggagaaagtaagttacctatcc

SEQ ID NO: 724206 - DNA, 112 bp, Homo sapiens
ttcaggagtaagcccagctcaagtcctacgagccctttctgcacaagtcacccagcctttcttttatcctttacttatgttacttgttctttgtgagacggagccttgctct

SEQ ID NO: 724207 - DNA, 123 bp, Homo sapiens
catgcttccagggttattagtaagtttgtgaaaacaaaaaaagcctttttggtctttttcagttatttgaaggtccagcatcctgattaatgtctgacacattaatgaatgaccagcagcagc

SEQ ID NO: 724208 - DNA, 255 bp, Homo sapiens
agccctcacttacagatctctaacaactggtgggggtcttcgctccaactcttcttccgtaggtcaaagccactaccaatctgatgtgttagggatgggttctgatcggcagaaattaatcagctcccaatggagcccatggaactaagtagggcccaagaaaaaaaacgggagctatttcacaggggctgagtttcggccaaagtttcattcctcaaaagctttaagtgagggttaaattgcgggagtaacccg

SEQ ID NO: 724209 - DNA, 928 bp, Homo sapiens
tcgcatatctattgcatggttctctttgggtgctcggaaggcgcgcgatcttttgtggtagaccttgttacgtggatgacccgggaatgtgccctggagagcctttttgtagctgaagcttattttcccgctgtgtctgtcatgtaccctacgatgtctatgtttttatatccttccgtgggtgccaagagatccgcgtaccaccacggcgcccaagtcttggcatactctaattaggaccagaattggcagactcactttgtatacagaggctcgagataaacatggggctcacactgacgacatgagagccaagtagggctgcctaagttctggcatagacatgattgtgagactgctgcttgcgcgggctataccagtcctcgtgcctactggggcctcatgaaacagttgtatgactttatgggaccaaatttgaacacgctcacttggagttacgcacttcttgaagcactcaagaaacatgaagattctgcgtattccccggaggctagatgtgtctaataacgaaagacgttcagcgacaaccaagaaagagaaaaggaacttctaacatagataatgctgattcgctgctggagcaagagactttaaagtctaaaattctgaagtacagttttatacttctgtcacaggattacattaaattgccggttcttcatagctctagaaggctgaatactgatgtttatgcttcagttgacagagtttacccaccatctgtggtttttcagttgtttattcttacatgatatcgatctacacattctgtgtaagtagatcgaccttaactccacaggacggacatgtttagagtttaaatgattaaggctaatcattctgtttagtaatgtcatatttgcaaacttttttagtttggcctttaatactacaagcctattatgta

SEQ ID NO: 724210 - DNA, 214 bp, Homo sapiens
aactcagggtgactgggtagcgggactcgagttcacgcgggctgaggcggacacttctgtggagcgaagcagtgggagcatcgagcactagagtgcggcacctgggatcccctggctccggggaggtggggcgccggaccgggcaggaggggagggggcgatgctggaagccatggcggagcccagtcccgaagatccacctccgacccttaag

SEQ ID NO: 724211 - DNA, 354 bp, Homo sapiens
gagcctgcgatatgattgagatgggggctagtttgtcatgtgagaagaagcagccggatgtcagaggggtgcctgggtaacctctgggactcagaagtgaaagggggctattcctcgttttattgctatagccactatgcgtaagacataaccgcggccgcggatatgtcttacgggattatcttctttcttggtaaaggatacatgaaacttggaaatcggaccaatatatttactgtaatacttgaaatatcaagaatagcccaattagggtttatttcaacttattttcaaatttaaaaatcatgtatttcaatcatagtccaatagtttatgcgtaagacattaccacgg

SEQ ID NO: 724212 - DNA, 331 bp, Homo sapiens
  misc_feature (88)..(88): n is a, c, g, or t
  misc_feature (90)..(90): n is a, c, g, or t
  misc_feature (212)..(212): n is a, c, g, or t
  misc_feature (311)..(311): n is a, c, g, or t
cccttagtagcggccgcccgggcaggtacgcgggcaaaaagaaaatactgtaaacaactttacatacatgatagtttaagatgaatangncaaattctagaaaaccaaaatgtcaaaactcacccaagacaaaatagataatctgaaaatcctgcaactgttaacataattgaatttataattaaaatccttccaaaaagaactatccaggnaaataaataacactagttttatacagagtcttctagaaaatggatgaggagggaatacttcctaattcatcttatgaggctgctattaccttgatatcnaaattagacaaagacagtac

SEQ ID NO: 724213 - DNA, 115 bp, Homo sapiens
ccaggaaggaaccttaacggaactattctccctggaagatgtttcttactatccatgtaatataacatagctagttgggtacttgtctgttcaagcacttatgacccctacgcct

SEQ ID NO: 724214 - DNA, 161 bp, Homo sapiens
tgtgggaagccaccgtggtgaccgcagatatgtactggtcttcgccgttgcgtgaggtttgccagtcgggactgccagttacatggcgcgttcagctgctccagcaaggaggaggtgttgagcatcttccactggtaggactttagcagctcgttgtattt

SEQ ID NO: 724215 - DNA, 864 bp, Homo sapiens
gtaccctcggtttcccgcggtgtggctattcaccgtggcacagcgtacccgtgttcgtatcacaccgggctatgtttcccgccttgtggtctcggcggtggtatccttgctcccctgtccgtggcacctgagaatagtgcggacgccggtagactgatattcctcttgcccggccatgtctgttctgccccccgatggtcccgtctctcgtgatgcccgagctctgagaattgggggcgcacccgggccccaaggtttcccgtgccggcgggtggttgcgccgcgtgtgcttcaccgcggcctgtccgggattggggcggtcatattttccggtcccccccacgttattcacggcggtgcctactaggtatatgacacatgcggcggatatatgctggactatagcgtagtaagtgtatttcacacgtaatgcctgatggttgatataacctagcgtgtgtccacttcagaagtacatgaggtgaatgcatagatgtatcgtaggatcttctgctgttcgagagcctcaacgtgagcccgcaccttagtgagagcccctaaatttagggatcttcaaatacgtaatctccacccctcttgatcacattctaatgcaaggctcaattaccctaggcacttttaggcaaatcttattagcttcatgtaccccaacctttgcctacctttttacatctccagagacatgttatctggatctctgattacccaaattgtgaaaccatcactttgagatttaagaactaggcccagagataagacaaaacctcactctccagtcatgactcttaatatatctttgtcacgcagcacccccccccctggacacgccggacccccttgtcc

SEQ ID NO: 724216 - DNA, 201 bp, Homo sapiens
aaggcgcacgatggcgcgtactggtgaaaaaggagagttctcccgccctcagtgttggcttcagtgtggctggagacactgctttactctggagacgctgcagttgccagtcttgcgggtcacagtggacaattggtgctcacacattacaatggcctcgtggaagccctggcccaatgccatgccaatggggaacactct

SEQ ID NO: 724217 - DNA, 552 bp, Homo sapiens
ctagtccacgctcggagccatgccgtgccaaaggtccgctggcagtcggtgcaggtcttcggacgcaagaagacagcgagcagctgtggcgcactgcacaacgcgggaatggtctcagttcaaggtgaacgggcggtccctggtagatgattgagccgcgcacagctacacgtacaagctgctggagccagttcggccttctcggcaaggggagcgatttgcgtggtgtaggacatccggtgtccgtgtaaagggtggtggtcacggtggcccacgattgatgctatccggtcagtccagtctccaaagccctggtggcctattaccatgaaatatgtggatgaggcttccaagaagggagatcacaagacatcctcatccgagtatagaccgggactcctagctgggtagcatgaccctcgtcgtctgcagagtccaaaaaagtttggaggccctgggtgcccgcgctcgctatcagaaatcctaccgataagcccatcgtgactcaaaaatcacttgtataataaacagtttttgagggatttaatagag

SEQ ID NO: 724218 - DNA, 1663 bp, Homo sapiens
  misc_feature (520)..(520): n is a, c, g, or t
tccacccagtaggtgtctttatccatactggtggacatttccccatgggggaaggggtggaaggggagggggcagggaggggctggagcgggagaacgccagggctggagtttcccctccactccaggggaagaaagaagactcgagataggagccatgcataaggataagagggaccgggggaacccatctcacatagtggtgggcgtgagaagtgccgcggggcaggtgcacttcagaacaaacgcgtgagctcctttcgtgctcgagtgacaagtgcgaattctcatagaggtgagaacaaacaaaaaccaagaaccccaagagaaacaaaagacacagaggtgtgcatatcacaaagagacacaagcgggtgcatagagtgtgtagagaagagagcggtctcatagagggcacagaccaagaacgaggggcacaaagagacacgaggggagatctcgtggagagtgtggacaccacgcgggtggccgatgtgacacgctgtggtcacccagtgtgnccccgagatgggacaccaaggggatgtgtcgcgggagacccatcaccgagtggaccctctcttgagaggagacagcgagtttctctcccgaagtgagggccctcccgaggagggggtatctcgtggggtgagagcccctaccgagacagaggggtgagtctgaaaagagggaaagacagagacaggcacgtgaaaagtagggggtagcggaacgaagacacacacagaggggggacaaaacgtccccacacaaaacaggacaggggggagcagcgacgaaatagtaggaaacaaatcattatatcatacaagaagaaggaacctcaccccataaaaaagaagggggggggggcccacccgacaagagagaggatcgcgaggacgggagcacaacacttagagagagagaagaggaaaaagctgagtgtgcagcgcacgagagaggaaatagagaaatacacaacatgagcacgacaagtcacatatactagcacgtgggggagaacacacgcggggagaaggcaggagaaaccaacgaacccactcatgcgagagaaaacagtcgcaaaaaatatacagcaaacagtagataacgaaaaatgtgaaaaacaatctggatcgaatatagcaagagtacacacacagtatcaaagagcacacggaacgattacccaagacgcccaactgaggggagaccaccaaacaaagataccacaacgagcaccacgaggacataacaccaaagatgagatggacgaacaacgaaaagcgacgcagtgagagagcacacggagaccaccgaccacgcgacaacaccagggggaagaagagaagactagcacaacagacagcatgcccaagaaaagaatggggcgacccaataaaagaaataggaacaccggagaagaaatcaaagagcagcacgcaaccagcacgacgaggacgcagaccatcagaggaaatcgcagatcgcttcagaccgatgaaccaagacacaactacacatgatgtcaaaaaagcgacacagcaacaagactgacgcagacgaacgcaacgagcgaaaggaggcaagaacgatagactaatactgacatgctcagcggagcctccggtcagccacagatgcaaaggcaagacaaacaa

SEQ ID NO: 724219 - DNA, 102 bp, Homo sapiens
gtcaccgcacgtcaacttcatggatgagctgggcagttatgccgttcattcgttggctcgcccttttgagcaaggacgatccgcacagatggccccattcga

SEQ ID NO: 724220 - DNA, 449 bp, Homo sapiens
agcggagcctgtcgctccgggggccgcggcgggcggggctccggcggggcccggcctagtcccaacaagaaaaagaatacaaacagaaaaacaaaacaaacctcaagacaaacacagaagacacacagcatcacaacacgaaaccacacgagacccagaacagcgaccacaacgaggaagcattctacagaacaaaaccaacgccggcacacacaacagaccacccaacacaacgaggcgacaaacagagacacacacacaaagccacgaacaaacaggcagaaaagacaagaaaagaaagaaagaaaccaccaaaataagcatagccactcacatcaaggagaagacagaaagcgcaacacagaacacaatagagcgaacaacatatagcaacaactacaacgagcagaaacaacaacacagagagcaagcaagagacgtaggacaga

SEQ ID NO: 724221 - DNA, 277 bp, Homo sapiens
gcggccgcctactactactactaaattagcggccgcgtcgacaacgtaatgaggatgaactgagagataatgaatgatcatgaccctggcccaagtaacaagaatgaactgtgagataaatgaatgatcatggccaaaaaacccaactacaacacaacaacaaaataaagtgattacaaaatggacaaagaacatttaaccaaagatgcaaagatgatatacaaatagccaacagatacatgggatatatgagaagatatgtagcatcgccagtcat

SEQ ID NO: 724222 - DNA, 278 bp, Homo sapiens
gccccagccggccccgaccgggtcaggagcactgctcgcctgtacatactgttgccctagcccacctggtgccgtgggagccagccccaggtgctgggggcacagcccgtccccactccgggcacgcccgcaccacccggtgtttctgcctgtgatcctggacctgcgtcctccccagccatgggaggggtgtccttccatcagaccatgcccccagatgaattttcttaaaatacgacgaaacaaactgcacctggcaaaaaaacaaaaacaaaaaa

SEQ ID NO: 724223 - DNA, 157 bp, Homo sapiens
tagcatgaaactcaaggaatcgagcgcagtggatcatgcctatcatcccagcacttatgtgatgccgaggcgggcggatcagcagttcgagacacccctggccaacatggtgaaaccccgtctctactacacatacaaatataggcacggcatggtg

SEQ ID NO: 724224 - DNA, 109 bp, Homo sapiens
gcgaccgcgtgcttgatcccacccggccatcaccgtgcccagcggcttgtccaggcccggtacgcgcggttcttgctcctggcgctcgccgtagcccaaccggggatcc

SEQ ID NO: 724225 - DNA, 481 bp, Homo sapiens
  misc_feature (426)..(426): n is a, c, g, or t
cacgaggatcgtggcgcgcatggccctggtgccgcgcaccctggaggcgcgcggactggacgccacgccgctgatccagcacaagctgcgccaggtcggtacaccggacgcgctggccgccgtggcgatcctggacaccatcctgcgcgaggaagtgggccacgtggccatcggcaaccactggtacggctggctgtgcacgcgcgacggactggaccccgtggcgcactacgccgcgctggtccagcgttacgaagccccccgcccgaagccgccgctgaacgaggcggcacgccgcgccgccggtttcagcgaggcggagatgcgctggctgcagcacggctgaatcgcctccatccgcactgccatccccgagccatcgggggttcttccctacaatgccagcagcgatacgccacgccgctnccgccagccctcgcgcctgcggggggcatccgcatcgcccggtatcccgcacacg

SEQ ID NO: 724226 - DNA, 113 bp, Homo sapiens
ttggaaggacacaaaatcagcattatcaaactgaacagtataacattaccacggctacacagagttaatgtgcattattcggcataaaggctcttgttatcccaagtaacaca

SEQ ID NO: 724227 - DNA, 198 bp, Homo sapiens
ccagtatttgtcattcttctagataaaaggatagagttgattgaagttgactatttcccttcccccagattagttaggctctgataataccccaacaagttaggcttggttaactaatttaccctgagggtagaccttcttaaaaaaaacagaaagctctggcataattcaaaaatggctccttttctcctccccctc

SEQ ID NO: 724228 - DNA, 343 bp, Homo sapiens
tcgctcagccaacccaacccatcccagccacccagctacatccccagtgtcatcatgcccatctcttccccagctggcactgcacaggcctggtgtgggcagtggcagtgtcctccattggcatctccaccaacatccagccaatcccaggcccgggccttcagccaagcagctccttgcacagcctggcatgttgggccaggtgcacacagggcatgttttcctgcctccatggcattcattgggctccaagtgttggcatggcagctgtgcaccagggggcatcctctcagcagtctgcactgccagggcatgccccaagctatggacactaggcctgtct

SEQ ID NO: 724229 - DNA, 113 bp, Homo sapiens
gacgaggattgctaggatacttcatagtgactttctcgaacctgcatccgctggaattgggtacagatgcaacatgaaagagaacgacgtcatacaagttttgaagggacacc

SEQ ID NO: 724230 - DNA, 242 bp, Homo sapiens
  misc_feature (40)..(40): n is a, c, g, or t
  misc_feature (109)..(109): n is a, c, g, or t
  misc_feature (156)..(156): n is a, c, g, or t
  misc_feature (173)..(173): n is a, c, g, or t
  misc_feature (199)..(199): n is a, c, g, or t
  misc_feature (231)..(231): n is a, c, g, or t
  misc_feature (238)..(238): n is a, c, g, or t
tgtggataagataaagaacaaaacacatgcatctaaactnctgggcaatccagctgaatgtgttaagtgtttggaattccattcttacatttaaaagtcaactggattncccagcagtttagatgcatgctcgtgccgctcgtgccgaattcggcnggggccgccctcatcanggccgtgggcgtgcggttacgcaagnaggcaagcagctaagagtccgggatccccagnctactgnctct

SEQ ID NO: 724231 - DNA, 139 bp, Homo sapiens
  misc_feature (73)..(74): n is a, c, g, or t
  misc_feature (105)..(105): n is a, c, g, or t
  misc_feature (108)..(108): n is a, c, g, or t
cctgggccactgacgctctggcctctgtgggaatcacacttggctgccctggcattgggagagggagggaggnnggaagggagggaggggctggaagatactganggnttcctttttgaaaggtttttttttattgtaa

SEQ ID NO: 724232 - DNA, 1066 bp, Homo sapiens
  misc_feature (1066)..(1066): n is a, c, g, or t
agcgcgttgtacccgaggtaaggcttcttggagtcagagcaggagccggaactgtgggcccagtaggaagagtggggcccgacggcggaggccgcgcggccagggttcgctgcagagctccacgcgagggtcctgccggaaggaaggattttctagccgctgcgcttgggccctgccgcctctccttaagtgcttgagggacgttgcaaagagcgccagtcgcgtgcggcgccagctccctgtggctcgacagcaatgcccgggggcgtcatcgggtagctgtgctaagcctcctttaataagctttttttttttttatttgaaagattcaggggtcagggctcgggttcccagggtaagagtggcatttgggcgcagatcacagctcactggcagcctcgacctcctgagctcaagcgaacttccgggctcagcctccgtgagcttccgtgagtagctgcgaatacgggcacgtgccaccagtgtccggtaattagggatatgggtaaagagtgtctcgccatgttgcccaggcgggtttcgaactccggggctcaatcagtctggatgccatcggctccaaagtgctgcgcataaacaggtcctaatatttggaccagttataaaagctaattaccagggggcatatgtctgagtcctgtggacctcagggtaaatccaactctggaggcctgtgaagggttccaagggataacgacaacgctagggtcacgacaaattgggcaactggtggacagtttgagttggaacccagtttacggggggcacttgggaccacaacctgtgcggacacccttgaaaacccaggttgtaacaccaagaaacgagaaaggggaccctacatagagagaaaaggggggagtgtataaagattgggcgcaaagggagagccaattaatgggtgccacagagggtaaacagagaggtgagcgtttaaaaagaatctggcagagtggaggagaaggaagagccccggagatagtaatggggagagggaccatattaatgtgaggagaagtatctataaaagatagatgtcgtgagn

SEQ ID NO: 724233 - DNA, 101 bp, Homo sapiens
gcggccgcctactactactactactactgctcgaattcaagcttctaacgatgtacggggacatgtaataaaggtgtttattgttttgttcccacaaaaaa

SEQ ID NO: 724234 - DNA, 266 bp, Homo sapiens
  misc_feature (170)..(170): n is a, c, g, or t
aggctcccagaagggcgaagatgcgagatgatctaaaaataccgaagaaagagaggacaaccagaattccctttggacatttgtgtaattttgtcctgcgataatgtatagtattttcttcttcttcttccttaaagacatttaagctaaaggcaactcgtacccaaatntccaagacacaaacatgacctatccaagcgcattacccacttgtggccaatcagtggccaggccaaccttggctaaatggagcagcgacagcgagg

SEQ ID NO: 724235 - DNA, 176 bp, Homo sapiens
ggctatgtaccaggctgtctcaaactccttggcctcaagcaatcctcctgcccttgcttcacaaaggtgctgggattacatgtgtgagcctctgtgctcagcctctttttttttttttttggggagagggagtccccttttgtgtggcccagccgggccggcccaagccgggccgg

SEQ ID NO: 724236 - DNA, 230 bp, Homo sapiens
cttgattcattctctgctgactagacatgatgtactaatgcttcaagctgagaatctaaatgtcgcttgactcagtaccaatataataatgctatacttgaattacttgtgaaaaccacacattttaaagattacgtgcttcttggtacaggtttgtggatgaccaggttatcgtcctgccggttaggtggtgccattctaaattaaatatatattcggcacggggagta

SEQ ID NO: 724237 - DNA, 920 bp, Homo sapiens
ggtgagaaggagatgcggtgctgctggcctgttgggggtcctgctgagtgtgcctgggcctccagtcttgtacctggaggcctctgaggaagtggagcttgagccctgcctggctcccagcctggagcagcaagagcaggagctgacagtagcccttgtggcagcctgtgcggctgtgctgtgggcgggctgagcgtggtggccactggtacaaggagggcagtcggctggcacctgctggccgtgtacggggctggaggggccgctagagattgccagcttcctacctgaggatgctggccgctacctctgcctggccatgaggctcatgatcgtcttgggattctcactttgattactggtgattccttgaacctccaggaacgatgatgaggaccccaagtcccatagggacctctcgaataggcacagttacccccagcaagcaccctactggacacacccccagcgcatggagaagaaactgcatgcagtacctgcgggggaacaccgtcaaggttccgctgttcaggtgaaggggaaaccccagggccaccattcggttggtttaggatgccagggcctttcatggggagaaccgattggaggcattcggctgcgccatcagcactggagtctcgtgatggaagagcgtggtggcctcggaccgggacatacacctgctggtagaagaacgctgtgggcagcatccgttatagtagctgtaatgtgtttgagcggtcccccgacggccaatcctgcaggcgggctccgggcacaccacagcgggtgggcagcgaggttgagctgctgggcaggttgtaaggatgccagcccacttcagggttgagcacatcgtatcacggcagaaggtcggagccagacggtcccttttaagttcttagatgaagataaagtaa

SEQ ID NO: 724238 - DNA, 100 bp, Homo sapiens
ctggctgacacggcgcgtgtcgcaatacatgaggcggtgcatggctatatgtccctgctgcctccaggaacagacctcagggtccctcagtgagggtctt

SEQ ID NO: 724239 - DNA, 1214 bp, Homo sapiens
cgggtacagtggctcatgcgttaacctcagcactttgggaagctgaggcacgtagatcacttgaggttaggagtttgaggccagcctgccaacatggtgaaaccccatctctactaaaaatacaaaaaattagccaggcgtggtggcagtcgcctgtaatcccagctacttgggaggctgaggcaggagagttgcttgaatccaggaggcggaggttgcggtgagccgagatcgtgccactgcactacagcctgggcaacgagagcaaaactccatctaaaaaataaaaataaataaaaactagagtggctttaatgtgcgagcctgaatgcaaaacgcagctcaccgcctctacctggagatcaggaaccccgggccacacagggccatacgctgggtctctgtgggatccaaagcccctgtgggttgtgttgggggacagcagctcctgggctttccccgctaactgccaccgttgcttgtgttacagcgcgttccttcacctcgggcagaataactttgcagaagcccacaggttcttcacagagatcttaaggatggatccaagaaacgcagtggtaagatccccaagctgcaggatcctccatcctctgcctttcacagacgctagaaacatacacccacacacgtctcagcaggggcctgcgcgctctctctccagtccaccagctccaggcagtggctgtggcccttaggggaagtgacccaacagggccacctaggctctgcccagcagctctgcaccacccccaggcccctaacacggcccagcacgcagcctggaatgggcgggcgtctgtcctggttgtgtgggccaaccctgggcgtgtgctcctccctaggccaacaacaacgctgccgtgtgtctgctctacctgggcaagctcaaggactccctgcggcagctggaggccatggtccagcaggaccccaggcactacctgcacgagagcgtgctcttcaacctgaccaccatgtacgagctggagtcctcacggagcatgcagaagaaacaggccctgctggaggctgtcgccggcaaggagggggacagcttcaacacacagtgcctcaagctggcctagctgcctccaacacactacgtcagaaggacccgggtctttgaaactgtgtcttgaagctaatgtattaatgtgacatggaggaactcaataaaactcctgcttcactgg

SEQ ID NO: 724240 - DNA, 185 bp, Homo sapiens
  misc_feature (73)..(73): n is a, c, g, or t
ccgatgtgactacgcggctggggtttcaccgtgttgggcggctggtctcgactcaggtggtctgccacctcangcctcccaaagtgttgggattacaggtgtgagccactgccaggcagccatttttttttaagccactttactgtccttttttccccagcaatatatatgccgtgaaccaacga

SEQ ID NO: 724241 - DNA, 257 bp, Homo sapiens
tttggggcccccccctgtgcccccaattgtgcctggccccaaggggggggtggggggttccaaacccccaagttttccttaaaatttggccgcccccccccggcaaggggccttttttttttgcaccccctgtgggggggggccaaaccccaccctaacctgggttttccccccaaacggtttgtggggtgttttaaaaaaaattttagggtttcaaaccaaattgacccaaaaaaaaatgtttaaaactttccgga

SEQ ID NO: 724242 - DNA, 1745 bp, Homo sapiens
  misc_feature (1083)..(1083): n is a, c, g, or t
gggttcctgcatcgggcctgagcagaactaggcgcgccgcggcccggcacgcgcaggcgtacagagctgcccgggggtgccagttcctctccgattcccggcttctgtcaccttcctcacggaccttggtcacggccgcaggtgaccccttagcccagctccagtgggcgggtggcagggtcatggaggacgctggcggcggcgaggagaccccggccccggaggccccgcacccccctcagctcgcgcctccggaggagcaggggttgctcttccaggaggaaaccatcgatcttggcggagatgagtttggatccgaagagaacgagaccgcatcggaaggctcgagtcctctcgcggacaagctgaacgaacacatgatggagagcgtcctcatctctgactcccccaacagcgagggcgacgcgggcgacctgggccgagtgcgggacgaagctgagcccggaggggaaggcgacccaggcccggagcccgcgggcaccccgagtcccagcggcgaggccgacggcgactgtgcccccgaggacgcggcacccagtagcggaggggccccgaggcaggacgcggcccgcgaggtcccaggcagcgaagccgcgcgcccggagcaggagcctcccgttgcggagccggtcccggtgtgcaccatcttcagccagcgcgcgcccccagcctccggggacggcttcgagccgcagatggtgaagtcgcccagcttcggtggcgccagcgaggcctcggccaggacaccgccccaggtcgtgcagcccagccccagcctcagcacgttcttcggagacacggccgccagccactccttggcctcggacttcttcgactccttcactacctccgccttcatttccgtcagcaatcccggcgcgggctccccggcccccgccagcccgcctcccctcgctgtgcccgggaccgaggggcgccccgaacccgtggccatgcgagggccccaggcagctgcgcccccggcgtcgccagagcctttcgcgcacatccaggcagtgtttgcagggagtgacgacccctttgccaccgccctgagcatgngcgagatggaccggaggaacgacgcctggcttcccggcgaggctacgcgtggagtcctgcgggccgtggccacccagcagcgcggcgccgtgttcgtggacaaggagaacctcaccatgccgggcctcaggttcgacaacatccagggagatgcagttaaagacttgatgcttcgctttctgggtgaaaaagctgcagcaaagagacaagtcctaaatgccgactcagtggaacaatcttttgttggattgaaacagctaatcagctgcagaaactggagggcagcagtggacctgtgcggacgtctcctcacagcccacggccagggctacggcaagagcgggctgctcaccagccacacgacagattcactgcagctctggtttgtcaggctggcactactagtgaagttgggccttttccagaatgctgagatggaatttgaacccttcggaaatcttgatcagccagatctttattacgagtactacccgcacgtgtaccctgggcgcaggggctccatggtccccttctcgatgcgcatcttgcacgcggagcttcagcagtacctggggaacccacaggagtcgctggatagactgcacaaggtgaagactgtctgcagcaagatcctggcaccttactgcaggcatcttacagga

SEQ ID NO: 724243 - DNA, 84 bp, Homo sapiens
  misc_feature (44)..(44): n is a, c, g, or t
acctccactgcgccccacctccctgcctgtgtgtgttatttcanaagggaaaagaacaaaaggaataaattttctaagctcttt

SEQ ID NO: 724244 - DNA, 274 bp, Homo sapiens
cacgagggcgggggcagcggccggaaacggatctcccggttgcgggaagcgggcctcactcggtcccaggacaataaattttctctatttcatcaccaaaactcgctttaccccggggaacgccccccacaggattcttccaatccctgcgtggggacggtaacaggtacgttcacccagacatagcctatggcagcaccacgcacgccttcaagttccaacatggagtgattgcaacactggtctctcccgtctcaacggggtcctacattac

SEQ ID NO: 724245 - DNA, 228 bp, Homo sapiens
ggggggccccccccttttttccccagataaaagggggaattaaaaagggggggcctggggggttggggcccctttttccaaaaagggcccccccgggccccctgggggtggaaaaggcccccccgggaaggggggggggggggggttttctttttttttacccccgggttttcttcccccaagggggccccttttttcccctttaataaaccccccccttttttggga

SEQ ID NO: 724246 - DNA, 1438 bp, Homo sapiens
  misc_feature (57)..(57): n is a, c, g, or t
  misc_feature (59)..(59): n is a, c, g, or t
  misc_feature (78)..(78): n is a, c, g, or t
  misc_feature (90)..(90): n is a, c, g, or t
  misc_feature (123)..(123): n is a, c, g, or t
  misc_feature (154)..(154): n is a, c, g, or t
  misc_feature (821)..(821): n is a, c, g, or t
aagcattatattcatacttcttagaattacttcactccaacttagattccacctcanantctcttgacttgggtctanagggtcctcatnggacttgggactgagagggtcctcacttggacntgggtctgagaggatcctcacttggactggnaaagtagctgtggtgcgcaggtgcaagtccagcagccaagcacagacgaggggcctgtgcttggcattggggcagctgagcgcagggtggttctgcagtgtctgtggccagtcataggcctcggtgtcctggaccaaaggtcagagcccaaggtgatcagcaaggagaaagcctcagccactgcaggagtggtgggaagttgggataaaccagccaccccaggcaggacgaagggggacggaatgcaggaccactcaccgctatggctgagaggacctcagcaagaaccaaggtcacctctgaccgagttcccagagagcaggaacccagggcagggtggggagacgctgaggtggaagaagggaaggaagggccagggaagcgctgtgaagctgggaaagacttgagcacgttttacagaggggcacgaccccaggctccaggaggggtgcgggcaccttgaccgtctcgaccaggagggtggttttacgcacacagccacgtaccagcatccctcaggttgtacgatctgaagacatgcaggttcctgtacatcagccatagctcaacagagaccttcaaatagaaaaagaagagactgacttctggctgccagcctgagccgtggagtgtgctggctacagtcagggaaagagtggggagagcntcctccagcccctgccaccctgtgaggcctcatcatgctgatgtgacaccgaagtgcaagcaaaaagaaaatgtaggattggagacataaaaacagctgaaaagtattttcaagacgttgagaaagtaacacagaaattagatggactacagggtaaaatcatggttttgatgaacagcgcgttccttcacctcgggcagaataactttgcagaagcccacaggttcttcacagagatcttaaggatggatccaagaaacgcagtggccaacaacaacgctgccgtgtgtctgctctacctgggcaagctcaaggactccctgcggcagctggaggccatggtccagcaggaccccaggcactacctgcacgagagcgtgctcttcaacctgaccaccatgtacgagctggagtcctcacggagcatgcagaagaaacaggccctgctggaggctgtcgccggcaaggagggggacagcttcaacacacagtgcctcaagctggcctagctgcctccaacacactacgtcagaaggacccgggtctttgaaactgtgtcttgaagctaatgtattaatgtgacatggaggaactcaataaaactcctgcttcactgg

SEQ ID NO: 724247 - DNA, 403 bp, Homo sapiens
gcggccgcctactactactaaattcgcggccgcgtcgacaagaaacgcagtggccaacaacaacgctgccgtgtgtctgctctacctgggcaagctcaaggactccctgcggcagctggaggccatggtccagcaggaccccaggcactacctgcacgagagcgtgctcttcaacctgaccaccatgtacgagctggagtcctcacggagcatgcagaagaaacaggccctgctggaggctgtcgccggcaaggagggggacagcttcaacacacagtgcctcaagctggcctagctgcctccaacacactacgtcagaaggacccgggtctttgaaactgtgtcttgaagctaatgtattaatgtgacatggaggaactcaataaaactcctgcttcactgg

SEQ ID NO: 724248 - DNA, 1131 bp, Homo sapiens
  misc_feature (22)..(22): n is a, c, g, or t
ggctagcagcaggcgctccggngcagtgctcgtaacacctcctgggctgttcgaagacagcgaccttaactcccacacccatgcggctttcatggggccaaggtcattcctgagcttgattttcagcaaggcagagcaggcaatttaccagcggagaactgtgctcacgggctctgtcatgaaccctgaagtggcagccctgctttatgcacggaccctgcagcatccccagaggtgactgtgaccccgggcactgctccgagcaggctgggtgcgggtatagattcacagccatcagtggctcaggcattccatcaggaagacgtgcagcccgcaccccggctttagcgcagccccagtgcccagtgcggggccgctgcctttgcgcttctgcgtctacgtcaggctggacgcacaaggagactcggcgtcctgttcatcctcggtagcaagcgaccgtgacgcagcctcgcactactgcaagcctcagcctcctccttaaaataagggcatagatctgagatctctgaaatccctcccagctctgacattcacacagctctctcctctccttcaacacactggataaaggaaattacggttttcaagttctgtggtttgctcagagcaggtttttcttccgctgccactcctgagatagtcccactgaggtcaggtggcccgcacaggtgctttgttctggtcctcaccctcctcccacccgcccccttcccttctccagccccctctggcttctgcagcagggcttgcccacctctgagtgggagtgaaaagtaggccctcctgctcccctgccctggtggcctcttcaccacccaaggcttggccagcaaccaggtgaccccgaagcacccggcctgacccctctgcctcccaaaacaggccattctccctgtgctgcctgtggccagccctgacacccccacctggcggtctgggcggtccacagtaggcctccacttgctgagggcattgtcagcgtcacctgaaagtcaccagcttgccggaacattcttatgcaaagacatgaagaatcaattataaattcacaggactgacgtttcactaatcatggggctaaaactccccagggaaggtaagctcctgttc

SEQ ID NO: 724249 - DNA, 963 bp, Homo sapiens
  misc_feature (57)..(57): n is a, c, g, or t
  misc_feature (59)..(59): n is a, c, g, or t
  misc_feature (78)..(78): n is a, c, g, or t
  misc_feature (90)..(90): n is a, c, g, or t
  misc_feature (123)..(123): n is a, c, g, or t
  misc_feature (154)..(154): n is a, c, g, or t
  misc_feature (821)..(821): n is a, c, g, or t
aagcattatattcatacttcttagaattacttcactccaacttagattccacctcanantctcttgacttgggtctanagggtcctcatnggacttgggactgagagggtcctcacttggacntgggtctgagaggatcctcacttggactggnaaagtagctgtggtgcgcaggtgcaagtccagcagccaagcacagacgaggggcctgtgcttggcattggggcagctgagcgcagggtggttctgcagtgtctgtggccagtcataggcctcggtgtcctggaccaaaggtcagagcccaaggtgatcagcaaggagaaagcctcagccactgcaggagtggtgggaagttgggataaaccagccaccccaggcaggacgaagggggacggaatgcaggaccactcaccgctatggctgagaggacctcagcaagaaccaaggtcacctctgaccgagttcccagagagcaggaacccagggcagggtggggagacgctgaggtggaagaagggaaggaagggccagggaagcgctgtgaagctgggaaagacttgagcacgttttacagaggggcacgaccccaggctccaggaggggtgcgggcaccttgaccgtctcgaccaggagggtggttttacgcacacagccacgtaccagcatccctcaggttgtacgatctgaagacatgcaggttcctgtacatcagccatagctcaacagagaccttcaaatagaaaaagaagagactgacttctggctgccagcctgagccgtggagtgtgctggctacagtcagggaaagagtggggagagcntcctccagcccctgccaccctgtgaggcctcatcatgctgatgtgacaccgaagtgcaagcaaaaagaaaatgtaggtaagtgggatttcaccaaaactaaaaactgttgtgctttaaaggacaccataaagaaaaaaaaaa

SEQ ID NO: 724250 - DNA, 368 bp, Homo sapiens
agcatgttgcaaagagatacatttgagtcagtgggctgggaaggcagacccagccttaatctggtggaccaatctaatcagctaccagtgaatataggcaggcagaaaaacatgaaaaggtgagactggcctagcctcgcagcctacatctttctcctgtgctggatgtttcctggcctcaaacatcagactccaagttcttcagttttgagactttgacaggctctccttgctcctcaagcttgcagacagactactgtgggaacttgtgatcatgtaatttaatatttaataaactcccctttatatatatacacatacatacatacatcctgttagttctgtccatctaggaaccctaatacgga

SEQ ID NO: 724251 - DNA, 735 bp, Homo sapiens
cggtgggtttcctgacatgcgtgataagagtgggtttgagtttggtttggcttgttttttacagttgaattctatattatttggtcaaaatattactttgcaatttgcaaatgtggtggcacctaccattttactagccacaagtaactcataagttgacgtaggccctgctcatattataccaatattttaagtattttatgtttcatcttattagttattcattttattttatctaatgctctgccagaattcattccaaaaggtaaaaattactaaactataagactcttaaataaggcgtgtatattagcaacttagtttctgacatatagaacattaacattccactgtatcttaaatgtcttttgcctttttattaaaaaatgattaaatggttactgaagttttcctctgcctgacatataaatgtcttcatattctaacatgatattagggaactaaatatatgagtatagacttaatatttcttttgtcaactaaactgactaaattttgtcaaagcagattggagacataaaaacagctgaaaagtattttcaagacgttgagaaagtaacacagaaattagatggactacagggtaaaatcatggttttgatgaacaggtaaatattttaaaactaaatatatgttttctcaaatttcccagaggcgttcaagccccacttactgagtaggaaagctccctagagaaggcgcttctccctgtat

SEQ ID NO: 724252 - DNA, 833 bp, Homo sapiens
tagaccattcttttgtggcgcgtcccgagtagttaattgttaacatggtcatagctgtgacctagtgagatcctgtcaatgatcatgctaggatctcatccaagtaaaaaagagcacggtggggagaaagtggagacgttgtggatacaaatccaagtatggagtcgtgaggtccatatagagggatctgatgtaagtagtagtccataatcaggagatcgtagatggaaatttatgtgtgtcaatgtaacagatgaattagttggttgggtgtataaaacagacaagctcaagattgtaaagaagattgagaaattccacatgtcaataatgcgaattatggtaggccaaggaagcccgcaattgtttacccattggaaaaccttgagtgaatggtttgaaatgaagaacttggtcgtgtacttaaggaagtaaatatcttttgaacttagagaaagtgttggggacagaaagtactttatgtaacctaaggtgggcttgttcaagaagcttagaggtcaattttttgtaaattttctttttaattactttaggagagctagggatgcaaattgtttcagttagaaaggcctttatttacttttgtggaaattgaacaagaaattgcatctgtcttacacactggagattattttgattgtgaggtaaaacatggtaattgttctctggccacatttgtatcagtattggaaatggaatttaggaaaaccaattcttctaattacgtatcttcttaaagacacttacttgaccatttggtcgttctggtttgggctaaattttctggtgtccctaatttattggttgggaca

SEQ ID NO: 724253 - DNA, 510 bp, Homo sapiens
  misc_feature (398)..(398): n is a, c, g, or t
  misc_feature (423)..(423): n is a, c, g, or t
  misc_feature (507)..(507): n is a, c, g, or t
aatgtgtgccaagtatgaatgcgtgctcagttatggcaaacaaactcactcagcactgattggattccaggctccatggtccccttctcgatgcgcatcttgcacgcggagcttcagcagtacctggggaacccacaggagtcgctggatagactgcacaaggtgaagactgtctgcagcaagatcctggcgctgtcattcttccctgccacggggagaacatgccctccacgccctccccacaggacatgcccgtgctgttccctgcccgtcctgccccatgcaccatccgctgcttctgccttcagaaggctaggtgaccccggtttgtgtggcctggtagtcgtggctcttgctgaaatcttttttagggatggtaagagtttctagcagagttngagtccttgtaattctttactgccntgggtactatgggaagctgaaaggcagagacatctttcttgccaaggctgccagctgaagcttcaaaggtcagtgtgccagacnagc

SEQ ID NO: 724254 - DNA, 865 bp, Homo sapiens
ggtactttccagcgaagagattgctcggctcaagggcccagctggaaaaacggtccattgaggagaagatgaggctgctgatcgataatgagaaagatagatggaggaccgtgcggcgggagaaggatgctgccgagatgctgggcgccgagatcatggccatggagacgtaagttgccttgttggaggaacaaatatatgtacgatcgatacgacatggattctatgcatgaaaaaatccttgcgaagcatgaatactggactatggtgataacttgcgacggaggcagtaaaccgtcgacgaaccgagaatgtccgagtccatcgaggactgagaaacgatcagagatgcagtgatgacctctgtgacttacatgagacatactacgctcaattggctaggcggagacggatggacattcaatggaccgatgtaaactcagttaaaagtctcttcctctcgggacttcagtgcgagtgaaagtgctgagcatccaatgagacgtctcacaggataggaaatgacagtcgagggtatacgccaggggagtctacgtagctacgcatgtctgatatgatgctcaacgcagggaaggctggaagagctcactgccattttttattcatacgatggagctattattgcactcctgggaagcactgcgaccggttcattatttgtgaagtaggatcactttccgttttgattgtaacgaagggaagtctcagtagggacagctcctgtacgtatgccctagcgatgtacgctgccaggcataatggtgaagtgctgccaggctggggtcaggggattctaagctgggccataaaagcgggagcaacaaagtcgaccttaagtacacta

SEQ ID NO: 724255 - DNA, 492 bp, Homo sapiens
aaatggtgaccagatgtctgaaggggtctcaaagatgcaagggaaccatggggtcaaaggggccacccaccacatctgatgatatgttagttttgttgttctttggggttttattcttccaggtatgttatgcactacagcctgatcttttcagtctaagacagcatggcttcactttcctgtgttatgagaaggtcacactttggaatactgaaggacaatcctgaagtgctgcagcgcatagtgaatgcctcttggtgttttcacgttcgtctgtgaggactcatagacttacagaatgatgccgaatggaatgttttgtgcatgaccttttaacctttgctattgccaattccccactgcaaaggggaaggcagattttatgaagagttttaggaataaatacattttatagaatggaaacccagtatggtactggggaagtttattcatgcttgcaatcttgtttggaaataaaatgggtccgtctgg

SEQ ID NO: 724256 - DNA, 2498 bp, Homo sapiens
  misc_feature (1083)..(1083): n is a, c, g, or t
gggttcctgcatcgggcctgagcagaactaggcgcgccgcggcccggcacgcgcaggcgtacagagctgcccgggggtgccagttcctctccgattcccggcttctgtcaccttcctcacggaccttggtcacggccgcaggtgaccccttagcccagctccagtgggcgggtggcagggtcatggaggacgctggcggcggcgaggagaccccggccccggaggccccgcacccccctcagctcgcgcctccggaggagcaggggttgctcttccaggaggaaaccatcgatcttggcggagatgagtttggatccgaagagaacgagaccgcatcggaaggctcgagtcctctcgcggacaagctgaacgaacacatgatggagagcgtcctcatctctgactcccccaacagcgagggcgacgcgggcgacctgggccgagtgcgggacgaagctgagcccggaggggaaggcgacccaggcccggagcccgcgggcaccccgagtcccagcggcgaggccgacggcgactgtgcccccgaggacgcggcacccagtagcggaggggccccgaggcaggacgcggcccgcgaggtcccaggcagcgaagccgcgcgcccggagcaggagcctcccgttgcggagccggtcccggtgtgcaccatcttcagccagcgcgcgcccccagcctccggggacggcttcgagccgcagatggtgaagtcgcccagcttcggtggcgccagcgaggcctcggccaggacaccgccccaggtcgtgcagcccagccccagcctcagcacgttcttcggagacacggccgccagccactccttggcctcggacttcttcgactccttcactacctccgccttcatttccgtcagcaatcccggcgcgggctccccggcccccgccagcccgcctcccctcgctgtgcccgggaccgaggggcgccccgaacccgtggccatgcgagggccccaggcagctgcgcccccggcgtcgccagagcctttcgcgcacatccaggcagtgtttgcagggagtgacgacccctttgccaccgccctgagcatgngcgagatggaccggaggaacgacgcctggcttcccggcgaggctacgcgtggagtcctgcgggccgtggccacccagcagcgcggcgccgtgttcgtggacaaggagaacctcaccatgccgggcctcaggttcgacaacatccagggagatgcagttaaagacttgatgcttcgctttctgggtgaaaaagctgcagcaaagagacaagtcctaaatgccgactcagtggaacaatcttttgttggattgaaacagctaatcagctgcagaaactggagggcagcagtggacctgtgcggacgtctcctcacagcccacggccagggctacggcaagagcgggctgctcaccagccacacgacagattcactgcagctctggtttgtcaggctggcactactagtgaagttgggccttttccagaatgctgagatggaatttgaacccttcggaaatcttgatcagccagatctttattacgagtactacccgcacgtgtaccctgggcgcaggggctccatggtccccttctcgatgcgcatcttgcacgcggagcttcagcagtacctggggaacccacaggagtcgctggatagactgcacaaggtgaagactgtctgcagcaagatcctggccaatttggagcaaggcttagcagaagacggcggcatgagcagcgtgactcaggagggcagacaagcctctatccggctgtggaggtcacgtctgggccgggtgatgtactccatggcaaactgtctgctcctgatgaaggattatgtgctggccgtggaggcgtatcattcggttatcaagtattacccagagcaagagccccagctgctcagcggcatcggccggatttccctccagattggagacataaaaacagctgaaaagtattttcaagacgttgagaaagtaacacagaaattagatggactacagggtaaaatcatggttttgatgaacagcgcgttccttcacctcgggcagaataactttgcagaagcccacaggttcttcacagagatcttaaggatggatccaagaaacgcagtggccaacaacaacgctgccgtgtgtctgctctacctgggcaagctcaaggactccctgcggcagctggaggccatggtccagcaggaccccaggcactacctgcacgagagcgtgctcttcaacctgaccaccatgtacgagctggagtcctcacggagcatgcagaagaaacaggccctgctggaggctgtcgccggcaaggagggggacagcttcaacacacagtgcctcaagctggcctagctgcctccaacacactacgtcagaaggacccgggtctttgaaactgtgtcttgaagctaatgtattaatgtgacatggaggaactcaataaaactcctgcttcactgg

SEQ ID NO: 724257 - DNA, 2529 bp, Homo sapiens
  misc_feature (1083)..(1083): n is a, c, g, or t
gggttcctgcatcgggcctgagcagaactaggcgcgccgcggcccggcacgcgcaggcgtacagagctgcccgggggtgccagttcctctccgattcccggcttctgtcaccttcctcacggaccttggtcacggccgcaggtgaccccttagcccagctccagtgggcgggtggcagggtcatggaggacgctggcggcggcgaggagaccccggccccggaggccccgcacccccctcagctcgcgcctccggaggagcaggggttgctcttccaggaggaaaccatcgatcttggcggagatgagtttggatccgaagagaacgagaccgcatcggaaggctcgagtcctctcgcggacaagctgaacgaacacatgatggagagcgtcctcatctctgactcccccaacagcgagggcgacgcgggcgacctgggccgagtgcgggacgaagctgagcccggaggggaaggcgacccaggcccggagcccgcgggcaccccgagtcccagcggcgaggccgacggcgactgtgcccccgaggacgcggcacccagtagcggaggggccccgaggcaggacgcggcccgcgaggtcccaggcagcgaagccgcgcgcccggagcaggagcctcccgttgcggagccggtcccggtgtgcaccatcttcagccagcgcgcgcccccagcctccggggacggcttcgagccgcagatggtgaagtcgcccagcttcggtggcgccagcgaggcctcggccaggacaccgccccaggtcgtgcagcccagccccagcctcagcacgttcttcggagacacggccgccagccactccttggcctcggacttcttcgactccttcactacctccgccttcatttccgtcagcaatcccggcgcgggctccccggcccccgccagcccgcctcccctcgctgtgcccgggaccgaggggcgccccgaacccgtggccatgcgagggccccaggcagctgcgcccccggcgtcgccagagcctttcgcgcacatccaggcagtgtttgcagggagtgacgacccctttgccaccgccctgagcatgngcgagatggaccggaggaacgacgcctggcttcccggcgaggctacgcgtggagtcctgcgggccgtggccacccagcagcgcggcgccgtgttcgtggacaaggagaacctcaccatgccgggcctcaggttcgacaacatccagggagatgcagttaaagacttgatgcttcgctttctgggtgaaaaagctgcagcaaagagacaagtcctaaatgccgactcagtggaacaatcttttgttggattgaaacagctaatcagctgcagaaactggagggcagcagtggacctgtgcggacgtctcctcacagcccacggccagggctacggcaagagcgggctgctcaccagccacacgacagattcactgcagctctggtttgtcaggctggcactactagtgaagttgggccttttccagaatgctgagatggaatttgaacccttcggaaatcttgatcagccagatctttattacgagtactacccgcacgtgtaccctgggcgcaggggctccatggtccccttctcgatgcgcatcttgcacgcggagcttcagcagtacctggggaacccacaggagtcgctggatagactgcacaaggtgaagactgtctgcagcaagatcctggccaatttggagcaaggcttagcagaagacggcggcatgagcagcgtgactcaggagggcagacaagcctctatccggctgtggaggtcacgtctgggccgggtgatgtactccatggcaaactgtctgctcctgatgaaggattatgtgctggccgtggaggcgtatcattcggttatcaagtattacccagagcaagagccccagctgctcagcggcatcggccggatttccctccagattggagacataaaaacagctgaaaagtattttcaagacgttgagaaagtaacacagaaattagatggactacagggtaaaatcatggttttgatgaacagcgcgttccttcacctcgggcagaataactttgcagaagcccacaggttcttcacagagatcttaaggatggatccaagaaacgcagtggccaacaacaacgctgccgtgtgtctgctctacctgggcaagctcaaggactccctgcggcagctggaggccatggtccagcaggaccccaggcactacctgcacgagagcgtgctcttcaacctgaccaccatgtacgagctggagtcctcacggagcatgcagaagaaacaggccctgctggaggctgtcgccggcaaggagggggacagcttcaacacacagtgcctcaagctggcctagctgcctccaacacactacgtcagaaggacccgggtctttgaaactgtgtcttgaagctaatgtattaatgtgacatggaggaactcaataaaactcctgcttcactggaaaaaaaaaaatcgggctcggtggcctaagt

SEQ ID NO: 724258 - DNA, 227 bp, Homo sapiens
  misc_feature (209)..(209): n is a, c, g, or t
tggaattaatcctaagaggctactaatggatgaatgaataaaactaaaatgtgtcctataatgcaatggactattattcacacttaaaaaggaagaatattttgacacatgctataacatggatgaaccttgaggacattatgccagtcacaatatataaaaatattgtactgactgtactttatatgcagtacctagagtagtcaaantcatagaggtacgaaata

SEQ ID NO: 724259 - DNA, 126 bp, Homo sapiens
aggatcctcgaggctcacggaacttcatttatattactgtatgttcttttcccacatcttgttttttaatatgcaaagctttcctctcagattttcccgtccgtgcctcccaaagttccgtagaag

SEQ ID NO: 724260 - DNA, 222 bp, Homo sapiens
tgccgtctgctgaggtttatttgaatatgtgccgggcctacattgcaggccatgagctggacaggaactgggccaaaaaaggatgttgtgaggcagcagatgtgcctgtagacccagccaagaggaagaggtgctcctgctgaagccaccatgagttagagagtgcaccatgagacgctgacaggagtcaggagctgggcctgcaaaggtcggctgtgggag

SEQ ID NO: 724261 - DNA, 656 bp, Homo sapiens
tgcgcttccgagtgcgagcagcagctgcgccgggactacgtgcccgatcctgcgcagccgaggctgtgttagcgccaatggacttccagcagctgttagcagagcttgagcaggaggtggatgcggcggcagctggctggtggcaggatgtcatgcagctatgtgaaatgccctcatctgctgagttcctaccaccctggcactggcctgagtgtctactgactcactgcatggatgcagctctgtgcccccgagttcctggcctgtgactgagtacatgcgtgtccccagactgcagacctcaatgggccttctccagcggctggatgacatgtatctggatggagaagctgcatctacctgggtgcctgttttcacagcgcccttctgccaggccctgctggaagagctggagcacttcgatgcaatcggacatgcctaaggggaggcccaacaccatgaacaactacggggtgctgctgcactgagctcgggctggacgagcctgctgatgacaccactgctgggatgcgcttcctgcagcctgctgatggccctgctgtaccctgactgtggcggtgggccggctcgacagcaccgggcctttgtggtctaatactgcaccgggccatgacctggagctgggctgcactatg

SEQ ID NO: 724262 - DNA, 885 bp, Homo sapiens
ataatagtacaagtaattattatcgtatggatttgtggaaagtgggatggtgatattcctttgtgcatgcgagactattcaactatgactcgatgctggacaaacgtcactcatgctttgtctctcggtggcttcgcgattcctcattgcctatgcattcgaagtgtaacactttggctaccgccgaggttacttgctgcgaggacactgctaaccggaagactgacaggtatatagcaagcttgtccgagacccgctggctgcactaatccgcgttgctggcccaggtacagccttgtgcaagtgccgatcgcaactacataagtttgtaaagtgtctctttcatgaacagttaattggacgaaggggttctgtttttattgacggacatttctgtgtagtgtatgtagtgcgtactgtactggacctattcaatctagagcgtctccaaggggatattctgttatgtgttggtggccccgctagactgagtttacctccctgcaggggtggtgctcagggtagaccgcacaagaaggaactgcgggcaccgcgtgcggttcatgagaaaaaaactcacagacagcgttcccccgctttaacagtggtgctcccaatcgtgcactaattcccctggaaaaccggatgactgcaggactgagtgtcaggaacgggatgggtcgcttacagaggcgatgcctgtggaatgctaaagacgggggctcggaggaacaaaaatgcctacctgggctcttgcatgcgcaaaggggaccgcctgcggcctgcgacagtggattcaaaaaattgggccactaggggcactggagaaggggccctccagggcgaagggacacaattacccaacacgaaaccggaccctgatgg

SEQ ID NO: 724263 - DNA, 193 bp, Homo sapiens
  misc_feature (115)..(115): n is a, c, g, or t
ccaaactatgagaaggactgccccggtgaaccttcatgggggctggatcataatggctgtggctacaatggccggaatacagaagcagatttacaaatgaagagacagtgtcatnctgcttgagggtaatagtgggtgtcataatactctatgaccacgtacatacagtggagcattgctaaacttccaaatt

SEQ ID NO: 724264 - DNA, 136 bp, Homo sapiens
ccatgtctatagttcactgcctgtcactgatcagcatatactgactagtagccgtttagtgaacttacttcttatgtgtgctctattagtttgttgtaatggtcttcttgaaattgtgatttttcactgacagtca

SEQ ID NO: 724265 - DNA, 113 bp, Homo sapiens
  misc_feature (19)..(19): n is a, c, g, or t
  misc_feature (76)..(76): n is a, c, g, or t
  misc_feature (111)..(111): n is a, c, g, or t
gatcccttggagcaccttnatgcctggggtttctctccctaaagcttcttgcagtctaagccttatcccttatgtnccccattaaaggaatttcaaaagacatggagaaantt

SEQ ID NO: 724266 - DNA, 1182 bp, Homo sapiens
  misc_feature (1)..(1): n is a, c, g, or t
  misc_feature (357)..(357): n is a, c, g, or t
  misc_feature (360)..(360): n is a, c, g, or t
  misc_feature (441)..(441): n is a, c, g, or t
  misc_feature (457)..(457): n is a, c, g, or t
  misc_feature (534)..(534): n is a, c, g, or t
  misc_feature (545)..(545): n is a, c, g, or t
  misc_feature (579)..(579): n is a, c, g, or t
  misc_feature (631)..(631): n is a, c, g, or t
  misc_feature (642)..(642): n is a, c, g, or t
  misc_feature (701)..(701): n is a, c, g, or t
  misc_feature (722)..(722): n is a, c, g, or t
  misc_feature (778)..(778): n is a, c, g, or t
  misc_feature (860)..(860): n is a, c, g, or t
  misc_feature (865)..(865): n is a, c, g, or t
  misc_feature (890)..(890): n is a, c, g, or t
  misc_feature (944)..(944): n is a, c, g, or t
  misc_feature (1053)..(1053): n is a, c, g, or t
  misc_feature (1097)..(1097): n is a, c, g, or t
  misc_feature (1107)..(1107): n is a, c, g, or t
  misc_feature (1126)..(1126): n is a, c, g, or t
  misc_feature (1175)..(1175): n is a, c, g, or t
nttttttagttttttattaacccaggcgcataggacatgtggggccggagacgagcgggagcctcacccgacggcgacggaccatctactgctcttaactactagagagtgcgggcgcggggcggcggcgggggggccgtcgcgcaacctagcagacaggagagagaggagcggagacgagggagcaactggctaagaatacagaaagagcggcacgacaggaagagagagatagtgcagtgaagagatgatcgatataaaataaacaacaaagaacgatagaggtacagctcgctggtgggagcgatggagtgcttacataaagttatcaagagacggcgcgggccgctgtcggancangtatcgctgtatcgcgctggtgggtatctggcagcgtagacttataatttgtagaataataacatcaaaatagttcaaaangtatctatatatacanaagaaatattaaaatatagagaacatatagacgactcataacaacacagccacaaccagatacgaatagcagaaccntgcttagatcnccgccgcgcagcgcacgagtacgcaaggtacggngcgcgaccaaatctacccacacaacacacaatcacacacgacacactgatantcgactcacgntcaacatagcactatctactacatctacactctaataaccgacacctcaccacatttanctccgcacatcaccttcaccnacctactccaactatccgcgcgacaactacacgcagtgcgaaacacgcgtactatntcaataagacacgcagcgacgctgtcacacatccataccgcaccaacacatcatcaccacctacacaataatcatctaagtngatanttgtcattgtcaagcattctgaganacaacatctcgagtcagccagttgacgtcataacagcgcgcctctcccgacagnctccgatacacccaatcaccgctcacgtatattaacgacgcgtcatacaatgatatgtgaatcgcttagtacatagatgtcgcgagacaaccagttatgactatatatntgacagtgtcacgcgaaggtgtctcgatctcagcgacggctganagatgatgtngggagattacgtgtcatangactgtgcgaccgcacgcatctcgacgcgttcgaggtcagtcgtgcganatgcgag

SEQ ID NO: 724267 - DNA, 136 bp, Homo sapiens
tgagccagcctagacccagactttttccagtgccgctgtgcttcctttgtgactcagtctctcataaatcctgtaagccacaaaggaagcacagcggcactggaaaaaggctggggtgcagggtggatcctctaga

SEQ ID NO: 724268 - DNA, 227 bp, Homo sapiens
aaggatccccctagcacctctcctgtactcattactacttatagcattctccaggctaaaactctagcataattgtgcactcacggtttaataaaaactatatattctccccttccttctcctcaagtcacatgatatcatcactttgtgctgttacattgttgggagcttttaaattagacatctttccaggggtagaatggttattatggaaggttgctaagggt

SEQ ID NO: 724269 - DNA, 807 bp, Homo sapiens
atggcgggtgggaccctgtacacgtatcctgaaaactggagggccttcaggaggctctcatcgcgtgctcagtacagcggggctcaggtccaggtgtgctctccgtacacactcccacttccattttggccaaagcaaaccgatactccctggaattatcgtccgtcagaatttcctgtccggacaaggtcccagcatttgagggtgatgatggattctgtgtgttggagagcgaacgccactgtgcctactatgtgagcaatgaggagctgcggggaatgtactccagaggcagcagcccgaggtggtgcagtgggtgagctttgctgattcccgatatagtgcccccagccagtacctgggtgttccccaccttgggcttcatgcatcataagaaataggccacttgagaatgcgaaggaggaagtgaggcgaattctggggctgctggatgcttacttgaagacgaggacttgtctgggtgggcgaacgagtgacattggctgacatcactagttgtctgcaccctgttgtggctctataagcaggttctagagccttctttccgacaggcctttcccaataccaaacgctggttcctcactctgcattacccagccccagttaccgggctgtcttgggcgaaggtgaaactgtgtgagaagatggcccagtttgatgctgaaacagtttgcgagacccaactaaataggagacagccaggaaacgagaaggtccaccggaagaaaagcgaaagccaagctgaggggaaggcggggacaaaggggtgccctgtctgagaggcag

SEQ ID NO: 724270 - DNA, 341 bp, Homo sapiens
atgccctttccatttgggaccccccccagggggtttcccgtggaagggggagatttttccatttagctgggacctggggttagctcccgtgctgcctgtaatgggaaggagatgtcccccccccggccactccgggggtgccctggaagtccttgcctgcccataatttttgtttccgtccctgtttttgcccccccgagaaaaccccctgggcaaaaccgcaaggaaatgcctccttaatagccccctttagttttttttcaaggtttgttttggtccagggttatgggcccgtttcttttggtgttttggttaaccaattaaagtgggggcccctttta

SEQ ID NO: 724271 - DNA, 204 bp, Homo sapiens
  misc_feature (40)..(40): n is a, c, g, or t
  misc_feature (58)..(58): n is a, c, g, or t
  misc_feature (80)..(81): n is a, c, g, or t
  misc_feature (91)..(91): n is a, c, g, or t
  misc_feature (96)..(96): n is a, c, g, or t
  misc_feature (99)..(99): n is a, c, g, or t
  misc_feature (103)..(103): n is a, c, g, or t
gttcctgttgcagactgtgaaccaccccccgtggataggnacctcaagccagacaganaagtcaagccagcgcctttagnnataaaacctntgccngantggnagattacaagcccagttagatctccatcactaggagttttgctcgagactcttcaggtttccatgtccccccgaccagattcagtgcatagcaaacttcaa

SEQ ID NO: 724272 - DNA, 737 bp, Homo sapiens
ggtcattaggagggcctctacttaatgacctccggcctagccatgctgactcttcactctccacatccataacgctcctcatactaggcctactaaccaaacacactaaccatataccaaatgatggccgcgatgctaaccacgagaaagcacataccaaggaccagtcgacacaccaaccctgctcccaacaacaggccattcgacccagcgggactaccctccgtactgtaccccacccctcagcaacgctcacacccacctcacgccacagacccaaacacgagcagacccctcaccacccaccgtcccagaccataggcaaccaataaccgacccaaagctcaggacgggcagatagcgcccaccgaacagcgcgatacacgcccagggggaaccggtccccagctcacgaacgagccaagagcggcccctacgagacccagacagtgcacgcaacacacgcgcacgcgacacacgggaagaactccacgctccaccgaggaagcagccgcacaagagccctagggtgagacccaacgaaaaccgcgaaaacggcgaaacaccacaactcgcacgaaaacggccaacaacgaacgaacgccgccaccaggagcccccaaccaacagtaaagcccggccgctgacccaaagccgtcgcgaaaatacgcccggcggtcttgacacgcccgaggcgcagtcgtcacgcacgggcagtcgtaccgagactgcacccc

SEQ ID NO: 724273 - DNA, 723 bp, Homo sapiens
  misc_feature (19)..(19): n is a, c, g, or t
  misc_feature (68)..(68): n is a, c, g, or t
  misc_feature (76)..(76): n is a, c, g, or t
  misc_feature (84)..(84): n is a, c, g, or t
  misc_feature (101)..(101): n is a, c, g, or t
  misc_feature (137)..(137): n is a, c, g, or t
  misc_feature (202)..(202): n is a, c, g, or t
  misc_feature (224)..(224): n is a, c, g, or t
  misc_feature (242)..(242): n is a, c, g, or t
  misc_feature (266)..(266): n is a, c, g, or t
  misc_feature (284)..(284): n is a, c, g, or t
  misc_feature (288)..(288): n is a, c, g, or t
  misc_feature (321)..(321): n is a, c, g, or t
  misc_feature (335)..(335): n is a, c, g, or t
  misc_feature (350)..(350): n is a, c, g, or t
  misc_feature (354)..(354): n is a, c, g, or t
  misc_feature (363)..(363): n is a, c, g, or t
  misc_feature (433)..(433): n is a, c, g, or t
  misc_feature (452)..(452): n is a, c, g, or t
  misc_feature (459)..(459): n is a, c, g, or t
  misc_feature (482)..(482): n is a, c, g, or t
  misc_feature (489)..(489): n is a, c, g, or t
  misc_feature (491)..(491): n is a, c, g, or t
  misc_feature (501)..(501): n is a, c, g, or t
  misc_feature (532)..(532): n is a, c, g, or t
  misc_feature (649)..(649): n is a, c, g, or t
  misc_feature (656)..(656): n is a, c, g, or t
  misc_feature (723)..(723): n is a, c, g, or t
gggccttcctatacaaggngctgatcctgtgtttggcgctgagctcctcacagcagcttctttcagcnatcttatngggatagngttccgcggggcaaganatacattggttctaactgattttcaatcccctttcnccagtggaataaaccactttcacaaagagctgccctatgtataacccacagatttctagcttgcnacaaagtgacaagggacaaatngggggaaaaaaaaattangaaaactaacactgaagtaatccnccttctcatgtctccggncagnggggtccggggggcctttaaccaaagggaattnaaaatatgcaagtnatattacctagttcnttcnctgttagcnagatttgttcacttagggctttaacccctttccaaaccaacaactttgtcttaatccagctatgtttgcnaataaacgaaatgcatgcncttcccncatatatacttcactgggcctcngcattcngnaccgggcggnggaaaggtgggcgttcccgcccaagtcggtncgggagaataaaaatgagaactccaactataagaacaatgcctccttcaccccagtaatgttatccacattttccctaccctcacattagaataaagacatcctcccaacttttcanctcctanctccaatctgttcataggagatatatcttttgattcttttattataagggtagaatatagattaagn

SEQ ID NO: 724274 - DNA, 446 bp, Homo sapiens
tgaggcactctacaggacctacgtaatatgtaaccaatagcactgaaatgtttacgtttttggtgattatatcaacatcaaagaaatgcaaatcaaaaccacaataagatgccatctcacaccaatcagaatggctattattacaaagtcaaaaaataacagatgttggcaaggctgcagagaaaagggaatacttatatactgtttgtaggaatgtaaactggttcagccactgtggagagcaatttggagatttctcaaagaatttaaaatggaactaccatttgacccagcaatctcatgactgggtatatacccaaaggacaataaataattttacacaaaagagacatgcacttgtatgctaatcacagcactattcacggtagcaaaaacgtggaatcaacctgggtgtccatcaatggtggattggataaggaaaatgt

SEQ ID NO: 724275 - DNA, 422 bp, Homo sapiens
atctgcgtgtgctgtgcacttgtggtgcaggtggcttcgaggggacatggctgggcactgccccacagggggggccctgatgtcatgaggtgcgtgctgtggacgggcaccacagcccacgtgcttgtcaggccagtttctctcaggtgtcggtcaccctaccatgcggactttcttttgtctttatatctttagctaaggagtccatggccatagcaaaagctgaatgatgacagccagtgtccccatcctgtcctccccaaactttccacaggcagggacgctccccattcttgctgcatagtcttctgttgaccccatgtacctgagtgacccccacgtacctgagtgtgacaagcactatggtgcttgacctcagtccagctgcttagacctgtacctgccacagccccacgtgctga

SEQ ID NO: 724276 - DNA, 161 bp, Homo sapiens
taatgtgtggtcgtgcaggtagaggcttactagaagtgtgaaaagtaggcttggattaaggggacaggattccaaggatagtcggtaaaattaaattggggaaaatgaaaggtgtagaggaaagttaaggggtggatatggcaaggggggggctcccaata

SEQ ID NO: 724277 - DNA, 223 bp, Homo sapiens
gtctgcacagctgctggtgtagatcagaacttctttatagggaaactgccttctgcaaaacgacaagccagttcattccagtcagtgagttagtcttcttcattctccttcttggttatgctcctctcgcttctggggctgtgctgtcgcgggcatgtgagggaggggtctgtccctcctcttcttcctcctcatagtcactgtcccgaaagaagaaaatgat

SEQ ID NO: 724278 - DNA, 194 bp, Homo sapiens
actacatacttccgtgacagcccaggcttcactcactcagggttacctgccaccctcacaaccaaagacatgggtcaggaatcaacagccttccacagcagctcagacgcaactggaacaacacccttacctgcccgctccacagcctcagaccttgtgggagaacctgcaactttcctacaatcatttttctg

SEQ ID NO: 724279 - DNA, 1143 bp, Homo sapiens
gactgccgtgtgcatgctgtgtggtgtggccctgtgggtgccctgtgtgtgccctgtggatgtggtgaacctgtggtggcttcctgctggagtgtttctgtgcagttggcatcctggtggcctgtgggtctgctgtgcctgtgtgactgtgtggcctgtgggcctgagtgcctgcggagctctgctgtgagtgcaatggcctgagggataaatgtgatgttggattgccctgtcacccaagtttgtggcctgcttgtgtcaatggacatgaagatcaatgtccctgtgaggagatctatactcttctccctgcccattaaggaatcagagatcatttgatttcttccttgggtggcctctctcaaggatgcaggttttgaatgattatgccagtagcagaagcagaccctgtgcctggccagctgcaccaggttcaatggcatttgttgctatctggggactacaatgtgccacgtcggtctggtgtggtaagtgctccaagtgagtgttggccaccgacatccgtgtgggccatcatcctgtgccaagctctccatacgtccccgtgcgcagaggctactggagggaacaagatcggaagaccaccaaatgtcccttgcaaggtgacaggctgttgcggtcttgtgctggtacgcctcatccctgcacccagtggacactgggatcgtactccgcaacttgtgcctaagaagctgctcatgatggttggtatacgattgacctgtacaacatcagcccgtggctgcactgccacccttgggaaattcgccaagggcacctttgaatgcatatctaagacataagtacctgacccgacctctggatgacactgtatcaccagtttcctataaggagcactgacacctcgtaaaacaaacaagagaacccggaaagggaacagggccccacagtgccacaccacgggtacacacacgaaacgacagtgcgatagcgtgacaaaaacacgagggcgccaaacatccaggatgcaggaagagacagcagtgagagggacacagaacgaaaaaaaagcgcagcacagagagacgagcaggctggacaaccaggcgagaaaccaacagaacacatagcacagatccatcatcaaaccacagcgacaac

SEQ ID NO: 724280 - DNA, 237 bp, Homo sapiens
  misc_feature (50)..(50): n is a, c, g, or t
  misc_feature (62)..(62): n is a, c, g, or t
  misc_feature (76)..(76): n is a, c, g, or t
  misc_feature (234)..(234): n is a, c, g, or t
atcacgcctcggctagaagttttcttatactgttcatagttgttgactcnatcatatgatgnaaatctatgctacntaaatcattgacagatgatctcatcttttctgttagttacaattgtgaatcatatttccaagcacactttccaatattttcttgagcatttaattctgaaggtcactatgacaggttcattaaatgccgtacatcatctaatcttcagaatgactacntga

SEQ ID NO: 724281 - DNA, 831 bp, Homo sapiens
  misc_feature (77)..(78): n is a, c, g, or t
  misc_feature (152)..(152): n is a, c, g, or t
  misc_feature (176)..(176): n is a, c, g, or t
ggccgccggcgcttccgctcccggcgcaggcgcggagtttggcagagcggagggggctcgggagaggagtgacgccnntggcaggatggtgctggagagcgtggccgtatcgtgaaggtgcagctccctgcatatctgaagcggctcccagnccctgaaagcattaccgggttcgntaggctcacagtttcagaatggctcggttatggcctttcctgtggtgtactcgcaccttctgggctaccctgtgcagttcgtccattcctcccgaagaagaaaccaacagaagggatagctggattaatcttaacaatacacaaaggaaaatcggaaagtagtgaatgaaataaacttggaagatttgtgtcttactaaagcagcttatggtaggtgtgggcgttctaaaatgtttcactgcctgggagtggttcaacatattaaacacaatgaatgtgaccgggagataatgtgggtccactaatatgaagaagaaagaagtataatattaataacaatattttctcatctgggtgtctagaaaattttaaaaatggcggtcttaatttattactagtgtggaacaaattatttcttccaattaattttcttccggccctacggtggtatggatcatgtgtctaatcagtcactaagttagaataattgtcaagctcttatctgatcaagattatgtttctccacataaatccttcggtttaacaggaaaccaatgggtatgatcccaagcggggcttgcctcattttcacggcctgtaatccccccttggaagtatcaaccccgggagaaaggctcgggccaagaggcggaaa

SEQ ID NO: 724282 - DNA, 357 bp, Homo sapiens
aaggaaactaccaacacagtaaacagaccacctagagagtgggaaaatacacttgcagactatacatccaacagaaacctaatatccagcaatctataagatactttacaaaatcaagaaaaaaagaaagaaagaactcctctaaaggtgggcaaatgacatgaacagacacttctcggaagacaaacacgtggccagcaagcatatagaatagtgcaccatatcactaatcattagggaagcacaaattaaaaccacaatgcaatactatctcacaccagtcagaatggctattataaaaaagtcaaaaaataacagatgttggtgaggttgcaaagaaaggagaatgcttataca

SEQ ID NO: 724283 - DNA, 297 bp, Homo sapiens
tagtgtcatacctgaatgtaatagcttgctttctattatcaagaataaaagctgtctcttctcttattgggtgtcccacctaaaatatatatttttttctggccacatatgaaagttgtttttttctggcatatgaaagttccaaggccaggaatcaaatctgagctgcatctgcaaactatgccactgctgtggcaaaaccagatccttaacccactgcactaggctggggattgaacaggcaacatcacagagataagctggatctgacatctatctcggggccacaagcctgct

SEQ ID NO: 724284 - DNA, 290 bp, Homo sapiens
tgaagtactgctgaacacatagctctaagtgaagtgtgttcaaaaaaaaaaaaaaagcgcccaggcgcagttggttcacccttgttattctcagcatttggggaggcctttgggggccggaatcatttgaggtcagaggttcgaaacgaccttggccaacttggtaaaatctcgtccttgctgaaattacaaaatttgtcggaacagtggtgggtgtgctctgggggccccggctatttgggaacggtgagacggcaggaatattccctttgaacccggggaagggggaa

SEQ ID NO: 724285 - DNA, 802 bp, Homo sapiens
  misc_feature (83)..(83): n is a, c, g, or t
  misc_feature (400)..(400): n is a, c, g, or t
  misc_feature (435)..(435): n is a, c, g, or t
  misc_feature (439)..(440): n is a, c, g, or t
  misc_feature (447)..(447): n is a, c, g, or t
agggctgttcttatctgccccggttttcatgatcaagaagattgggggttgtgaggacgtcccaggcctccttggactcaggnccgcagtgtaaagagcccaaattgttatcaggcctcctgttcccaggccaggaggcccaggtgaaagtatagggtcaggcagattcttgcttttatggggggccatttatgggattgcttccccccggccatcattgcaatgctaattagggcatctcccctcccttttaggccagaacgaaggtcagtttcaatggtacccagaaccctgttactttggggtgtcctgttttaatggacccgcccttccagccccaaggggtgcctgtgggggtccatttgggtaagtttgggcccccactttcaccagttttttnggccttccaccgggccttaaccccaacggaggagntccnntaaaacnccccccccccccctgggggtggggggggggtgtccctccggaaaataaagaaaaaccccaggacccggctggggttttttttaacttttttgtgtgggtctggggagggaaagccccctaatattatttgggttggttggggtggggcaggatttcaaccataaaaggcccgtttggttagttttccctgtttcctggtttgggctgccccgctttggggaagcccggcggcagggggggggagggaggttcctcccaggtttcagcccggggcagggtttttcaaacaccctcctgggcagttgtaaggggttcggggggatgttttccataaaataaattttttttgggttta

SEQ ID NO: 724286 - DNA, 169 bp, Homo sapiens
  misc_feature (77)..(77): n is a, c, g, or t
ctccaagttggtggggtgattttagtatgcagccagggtttgagacccactactttaaggtgaaactatttttacanctctctaaagatttatgaaaaaaaatttactgattttggagataggaaacttgaaagtgttttaaattttatgtgtagcacttattaagcgt

SEQ ID NO: 724287 - DNA, 294 bp, Homo sapiens
gagtgtatagatcaccccctacccaatccagctaaaactcagcttcagttgtatagtactccagtgacaggaagtagactactacagtggctttaacatatctgtttacacactagctaagaaccaacctgggattagatagccccccaataatgttaactctaaatctatacaagttgaatctcaaaaaattggtcgcgcagaaaaattatgagccaccagcttaaaactcacagggagctgggggtgcttcctattccctctagaggagcctgttctgtaatcgataaagcc

SEQ ID NO: 724288 - DNA, 757 bp, Homo sapiens
agtgctctggagactctgcagggccagttagaggagaaggcccagtgagctagtggcacagtcagagtgccttagcctcggcccaacgggagttggctgccttccgcaccaatggtacaatgaccacatgcaacggctgaagatgagtggaatgtgcccagtgtgtgccctggggccggcaagcaggctgagaggacaagaatagcctcactcagcatgcttgtgaggacggaggtgtccatcctgaactcgccagtgtcctggagaacggagggggatgagcaatcggagttgaatgcggctggtgatggccgacgtcagagaagatgccagatatgctggactggagacggctgcgcctgcttgcagtgcatgagacatgccagcaatctgtgccatgagctgctgaacgcaggctctgctctgcgggacggaggtgcagagcctcctgggatcggacggctgataaaccgccgggtggcttcatgagaacctgcggcaggagctgacctcacaggcttgagcgtgcggtaggatcttgggccacgaatttgacgtgcgttggccgcgagaaagttcttccagaaacgagcatggcctctccaccctgcagctcgagcaacgccatgctctcaggccctggtgagttgagctgctggcagcgtaagcacctctgccagcagcttgcatgccgagcaggccgtgcgagaacgccacgtgaggcgctgagcgagcagctggccgtggggcctggggc

SEQ ID NO: 724289 - DNA, 356 bp, Homo sapiens
  misc_feature (297)..(297): n is a, c, g, or t
ggcttcaagattgttaaagttcctgacgcttacttgggcggtaagaagcaatctttgcacctgataatgttggtcgtgtgtttgttggtatctcaactatgcgtacaattgacgcagttgacttcgacggtgttgaattgcaaggtgctggtaaagacggtatctatatcccagatgataaccacaaggctatcttctttgttaacacacctgcaaaatgataaattattcataactcgccgtataaatacacaatacgcaatggcgggtattaaggagagtatatgagcgcttcancagattacctaacgttaatttcagccgatacttcgattgccgataaattggagattgtt

SEQ ID NO: 724290 - DNA, 387 bp, Homo sapiens
gagttactgtagagataatatagctgatgtcaaagcagattaagaaacctgaatgggggcgaggttcaaaaaactgaacacagttcttatatttcccatgttttttaacaaactaaccttaagcgtattggtaaaagcttcctttgtaatctggaaattcctgcttctgctaattcaggctcttttctataaaacaggtttatatatttaagtacataaaaatattactatagcctaacattcataggaagaatctcttggtcttatctgagaacctctcaagtgtttagtgacatattagaataatcatgaggatagataagtacgtgaatttcagtcttggtgtattctcctccaactcataggtttcatttagtaggaagagga

SEQ ID NO: 724291 - DNA, 270 bp, Homo sapiens
  misc_feature (26)..(26): n is a, c, g, or t
  misc_feature (29)..(29): n is a, c, g, or t
  misc_feature (50)..(50): n is a, c, g, or t
  misc_feature (73)..(73): n is a, c, g, or t
  misc_feature (88)..(88): n is a, c, g, or t
  misc_feature (92)..(92): n is a, c, g, or t
  misc_feature (128)..(128): n is a, c, g, or t
  misc_feature (136)..(136): n is a, c, g, or t
  misc_feature (163)..(163): n is a, c, g, or t
  misc_feature (194)..(194): n is a, c, g, or t
  misc_feature (221)..(221): n is a, c, g, or t
  misc_feature (259)..(259): n is a, c, g, or t
aacccaagtcatttttgatccccccnttntccccccccagatcccagggnctcatcctgtggctttggaaccnccctcattcctttcnaacncaaaggaggaattattgcttcatctgactttattcnaatctagntatggattggcctaaattatttgtgcnaaatttgaaatgttttttattttaatattanaaatagcccaaagtcatggagtttttnaaaattgttataattaagtaaaaataaagctgaattgngtcctttgaaa

SEQ ID NO: 724292 - DNA, 260 bp, Homo sapiens
  misc_feature (65)..(65): n is a, c, g, or t
aacttcccctcttgcagcggtgatccgtcccaagacagcaaaggttctggggttgggagaagctncctggagaaaaaggaacattaaaaaaaaaaaaaagattaaaattagccgggtatggtggtgcacgcctgtagtcccagctacccaggaggctgagacaggagatcacgtgagcccagaagcaggaagctgaagtgatgccatgatcacaccagtgcacttcagcctgggtgacagagcaagaccctgtctcaacc

SEQ ID NO: 724293 - DNA, 2451 bp, Homo sapiens
  misc_feature (1398)..(1398): n is a, c, g, or t
  misc_feature (1929)..(1929): n is a, c, g, or t
cggacgcgtgggctctcaagtctagccttgtcacggggcgggccagcaacacggaacgtatatactggaacggctggagcccagcaggcactgacaagacttatcaccagacctccggctacaccagacagccttcagggactggtattctccaatcaagcgaactgacccaggatgcgtgcgactcggaccatcacaagcactcagcagggccccagatgaaccgtcccagctcttgggcacgcgcttgacatggctgagcgctgcgctgacctccacggccttccttcaggccgtgacccttcaccgcgcgagactaacactgactggacacgattaccttgcacgagcagactctgtgttagcgacgcagcgacagaagcgcgaccacgacctctgcccaaagaacaaacattctctaagcactacgcccgaagccacaagcaccactgtcacgtgccgcgttagcgtatcaacaaattagcgacgaaaagacaacgcaaaaccttatataccatcattgtcggcgcatttcacactgcactaacagcccataatatctggacacgtcggccagtttttacgcccacggctggtcgttcatacacccgatatatcgacggcacagattcccgttattcagcgcattaccaacaaccagcgatataaccttagtcgcgaacccctattacgcccacccagcctcggccacacgttcaggcgcgcctactaccagttgggagacgacaacctttgcaaccaacattcttcacggcactacagtcggccccacacggcaactcttaaccccagcggcggacaccttacaaacacgagcattcccattaggcgacttacgcgcacacacagagcaggcaccctaattattgggccgacccaccagattatcgatcggacagaactcatgcggcacccacccactcatatgtgcgcgactattgtgccgccacaagcccaccactgttattaccccagatatcagtttctcctactattacacagcacacaacaaggcgcgagggcacacactagcgagcacacatacaaccgtgcggcgcgcatttacgttaaacggcgcacacaaccaatccgataaatcgctacgccacaacgagacgagtttacaaatccgacacacgatacagacgatgcacgcaatagtagttgggcagtgccagactttccgcacaatcgagcagcctaccagatcgcggcactttacgacagagaacggcagccacacgtgatcaaccgcccgaacaaggattactactggtccgcccagcttttatctcatcgcaacgccgcattctataatgcagaccctgtatataaaacgccgcaggtaagctatttaccacccgccaacagggacgncagcgtggagcactctattctaaactcaccggtcggcggcaacacacctttacagtctatcccaccacagtttaccaacccaacaacggggcagaccaaactgttgggccccaaactacacaaagaggaatcatggagagcaatatagggcacgcaccgcccacatcatctgacaaaacacacttgtaaggagagcacaagcgggaaacaaccccaaaagaagcacaccgcacaacgaacgcgaactcaggactcatcccacctcagcccatagtcggcggacaacaaccagcacgccccaccaaagcctgtccgccaaccagcgcaaaaccccacagtagagcacgcccaccacgcgcgcaaccacaacagccgggcatacggacaaccacaccatctcacgcagcacacgagctaggcttcaaccaaaaagaggagagccaaccacaatagggggagaagcggatcccaaaaccaccccgaaacgacgcgctaagtggaaaacaaccagaacagcacgcccaccaactngtgacgggaaagatacgaagctacagtatcaccacactttgctgcaggcgcacacaatctccgacccgcagacaacaaggccaaaaaaaggcatccaccactcccaacaatcaagttggggccagccaccaggagtggtaacacgacccagcataggggaggcaaagaaacagaggtgggctagacaccaaccactcacaagtgatatccccgatgatcttcacagctgatgcggcgtcacaacacaaacaaccccgcacgcggaggacggccttaatgatgtcgaaacatcatcatttccgccacaccacccaaaagacgatcaccaacagccccatttagcaacagcacagatatttgggaacgacacgccaacagcaacctattaccaactcgccttggtcgatcatggatgacccacctacatcattcattctgacagaactagaaccacacactcgactcggggcggcgagccagattgacccccacacgcaattcattcaccacatgattgtcgct

SEQ ID NO: 724294 - DNA, 234 bp, Homo sapiens
aaaattgtgaaattgttttgccctgcgcagcaccctctagaatgggctagctgcacatgaggccagggctggaggacatttttatagggtcttgtgtatgggagctctctgtcgaatgaggtcattgtgcccgcaggttgtttgtgattagctgtctctaccaattgttcatacaatcattgttcattattgttctcaacttggggctctccccaacctggggacccttcctta

SEQ ID NO: 724295 - DNA, 507 bp, Homo sapiens
ctggtagacttattcagtatttcattatgcctgttcgttgcaaaaggttctatggtgacacgtatttttctcaagtcattactagaatagcaatactatacagattttttatcctcttctcactgaaccgaggtgcatgattaattcatatctattccttatatttaaaccacaacatgccgatgaccctgtgttgattttcaacagtttgctcagcccagtcccatcttaatttattatttatttattttttaacttaaagttctggagtacatgtgcaaaatgtgcgggtttgttacataggtaaacgtgtgccatggtgatttgctgtacctgtcaacccctcacctaggtattaagcccagcatgcattagctatttttcctgatgctctcccttgcccacacatcctgcatcccacaagccccattgtgtgttgttcccttccctgtatttttgggacagggtctcactccagcctgggtgagagaggaagactctgtctca

SEQ ID NO: 724296 - DNA, 1470 bp, Homo sapiens
gtgtgagccgggctgcgtcgtgtgtggtgtcgcaggaccgggtgtttgtgttgtcgtgctcgttgttggtgtgttatgttatgcgcgtggcgcttcatgcctgttttgttcgccgggctggggggctctgcgtttgttagtcacagcctggtgttggttgtggtgcgcccgcaggggtttgttgtttttttgccagcgcgctgtgcgtggtgatgttcgctgcactgtgttgtgtttgtttcctgcgtgcctgggtaatcacccttctttgggtgaatatacaaggtggtgtgtgtgtgtcgcgatggtgtgatgatcgtcggcgtgggtcgtcgcacggggtgtttgtgggggggggaccccccgatatggttgtcaccctcgtgtggcttgtggtggtgtggatgtcctcgcgctacttttgttcatcctgcgtgcggtaggtacgattggttgtggcggtggtttggcccctccgcgggcggttgcacagagggtgtttgttggggggcttgcgcgccagagtacttgtctggggggggccagtttttgggaggtgattttgtgcccaccgtggctttgtggtggccccctgtgggggggtaactctttgcttgttttttacgccccacagatggggggccccatctattggggccctgttgtggttgacgcaatactgtgtttgctctctggaagagactctctgtgttttgtcgccggagacgcacgcttggtgatttctaccgttgggtttggccccccaccttgctctcgcttatgtgtgtggctcacgttcgcactaaatggagggcgcgtgttattttcgcccccccctctatatggggggggcgtgtctctgtatgttccccgagattttctcccccccgttttttccacagggggagcccaccccctttgggcccaatactcttagcggcccacaaaaacacacactttacccatatatataaaaatattatattgcggggcgaagaatattaaaactctttattctctccacacaacaacactcttttttggggcggcatattccggagaatattcccccgcacggtctatatttggggtataccccgcgaggtgaagaacacacccacacttgaaacacactcctctttatcattctttagagggccgcactattactcttttttataccacgcccgcagcgaaaaatatagaataaatattttatctaagagagttgaagaaaccctctttcgctcttggaagcggaaaattctttaatataatagtagagagagaacccccccataaacccggggggagcaaatatatgagagagagccccccccccctccccacacacactttgtagaggaaccccgagataacaagaaaatttatgacacacaaaaagagaagggattgaaacccccccaaatgggttttaacccaccccccgggcccccagagttttttcca

SEQ ID NO: 724297 - DNA, 450 bp, Homo sapiens
aggcagaagccccagggaacatattctagaaggtcgtatcgttgccaggtctatgtgcattaatgtgtgtcagtctggcatagattcagtcatgatgcaccgacacgtggttcatgcagtgctcaagacttagtcttacattcataatgccttatcatgggtttccagccagttgataagatgctctgagtaccgtaagtacatcatttatgactgtaaaacctacgtatgtatgtatgatatcgcagtagctgtcatcatataccagcgcttgaagcttgagcaggtagaagtgttcttctagaccagcatttgtcacaccagtagggcctcctgtcaaatctctttgtaggtgtccatgtgtcaaataagctccaataatgcgtacggttcgtattgtgccaatcatgttcttacacgccacaggtttgagcatgcgctcccctgtct

SEQ ID NO: 724298 - DNA, 679 bp, Homo sapiens
  misc_feature (134)..(134): n is a, c, g, or t
  misc_feature (143)..(143): n is a, c, g, or t
  misc_feature (159)..(159): n is a, c, g, or t
  misc_feature (178)..(179): n is a, c, g, or t
  misc_feature (199)..(199): n is a, c, g, or t
  misc_feature (215)..(215): n is a, c, g, or t
  misc_feature (284)..(284): n is a, c, g, or t
  misc_feature (327)..(328): n is a, c, g, or t
  misc_feature (392)..(392): n is a, c, g, or t
ccctatagtggagttgacaataacactgggccaggagggaatacccccttgggcagtcaggggtggggtcaactaagaagacattagaaaatagtaaagcatgtgggctaaccatttatgctagtgtccatttntggaatgtnagcatgtgaagtcttnatatcctgctcaggtcatnnccaaggtctgattttcacantcaacaaattgcaacntctggcataaatgggttaatacctaggtgatgagttgataggtgcaggaaaccaccatggcacatgttnatctatgtaagaaacctgcacatcgtacacatgtaccctggannttaaaaaatttaaaatatatatgtatatatatttaatatggaattttaaaaattactaatgagntcttttatctgagtaattttgcatcaacatgcttttattatggaagagaagattcagtgagtacaaaattgcagatacatgtgtcagaagatccctgaatataataaggcttagtattctgtgtcataattgcctgtttgtattcctctctggtctttaaacttcattagggcaaggatcaactccatcttactaaccatttgattccctatgtattacacgatatatgaccaataataagccttcaataaatacttgtaaaataaagaatgttatgtaatatgtca

SEQ ID NO: 724299 - DNA, 342 bp, Homo sapiens
  misc_feature (224)..(224): n is a, c, g, or t
  misc_feature (257)..(257): n is a, c, g, or t
  misc_feature (294)..(294): n is a, c, g, or t
catgtgatgatgagagaaagataaatttcttatttaagctactcttccttctgttactagctaactgaatatagtcactagagggaacagctcagcatggcgattaagaggatggactctggagtccagagtgctcaactctgaatcccgcttagctgcttactgggcttgcaagccttaaacacagctacttaagcctcttcatgtcattagtttcttcatcntgtgagtgtgtgggtgatagagagcctacctcnataaattagatgtaacagattaacattagttgaaacnatgtcacaatgttccagaagaagtccctgcacacaggctgaagccaga

SEQ ID NO: 724300 - DNA, 214 bp, Homo sapiens
cgctgtcggcgcttcttcggccagcgcggggcggggaaatgggtttcaccgtccagcacctgctcgatcgcctgcaacaactctgccaacgagctgcctttgttgacgaaaccgttggcgccggcggcatgcgccatgcgcgcatagacctcggcctcctgcgcggtatagatcaggatcggctgctgcgggtagcggcggcggattttttcca

SEQ ID NO: 724301 - DNA, 175 bp, Homo sapiens
acggagagtatacgctgcttatgtgtgtaataggagtggctatatttgagttgtgaggtaaaggggagatgggagtgaaagcgcattaatgggtaaaatgttgccatgagaggaccacagcaatcatctgtaaactccaggcaaccccatgtatggaggtaccgagccgtcgaat

SEQ ID NO: 724302 - DNA, 138 bp, Homo sapiens
gatgaaataaagggtccccctctcctcaggcccaaggaacagcttactttttgccagattttttaattccccctgtggccaagggccccttccccccggccttcgcttttagctcctcgagtttttttttccttaaac

SEQ ID NO: 724303 - DNA, 315 bp, Homo sapiens
ttcaacaaatgtttggccagacgaaaaacattgtgtcctaatggtaggcaggagaccaaggagcaaaaggcttgccttcctgggagcaggttgttttaactgttttaaaccagtaagccccaccattacatcctgaaatttggggcttttgaaggtttgtgctgggagtgaaaagtggcttagctatttacccgctttttggggacagggcaaactaaatgcatccctttttacctaactcccaacccctgccctggggtgaggcatatgaatgctaaagttgggcattaaaataaatgttttttatttcctgga

SEQ ID NO: 724304 - DNA, 775 bp, Homo sapiens
  misc_feature (102)..(102): n is a, c, g, or t
  misc_feature (149)..(149): n is a, c, g, or t
  misc_feature (327)..(327): n is a, c, g, or t
  misc_feature (364)..(365): n is a, c, g, or t
  misc_feature (383)..(383): n is a, c, g, or t
  misc_feature (413)..(413): n is a, c, g, or t
  misc_feature (415)..(415): n is a, c, g, or t
  misc_feature (423)..(423): n is a, c, g, or t
  misc_feature (425)..(425): n is a, c, g, or t
gagacgtgcggacgcagcgggtgggctttcagcttatgtggagaagtcgctgtgaagccacctataaatccatttactgaatttatggagaaggctgtaaangtgatggaagtcactccagaagaacctctttgtgccatcttaaaacntatatcagagaacagaagatttaccacggtgcaccagtgaaagtcatctcagctggcgaatctttctgcatggactttgacagatttctgaccagaacggacactattactaacaagatttagacacccttcaaaagtgtaaaacctagctttagaacatcttcttagaaagagagantacaaacaacaaggagacaatttatccagcatgtttnntagaaaatctaatgatantgaagtgaaaatactaatcttaagaagacngntatttgananggaggcccatatccaagaactttctgtgttggtttcagagtgaaaggcaaatacttgtgaaggcaaacgtttttcccaatcagtacaagtagtacatgaacgactacagatccaaattcataaagggaacgcgagaacgatagtggaccgactttgtaagagttagaaaccaagatagccatgtggacctgaatcaagagtgattagaatgaggtatagtgatgaagagcagtgggcaaaatggggttacaagggtctaagttacaacaggttgccatttacagggtatgaaagtatccaattgagtcggagcccgtgtgaaaattcgttcatgcgggagtctttgaatg

SEQ ID NO: 724305 - DNA, 113 bp, Homo sapiens
ccggaacagtagcatgtgatcacctcccggccgccacccctgaccaggaggacttctgttcagcccctcggtcaggacttcaagaaactccatgtagttctcgtctccctgcc

SEQ ID NO: 724306 - DNA, 138 bp, Homo sapiens
  misc_feature (61)..(61): n is a, c, g, or t
aggatatagaacggagctgactcatgaggcattgtcaagtctgtcacagtcctccatatgncaagatgaagaaaattggcatctttttaggggtacaagatctgagttgtacggtctttataaatgcagagcaagatg

SEQ ID NO: 724307 - DNA, 248 bp, Homo sapiens
gtacgggagcggatgatgcacgatagtgcggaggagtggagccaactactgacgtggagtgcgctggaagccgtgctggctacaaaaaatgttgagccgtagatgccgtcggaaatggtgaacgggacgactcgcaagctactctagaggctcgtagcgagggtaaacatagacgacccagatacaaattgtacataagcagctgcttgaacttatttggctttcggctcgttttctacttagtacta

SEQ ID NO: 724308 - DNA, 93 bp, Homo sapiens
gtaagagcggcgggggttattctatatataagtattagcttttctctgttcaacttatttcacttaacaccttcaagttcattccgctttgct

SEQ ID NO: 724309 - DNA, 177 bp, Homo sapiens
tagtatttctaaaactattttgttagatgacttgataatagtatatttagcagctcaccttagtaggtcaaattggtaaatctcttgtaatttagccttcatcgaataataggtaccagtgtattaaaaatgtgtattttttgcagccctttcaaccagagtaggttcagagaaact

SEQ ID NO: 724310 - DNA, 211 bp, Homo sapiens
gcaggcacaaagactctgagttataaaggaatcgactgacagtaaatggcgagattgcctttgcctgtggtccatcaaggcaacgagaaaaaagtcccagtgctccagacaattcaaccacacttggcatccagtgaagaggagagggagattcctttacccgagagccctgagaaagacgaagcagcagtcccccagataggctatttga

SEQ ID NO: 724311 - DNA, 430 bp, Homo sapiens
  misc_feature (145)..(145): n is a, c, g, or t
aaagtatcattagccatgtgtggtggcatgcacctgtagtcccagctactcgggaggatgaggcaggggaattgttgaatcccaggctggaagtgcaatgagccgagattgcaccctgtcgttccagcctgggtgataagagtgnacttccatctccaaaaaaaaaaaaaaaaatttttttttttttttttttggaaaaacatttagagttacatccttttcccccattcttcacacacagagccaaagagcagttatattcttgggataccatgatacctctgggaaaggaattatattcccaaggagaggtcccattggataagaacaataccatgggacttgagtctgaatgccaacttactattcacacatccttcttaaaacgaacacactgtttcttttcctgacctagagcattctaaagttc

SEQ ID NO: 724312 - DNA, 1001 bp, Homo sapiens
agcgggcttcgccgctctcctggccgctccgttccggtgtctcccgcggctcctctccccggtgtcggtgcgacgctgcgctgccccgcatcgccgccatcccagtagcctgggctcgtgccattggcagccgatgctgaatggtgctgggcactacctggcgtggagcatgctcactaggccgtcgtgcgtctctacgactgtgcactcatgggtgcagggcttgcaaggaagcgtgctgattcctcgtgaggtagaagcctgctgcgtccgagggcctaggacgccagctgaactggagatgactcacgaattgcgcttcctcttggcatgcatgagcagcagacatggaaggaatcagtgagcactcgatagcagctcctacgtgaccgtgcgtgccatgtagatgatccggggctcaccgcacaagggggaagacggccaagcgcattgctcagcgctacccatgatgctggcgcctcagacccacaaacgtatgcattccaactaccgttcttcaacatgtcgcaggcacggtgctacggaggatcgacacaagccactgttgctggtggtgtcaccgtggatgcctccttggcatcatcaagggttgggggccgctctgcagctttccttccatgggggtacgcaggttcctctcatcgcattggtatgcggtctggattgcctatgcctctcgcagtcgatggatgctagacgagtttcgcgggttcacagtatggtgcatttggcgtatcgcgagtgggccgcccggcacagcctattgttgcctgggcccaaggtttttggcgactccattcatttccccccgaaccatggagttgggagggggcctgggtgggttggcttgacaccactcggaccggcgacttgggtcaaaggggctgggcatagcacttggtgccttgcccaggcatatgctcttccggggacttatagctatgcaacttttagcccgacgccatgtggcctttgccaac

SEQ ID NO: 724313 - DNA, 1008 bp, Homo sapiens
acggcaagagagcagcctgggtggcattttggttttgtgtcatttaggttctttacaactatttcttacttcactttaatggaaatgttaaacaggaaataattagggtttatgtccagaacaaagtttggaagatcaccgttttaagcaacacattttcttttaaaaacaagagaacattgagcaacacaaaggagaaaaacattgttcattctagttctcaaccttccctagagatcgtatattagtgattttcgcaaggcaattgtggctcagttctgttgactcttatccatgaggacaaaaacagcatgacacgagtgtggaatacaagaacggaggaagaacatgctttggatggtttatacatacaaaaggaaagactgtaatgtgaggttcagttatacctctatttggcatctagtgatttctcatattatcttgtagacactagatttccgatgttgtcttgagaaattcttaaagtcatgacacagtggcataatgaactaacagctgagaaggggtacaagttcctaaaagcctgaagatcctaagatggaccaggttcacttactcccaggatcactttatatgcaagtagaagtcaggtcagggtcagaaacagaagagccatccttagtaaagcgcttcacccttcagcattgtttctcagtaaccttcataaattgcaggctactgagctggcctgatgatgatccttctgagatatggttatagcagatgattgtggatgataactacgccagcaagacactgtctccaagtaccccaggctcgtctgacttcctcggggattatactaaagaatcaccaaaaagaaccctatattggacaggctatgtctctggacattaaggcaacagcactaatccagaggctaagaaaggaggaaccacctttgtttcatgtctgcaacctgctccatatgaaggctttgtgacttgttgacccacaggcaaaagagagccgagtttacacacctac

SEQ ID NO: 724314 - DNA, 273 bp, Homo sapiens
agccttttaaaagtaagaatggcctaaagaataaaaaacttggatgcctttatcccgaaaaatatatttgctatcccccccacccttttctgaataatataaaaccgaagcccttccaaatgtagttagctcccctaaggcccctaagggtctaattaaaaaactaagtttcttggattttaggaattaaatggcccgtatttttcccccccccttcccccctactgaagaataatgctaagccccccccaaaaagggtttgtaataaatgtt

SEQ ID NO: 724315 - DNA, 112 bp, Homo sapiens
  misc_feature (80)..(80): n is a, c, g, or t
tagctcggtccaatctcaaaaccatgggcttataagtgctgagagtgagatgatattttcaggaatggaaagggggatcntggggatctcttctagaagtcgactctgtcag

SEQ ID NO: 724316 - DNA, 122 bp, Homo sapiens
gggtacgccaccctcaacggaactccacctgcacagcaacctgaaatatccttctaaactctatcctttccggttctatggaggcttcattgcacagatctgattaattaaaccattggcat

SEQ ID NO: 724317 - DNA, 321 bp, Homo sapiens
  misc_feature (56)..(56): n is a, c, g, or t
  misc_feature (181)..(181): n is a, c, g, or t
atgtacagacaatgtgggctccaagcagatgcagcagatccgcatgtccttcgcgngaaggctgtggtgctgatgggcagaacaccatgatgcgctagcatccgaggcactggaaacaaccagctctggaaactgtgcctcatatcgggggaatgtgggctttgtgttcaccaaggagganctcactgagatcaggggacatgttgcttggcaataaggtgccagctgctgcccgtgctgggtccattggcccattgttaagtcacttgtgccaggcccgaacactggtctcggggccgagagagacctcctttttccagg

SEQ ID NO: 724318 - DNA, 1478 bp, Homo sapiens
gatataatattggaacttcctagcgtgtggctcctgggttcagtgtctggcttaatctcacgggtatccgtgcctgtcagcgagggaccaacgctaaattgttcttgttgcattcttcggcagtcatataatccaatgcgataccttcgtttcctgatagaagaaacatagcatcgagccaccttcttcctcaaatgttcactacgaggtgggaagtgtaccgtatattatctacctgtgtacctatacaatttgctgtcgtcttcgctgtgccaaaagtacctgtttggcgatctactgcaatagatcgtagctcgcacgtacacgtaaaggtatgcgcgactacgcaaagcatacgctatatagctgtctgcaatgtagttgtgcgtaccctgtttcactttgtatggtatgggccccctattgcgtcccatcccttgtaaatgctctcagtggacaagacccatcatctcctcgtaagatcgtgatgtacgtgatatcaaaatcttaggtgggcgtgtcagaacacattgagcaatatcagggaaactatcaaagatcccaggaccatgaagtatatcattctctaatctattgacacatagcttcgctagggaaagccggggcccgctttcgagaatcctagctttccgctctctcatcatgtgtcccaggatcccagcgatagctctttacctcggcagtactacactcattgtttggcgtaacctctcctaccaattcctgtaatatggcaatcaaactaggggctaggtagcgattattagcggtctcctaattatacccctcgatttagttgtccaagctagattactttgtcatgccctatgcgatttgccaacttctagggtttggaaagtttaattccccaccgcgtaggacccaagttataaacctttgctaaattcaaaacttgtcggaagggtggtttagaaccagattttccaattcgtaagaccattggcttcaccaagaccttcttgtgtccccaaattgcgcttccaaggaagtttccaataccaaaagacttttaggtctttcagggaattctccccatggtggcttaacattaattactttcaattcttccgagagcccaacaacacgcttgcgattgacagcacacattggaagcgcacacatgatttccacggcaaggctgtcctttccctcgtttcgcacccattggcgttccttttttagggttccccaaacacggtttaccaattgcagagcgcacggcaagtgttcccccccgcttctcgtatgtttcctgtattggccctggttgctccctcatgtgggggcatcttcgggtcgcagggccgccctccggggccttggggcaaccccagttgtttggctgggtctctcaccccggcacaaatggggcacacccgcgccggggatttccctggcgcgctggcccggtgtggcacaccacttcccagataggg

SEQ ID NO: 724319 - DNA, 153 bp, Homo sapiens
ctgaggatccgatggcgagcactgtactatgattggactgactgaagtatgggcctgtgaatatgatgaaaaataaaaaagaaatgcaaaaaaaaaaacttagctacattatgtttaatatcaaaactcacctgaacaattccaattttcaaa

SEQ ID NO: 724320 - DNA, 206 bp, Homo sapiens
  misc_feature (72)..(72): n is a, c, g, or t
  misc_feature (119)..(119): n is a, c, g, or t
cccgctcgtaccaagttgcgctcttcctgttggttatgggaaaactgggtgtagatgaagacaagtaccttnatctcgttacggattatggaaatatggtttccgttgcggtacctttnggtttagcctatgcactcgatcatggctatgtaaaagaaggagataccatcttcttgatgggaaccgcaactggtacggcggatagc

SEQ ID NO: 724321 - DNA, 244 bp, Homo sapiens
gcacccaatgtatagatatgagctggggacatgaagaatcatggagctgaaaagcggtgcatcacccaatggctagcacacacaaggatcacactggggattctcttgtatgctggattgagcattttctcgcctcctttgcttcatcttttcacaacagctggatagagggagcagatatgactgtgtcatggtgctcattcactgcaaactcccagttgcaagctccttggctcccgcggag

SEQ ID NO: 724322 - DNA, 171 bp, Homo sapiens
cccctatgtgctgggtgtcgtccctgggcggtccgggtgtgctatccctaggtctcggggctgctgtgggctgctgttgcattctccatcacggcctgcggttgtggcagctctccaggcacacagtgtgttgtttgcacttgcagcccgtggcttgctgtcagtcagctg

SEQ ID NO: 724323 - DNA, 551 bp, Homo sapiens
gcgcactgcgatcggtatacagtagtatcttccctgtaaggcatcaattctggctgaaggtttttcttctgtatgcttcacgaagttctcatgctgtgttttcagctccatcaggtcatttatgttcttctctaaactggttatactagttagcaattcctctaacctttttttcaaggttcttagcttccttgcattgggttagaacatgctcctttagctcagaggagtttgttatttcccaccttctgaagcctacttctgtcaatttgtcaaactcattctctatccagttttgttcccttgccggcaaggagttgtgatcctttggaggagaagaggcattctggttttgggaattttcaggctttttgcactggtttctcctcatcttcgtgaatttatctacctttggtctttgatgctggtaaccttcagatggggtttctgtgtggatgtcctttgttgatgttgattatattcctgttagttttccttctaacagtgaggcccctcggctgcaggtctgctggagtttgctggaggtccac

SEQ ID NO: 724324 - DNA, 750 bp, Homo sapiens
  misc_feature (34)..(34): n is a, c, g, or t
  misc_feature (261)..(261): n is a, c, g, or t
  misc_feature (394)..(394): n is a, c, g, or t
  misc_feature (637)..(637): n is a, c, g, or t
gcacgagtaggttaggtacgaggctgggtggttncgttctgccgcgtccaccacaacctctgctgtatcagagggggccttcgccgccgccgcccccaccaccgcccctgccgccatcgccacctccgccgctgccgccttggggccctcctccttcaccgcccccttcaccacctctacacgttctaggccttctgtcctggagaagaagctatagtcgttctcccttgtgggcccggggcgcagccatggcggacggcnggcgtgcggcggggtgaactggcgctggtgggcggcggcggaactagccaggcctctgccgtgggcagcgactggcgctactgtgggccagctggggtgctggtggccccattcaacccggcctcgctgcctnccctggcgaccctgcagctcatcgctctcatcgtggagcagctcaagagcctggggcctattttgacagcttccgccgggactgcctggccgacgtggacaccaagccagcttaccaaaacctgaggcagaaagtggataatttagtgtcaacacatctggacaagcaggaatggaatcctacgatgaacaaaaaccagttgcgaaatggtctgaggcagagtgtggttcagtcaggcatgtnggaagctggagtagacaggattatttctcagtgtggtggatccaaaacgttaagcacatcttcaggccacaaatagaacgagcaattcaagagtacctgcgcggcccagaaga

SEQ ID NO: 724325 - DNA, 833 bp, Homo sapiens
gacatctggtgggggctcagcggcggacaccctcttaacccacgtccggatggtgtgtgaggccgcagatgatgccccgagcagtgaagaggaggccatcgtggtgctctgcaaggacgccgcagcgcagcctcaagatgcttgatcctgcgggcacagacttgcaccctgatgaccagagcctcgagcacagaccagcttctagaagttgggtggagtcacgggtttccagagaaggatgggaaacaacaggttcagtacatgggctcagttcttgtgaccaagaaaagttgagaggactttatggaatgccagtaaaatgataaactcgggccttgtagggtgcccagcatcagagttgcaaggaatggtgggggacttctaggccatgaggcctatccagtgctccgtaggcgcccttctctctaggggtgtgggagtcatcagaggaaatagtcggagttgaggcagacttctgattgagaagagattcatctgtgttaaagtgaattgtccaaggtatcagatttttttatgaaagaagagagatgttaaggttaatttcaggaggtgaggtggtcaggctgttgttccagattttggaggcaagggggttgaatcactgaggcaggagttcgaaacagttccaaatgtgaaccattttataaatcaaaattagcaggtgtgcgcaacatgtaatcagtgtcggagtgagacggatcgtggctggggtgggaagggggatgcatgggcactgtggagagacctaaaaaaaaggtgttaagcacaatatatgagaacgggtttaaaggggctaatagtggaaaaagggg

SEQ ID NO: 724326 - DNA, 454 bp, Homo sapiens
cgcgtaacgggaagataccttgcgagttgttggaaaaaatcgccccttccgtcactagttatattgagtacatcgagcgcgatatgaggccctggatcaccaggtcagtcaagaggtctgaactaaagcgcagctaatgcgcgatttcgtcgccgatggcggctcgctgattgggctggtgaaaaagcatagtgagatctgggccaggtgactaagccgggaattgccttacacgacagaactatcgccttgacaatggtgtactgaagcttagcaattgtaagcaactgttaatgaacacagccatttagaaaccgtatgaccgaccggcgagacgaggcacatagcatgactagcatagttaccatctcgttgaccatgctgcctgacccggccccacagcacatggagacctggcaggcaggcaacaaacaacctggtgacccatgtccca

SEQ ID NO: 724327 - DNA, 1122 bp, Homo sapiens
  misc_feature (553)..(553): n is a, c, g, or t
caaaattgatgatccattaaagtaaacaataaaagtgtcattgaaaccgtgaaaaaaaaaaaaaaaaaaaaaaaaaaaaaaaaaaaaaaaaaaaaaaaaaaaaaaaaaaaaaaaaaaaaaggggggggcgttaaaattttctctggggggggcacattttacccccctttttttttaaaaaggggccaatagggggttttttttataaaagagggggcagcatgcttcacaaaacgtgtgtggtggagggacaaaacgtcgtcacagatggacctatttgttggaagaagccacctctcatcctggctggtggtcagaacatatcgaggggacacaatccacgagcgagagtgatgacaccgatccgagaaggataaatatacaacacttatgacgctgtgttctagtgtggttaccaacgcgcaggcgagattgtgagtcagcggagcaaagagatttggatcacacgcagtttcatctgcaggacaactattattatcacgacggggcgtctgtggtaatagaaagtgaagagaaagagaatgagagcagnaggacagtgaggagacagaaagcagagaagtacacagacgagaggatgagacagcgagagaagaacagaaggagtaacgaagatagaagaagacgaaagaacaagaagaaagaccgaaagcagaagaggaatagagaacgaacaagaagagagcgaagaggacagaaaagaaagaagaataccgaaagacagagaaaagagacaaatagaaaccggaagaaagaggagtagaagccgggagaggcgcaaagaggagaaagacgagcaagcacaagaagaaagagaggagaaaagcaaaaggagagagacgcagcagcaggggacacggacacagagacacgagaagggagacagagcgaagggagcaccgagagacagcagacaagaaggaggcagagagagcaacaccaagcaagagcgcaggcagccaagaggcgcgacgaaacacgaaacgaaagccaggacagaagacgctagaggaagaaagaagagcaggaagaagagcggcaccaggcagaccgagaggcagaagcagacgcagagaggcacgacggagagagggcgaggac

SEQ ID NO: 724328 - DNA, 128 bp, Homo sapiens
  misc_feature (20)..(20): n is a, c, g, or t
  misc_feature (48)..(48): n is a, c, g, or t
accaaatggcggactacacnggtgcagcgggggggcccggggcatggntggccatgggatggggaaccgcggtggcttccacagaggtttcggcagtggcatccggggccggggtcacggcagtggac

SEQ ID NO: 724329 - DNA, 161 bp, Homo sapiens
ggatccccgagctctctgagtttcggtggacggagcctctccgtgctgtcttcaagcactatcacttgcgaatccatgacatcccagaggcctataagcttcgtggatggtttgacgcagaaggacaagccttagatggtgttccatctctgatctaaaga

SEQ ID NO: 724330 - DNA, 219 bp, Homo sapiens
cccccccccccccgggggggttccggggggggggttcccccccttaggggggtttttaaaacctgttttgggccccgcccttcaaattccctggggggtttttaggggggaaaattttttttttggggggggttttggttttttttttttttttttttttgggggtttggggggttttctttttcttccccgaatttagggttttttggggccgggcca

SEQ ID NO: 724331 - DNA, 313 bp, Homo sapiens
ggctcattacagtactaataattgcacctgtagcaactgtggtggcaccatttatctagatcaaactcagacaggtacactatcctgaagaatattttggttgagtatgtggtgtcatagtctgggtataatcagagtcttctccagaaatattctcactacacagaagtccacacttttacaggattatggtaagttggtgtcaggtggagaacacaggatgcaccatgtaaaacacagggaataatgctgacataggcaggtgtgaacggaaaataaatctggggacccccaaatcacaaactgaaatgag

SEQ ID NO: 724332 - DNA, 191 bp, Homo sapiens
gagatcagcaatgctgtgagagagatggcctggggggtggagcaggcctgttggatcccagtcgagacaggtttcgccgtgttggccaggctggtctcgaactcctgacgtcgtgatctgcctgcctcggcctcccagagtgctgggattacaggcgtgagtaccatgcccagccgattcagggatttttc

SEQ ID NO: 724333 - DNA, 222 bp, Homo sapiens
  misc_feature (18)..(18): n is a, c, g, or t
  misc_feature (156)..(157): n is a, c, g, or t
ctcatggcagcatgtgtncttggaatctagatgtttctgtatcccaaggaacccaggctcaggctttaggctggaaaacaagacaattgcagatggtaattatccccaggatcacaagtcaaagcctgcttttggtcaagaatctcgaactcccgnnctcaggctatccgcccatcctagctaggaccaggtgctggtggggaaggggaggttcagggaagt

SEQ ID NO: 724334 - DNA, 86 bp, Homo sapiens
ggatttgctggtgcagtacaactaggcttaatagggacatggagaaaccccgtctctactaaaaaaaacgttagaagcttgaattc

SEQ ID NO: 724335 - DNA, 110 bp, Homo sapiens
agtcacaaggcatattataccacaggaagaaaaatgctgactctgatatgagaaccagactcaagagtcttcacacacgtggtaactgtaatagtgtataacataataga

SEQ ID NO: 724336 - DNA, 125 bp, Homo sapiens
gatcaggaactatcgctatacatcggcaccgatctatggtcaggaactacgcacggtatctagatcgtactatcgaacctaccgaactatacgtatctatgattaatagaaaacattactatgag

SEQ ID NO: 724337 - DNA, 1198 bp, Homo sapiens
  misc_feature (303)..(303): n is a, c, g, or t
  misc_feature (327)..(327): n is a, c, g, or t
  misc_feature (421)..(421): n is a, c, g, or t
  misc_feature (439)..(439): n is a, c, g, or t
  misc_feature (495)..(495): n is a, c, g, or t
  misc_feature (606)..(606): n is a, c, g, or t
  misc_feature (1047)..(1047): n is a, c, g, or t
  misc_feature (1049)..(1049): n is a, c, g, or t
  misc_feature (1056)..(1056): n is a, c, g, or t
  misc_feature (1075)..(1075): n is a, c, g, or t
  misc_feature (1129)..(1129): n is a, c, g, or t
  misc_feature (1136)..(1137): n is a, c, g, or t
  misc_feature (1140)..(1140): n is a, c, g, or t
  misc_feature (1146)..(1146): n is a, c, g, or t
  misc_feature (1157)..(1157): n is a, c, g, or t
  misc_feature (1161)..(1161): n is a, c, g, or t
  misc_feature (1165)..(1165): n is a, c, g, or t
cggggggaaaagggatgagagctccgcctgggatagttagaaaactaggctgctgcctggaaacccgcgcaatgcgcagtagacaggcctacttcccgggtacctggaccgggcctgggatccccgggatgctcaggaattctttcttgtcattcttgacagccctcctctgtgtggagtctctcgctggacctggaactcagggatcctaggcaggtcagctggaagggaagacacgcctctccataccaagcctgaggttcaccgcgaaagagaggccgccgctctgccccacctggcccnagccgcccaacctgctcctccagnagagccctgtgttcttcctggctgaggagtggttccagcaaagcgggctcttccacgtccttcagctcccccagtggcgccggatctaggaaangttgtgccttttgctganactctggggttgacaggagctcatctaacaggctggaggtgagtgcagacgagctncccggctcctggagcggttgggaggcgcctggatggctggcatctgtgcttgacgcggaggcctccggaggtggaggtgccccgtctttgggttcccacgccgccctggcnacctggggctccagcaccaccacggactccggtgggacgtgggtggcacaagcacaccttgcccctgtgactcagcttgagggggcccaaactgaacacgcgcccagcaggccgtcgcgcagcagtttctggtcttcctgtcatttgttggggtgcggaggccaccagggagtctgaggatgggagagccccagttctggaggagccagggcagggaacacaaagccccacatgtccaggcaggttgggagagtccttcttcctgcgcagcctggctgggctggagcaggggatggcccttgctgcctggctcacgaaagccccctgtgggagagccccaggggcgcagggcatgtggggtgtgggaagcgcaattccccatgcctgttgtgggtgaactggatagaggagggaggagggtgacaccaccagggttgccantnagtaccncagtgacctcaagaactcnaatgaaggaagaccttgcccgtctcttcaacttgaagtccagagctagaatgancagctannganagtganttcatagcgangaancccntggtcaactcaagatgcgcccctgggcccgctg

SEQ ID NO: 724338 - DNA, 380 bp, Homo sapiens
tatttgaaaattgcccaattgggtacaccactaaaaaaaacttgttttaattgtatttgccataaaccacctcaaattttttcatggaattttggggccaattcagattttttatttaaaattttaataaggaatacattttccaaatgccgtaatccaaatgtgatttagtgtaatgaaataaaatgtggtttagtgtaatggaagaccttttagaaaccgggggtattaactttgggtatatagggttaatatcccccctgtactgttagaggccccccattttagtatgggttgttggcaaagagtggtaccccgtttcaatgaaacaatgtatgtttgtttttactgaacttaaattaatacatggtttatcctta

SEQ ID NO: 724339 - DNA, 223 bp, Homo sapiens
ttgatgtggctctgcgctatgccaccccaggtgagcccgcttctccattctgcccgtgatggcgtatacagacagcaagcagctgaagcaagcagtaccgtacaggtacccactggctttagcccacttagtgggaagtctctgatgcctttgtgaccactggatgagtttaatcctcttgagttgatttcattgcccacctttgtgtgagtgtgtatcaaag

SEQ ID NO: 724340 - DNA, 146 bp, Homo sapiens
cccggagcagattaatctgataatggtcttagaaatgtagaaaatgataaaaaggtagacaggatgatctgtctagatcgtagcaaatgatggtacacattcacaacaaagtggtgccactacatataataaacagccacaaacaa

SEQ ID NO: 724341 - DNA, 128 bp, Homo sapiens
ttagtacccatgcatgcttggcttgacagtgagggtataatgacttgttggttgattgtagatattgggctgttaatttgtcagttcagtgtcttaatctgacgcaggcttatgcgccaatgcttgca

SEQ ID NO: 724342 - DNA, 470 bp, Homo sapiens
  misc_feature (353)..(353): n is a, c, g, or t
  misc_feature (382)..(382): n is a, c, g, or t
  misc_feature (432)..(432): n is a, c, g, or t
acagagtttcactctgcagcccaggctggagtgcagtggtgtgatcttggctcactgcagcctccacctcttgggttcaagtgattctcctgtcccagcctcccaagcagctgggattacacgcccgccaccatgcccagctgattttttgcatttttaatagagatggggtttcaccacgttgaccaggctggtctcgaactcctgacttcaggtaatccacctgcctcagcctcccaaagtgctgggattacagatgtgaggcaccgtatccagggctgtatgggagtctttctaatcagggacatagggcagacagtcctaggcccagctttatgcctttatgaggacgncaacaacgttggaacagttcattgttttnaggggacagtaggttttttacagatgggatggataaactaggcttttgtnggaacatttattttgtggaattttaggaattcaggaat

SEQ ID NO: 724343 - DNA, 202 bp, Homo sapiens
agatcgtatagagtatggataggagtctggatagagtataagtgggttatttgagaagtgtctcatctcctagagggctggatagaaccaaggcaagaatgtcaggtcagaaatacaagctggcagggtgcggtaatcacgcctgtaattccaacactttagaagggtgaagtgggcagcatcctgaggtcaggagttcgaa

SEQ ID NO: 724344 - DNA, 125 bp, Homo sapiens
ccacgcgtccgcttcgttagaaaagtaaaaatgctgaagaagcccaagtttgaattgggaaagctcatggagcttcatggtgaagtctgaactttaaatagtggcaaataaaaagtgctatttgt

SEQ ID NO: 724345 - DNA, 135 bp, Homo sapiens
ctataaattgctggcagatgctttacagtcaatagtgttgcttataaatagtgcccctcccaatatgctatgaatgttatggcctgatctccaggcaaaaggagtgagatgaatcaataaccagtgaactttttt

SEQ ID NO: 724346 - DNA, 219 bp, Homo sapiens
atctgtacgagcgaccaatcatggttttaaggatactggaaaaaaccgtggagcttgaggtggaattcacgaatcgaatcacctaacaagcgcacgtaaatcttggaaaaggtgtgtgctgacttgatacgaggcgcacaagaaacgatctcaaagtgacaaggaccagctcgaatgcctaccaagacctttgcgaatcactacaagaaaaactccttg

SEQ ID NO: 724347 - DNA, 961 bp, Homo sapiens
  misc_feature (272)..(272): n is a, c, g, or t
  misc_feature (308)..(308): n is a, c, g, or t
  misc_feature (426)..(426): n is a, c, g, or t
  misc_feature (748)..(748): n is a, c, g, or t
agcggagaatctccgtcagacgccgagatgcgggtcacggcgccccgaaccctcctccgtgctgtgtctggggggcagcggtgcctggatccgagagcgtgggtctggctccgctacgtcctagtgatggttattttggcgtacgctcgcgtgttccgctggcgtcccggccgccggggaagctcccggcttcatctcgacgtggggcttactgctggacgtgcgacccagattcgttggagcgttctgatcggtcgtagcgtccgtcgagntctcggagggacgggtaggcacccgatggcgcacgntggcaattacagcaaagaaggaggctcgcgagtgtattgggtgacgctgggaaatgacgagcgatgagtctgcgcatggagcgaagcatgatgagacttctacgcagaggacgacggncgtgctgcggaagcctatgtggtcgggtcgtatctatcagagccaagcaggccgataggacgcgtgcgctcgtcgagacacaacttccgcagtacgagatggtaacagggctcgcaggaccgattgagcgtggccgaggaacggtggacggctcctcgctcacgcgggcgcaattgagccactgtctcggtcgctaactgagtctgggagaccgggaattacacatgccgacccgtggagaccgaagaatgaaccctggaagtctctccgttggacgcttgcgggatgtgatcacctgccaggggtccacagaatctaagcnagatgcgaggcaatgctgcggaagtgcgagtcacggtgttggaggagagcacaatgcatgacaagtgcgctacacttaggaggggcaacgatgcgtgtgagctgtgcctccgacaacaagaggcgctggaaacgagacgcggaacaggaggaccgtcgtgtgaagagccgaccggaatcctgcgcaagatgaacaggctggtgaaccctaggc

SEQ ID NO: 724348 - DNA, 86 bp, Homo sapiens
tggacacccatcgagagcatttggggcattagggaatgcagcatgactctcctgaggctactgtgtggtttacacatttttccatt

SEQ ID NO: 724349 - DNA, 129 bp, Homo sapiens
agacgatccccaaccaactgaagcacgggccataagaaccatttccacagccatctatccttggaggaagggggagcttactctctctgaggtagtggagatctgagagaaggatgtctgcgttgtagc

SEQ ID NO: 724350 - DNA, 299 bp, Homo sapiens
gattcagggtccatttaaaaaggtaaataatcatatgagaactccttatttttctctataaccggattttatcttccgtgggtccttttacttcacaaaaatgagccccttattagttttatccctggtatgacaattagttacatggcccccccctgagtactaaaaacttaatataaaaccctggctatagttttttatacatatgagaaaaaaaaaagtaaaagcccagtttaaaaaagacagattcaaagcttaaaggagaaaaaaaggtttaaatgcccgtttagtaactagga

SEQ ID NO: 724351 - DNA, 309 bp, Homo sapiens
atcatatataggtaaagctctaagactcctgcagcaacttatatgtaactggcttacctaggctggggcttgaactaagtaaagaagccaaggagtacagatctagatagcagagaagtcagtctcatactaaaacattgcaactactgttagagtccaccccatgaagctgtaacagatagtgtatctttgactgaattctataagtatatatggtacagactaaaacaatatgtggctagctaggtaggctagcctgtctcagtaggacattgacagactccagctatcaccctctgaagaccttgg

SEQ ID NO: 724352 - DNA, 1070 bp, Homo sapiens
gacttatataatttatttctatttgtgtgtactatagtcttgttgcatatgtagttgaacacacagtgaaagtatatgctgctctctttgtggatggtgacggacataaaaatatttgaatgtctggtgagaagagagccagtgtgtataggtcagagaaaagaacagttcccgactccctattagcgcctgtgattagtttcctttctgtgtttatctgggcctagctgtgctgttatctttaaagccaggaagaagttccgtcttttggaggctcttctcacctgtccagccgtgggcatgtcagagaacacatagcctgtgacgaatgccgtgtgttgcaaaggtttacttcaatttgctagtaaatcctagctgcctcaagaactcctacacctaagatggacattccctttccagaacatgggatcaagtatctgctcacttcggtattggatggactaataatgtagctccaaatatgcaagggatggaagaatatgtgtaatccaaaaccaaggcaaggaaatgaacaagtgaacgtacctgtctgttaccacccctttctgtgtgcgttatagtctggttgcttcactgtgcataaagtggtttgcacttgcgagcgcttgttaccataaatatcgtgaactatgttgtacagtgacatgtctttcgtgaacagccgagtccagttcaacgactaaccccttctgggtggctgctgacagatgaactggtttaggttgaaacccgaacaggcccctagagggtacttgcatatcctggcatttgattggatataagtctttcgtgtacacttcctgtaccattacaatttgccgggcaaagaagaaatcctgtatattttggtcaactagggcttctaccagacagcgcaaatcacaggtgcaaagtagtcacgaggtcggacctgaagggagccccgatggggtctccccacctaacaacgcgtgggttgtgccaccgctgggcacgatatcatagcgctcgagagagagtctacgtcttcatcaagatgcgactatatatctacacaagaaagtcagtat

SEQ ID NO: 724353 - DNA, 116 bp, Homo sapiens
cagttagtgtctctgatttcttgttagttcttgatgcaacatctcaatgagagtatcttcatcagttccaaggcccttcatggcagcacgaagttcatcagcatcaaagttgcgct

SEQ ID NO: 724354 - DNA, 141 bp, Homo sapiens
ggatcccttgcttgatagctgatgtcctcaatctttcagttttaaattcatcagaagaaaatctgcacaggaatagaaacacaaaaggcattttcccaaaataagtggtagcttaacaatttccccatattccacattctc

SEQ ID NO: 724355 - DNA, 236 bp, Homo sapiens
aagtacttatgctggctacagtatgccagatcacatgaagagaacactcgatgggaaagatgccttaatatccagctgacacaaagtacgaactaatctgcatgtataacagagagcagactgacgtagggtggaaagcaggacagagaggggcgccgaatgctgaacggaggtgcttcaaggagatgggaaaaccagagctagtgatgtttctaccagcgatacgccgaccgagc

SEQ ID NO: 724356 - DNA, 829 bp, Homo sapiens
gtggagaggaatagatttgtgttgttctcccgccccccttttttgtgtgggaagaagcggtcgggggaggttggcgcgcccctccgattttttcttgctgagagctgtggtgtggtggagtggtcctccccccccctgtctgtgtggtatgtaaatggggttctgcctcgttcgcgcgcgccccaccacggcgtgggtgttgtgggagagagcttgttctctctcacgggtggtccgccccccctgtcgggggctgccttgtttgcttctgtctggtagatatgttaggcgcacgaccaacacaatctgctggggtgggtggcgcaccaccaaacagcacgaggtgcaccagagaagagacgtcgctgtggggaagctgcgcaagggtgtctcaccacagatgttgtctgctccccgattgactctctgagaaggaagcgcgaatggaaaaattattctctccctctcatgactcttcccccccccccccctcctttattaccatacgtgtggtgggtggagaaagacacgtctctcacgaagactgtttgtttgttgtatatctgccgcctctgtgataatttgtgatgtatagtacggtggttgtcgaatgacgacaccatgcctgtgtgttgactcctccctcgcgaggagaaacagaggagtaatatttttttttgggaaccacaccttgtgttttctttttttgtggtgctgggcggacgcttttgtggatgatgtggtttgttggaatcatccccttttttttgggcccccccccccccattttccccacttttgtgggccccccataaaaaattaataaaga

SEQ ID NO: 724357 - DNA, 129 bp, Homo sapiens
gagctcgtaccgttaattttgagcgctacagcgccgacttcgatgggtaaaggcacgggctccgtggaaatctggatccgatcaacaccgacatcgcctgaccgcaccattggcaggagcgagcatgtt

SEQ ID NO: 724358 - DNA, 877 bp, Homo sapiens
cctgtggctggtgcctggccttcgcccgttgcttgggggagtcgtggtgcagctgcccctctggctggtccttgtttttgttgtcctgcgatcttcctgtgtgtgagcgtcgggtgtgttgatccgttgcccccttagtggtgcaattggcccgggttcgtcttatccccttgggtggcacattgtctctcatgtagtgaattgtttgtggtgaggccccacgtgtgtgtggggtgtagccacgggagtcggttgtcggctgggtgctggtggtgagcgcacaggttcgccccgcgggggcccgctctcctacttcgtggtgcttctgttgttgctccaccggtggtggccgtgcgtttggttcctccaaggtgccgtgtcatttctcctataagggctttacgaagtatccgcacgcttgttgtttgggccccacccgctggggtaatactcccctcgttgtgtatattccgcccctggatgtttaatcccctctcatcggtagattgtagattcccacctttgttaccacgagcttcccccacgtggcggatacggctccctggcccttgctccccaccctcgtggtgggagccctctaccgcgctggaggagcgcgttgtaaaggagcccgtgtcgcataagagagacttagcttgctgtgttaagagagccttccattctttagcacgagaggagtctataatgatgtttccatccattgtggcccaataggacctgccaaaggctgcagcttgcacttttgatggatcgccacaagagccccctggcgtgaaactccactcacccacgtttagtgctcgaagcagccaatttatttccaagcatttccataaaccttttttttcctcaggtc

SEQ ID NO: 724359 - DNA, 256 bp, Homo sapiens
catggtgccggctatctttaggacctcaagcggcagtgcctggaggcgggagtacactagcagacgcaggagacataccagcagctcagcagaaacctgtgcggatcccactgagagcacgccgcacgcgaagagccttgaccgtgtcagaatactgccgcgacacgatgacacgatcgacgcgcattagaaacggctctatgacgagacgcgcggcatggatctacacctatactgcagacacacactgtaagga

SEQ ID NO: 724360 - DNA, 1256 bp, Homo sapiens
  misc_feature (313)..(313): n is a, c, g, or t
  misc_feature (1117)..(1117): n is a, c, g, or t
cgagcaacatgcttgcggacctcgagtttagtcgagaaccataggcgaggatagagcgaggtgccggtgtgagccgcgatgtctgtactccgtgggtacagaggaaggacggatgtgggcccgattgtgctcgggcaagacgatcaaagaagcttctggcggaaagaaccggccaagtgctggatttcaactcctgactttcgtgtctcgagcatgagcaaggaggggacgtacggatggcagcttgggccctgggctgaatgtcaatgagaccaagcgtacaagtaagtaagcagggcatgccagcatacgntgtagaacgtgcagtaagtagttgaccgaatacggttcggaccaggagaatggagcacaacatgcagaggcactaccacgcagacgcgcataggatcatggggaacacaattggcggaggtcgccggcaagacggacgataggccaacaccgggatagtgggcgatccattgaatagctcgagaatctgtagggcaacggggaccagggcaaaccctttacagagcggaagggaaactggactttgcacggggcacaccggtggcataccaaggaacacggcacttggacatgggcctatcacgagaggacattctggagagtcgtgaagcttgtccagtacaaaagggttctcggacatttgtggaagtgggaaaacaatttcggcattccgatgggataggaaggctctggtgcgaattcaacgaggcgttaccggaaaataatggcttcacacccaggggggattgcgaggggaagacgttaaagggaaacatggaaaaggaagcaggcaagagatgtgggaaccctatgggggaacaaaggcccagaggcgggcaagggcggaacacttcgtctcttcccactctggcagcgcgcacaactggtagtcgcaactccctcttggcatagacattgggcgggaaaagttagggaaaaaaacccaacaccgcggtcgcgcaacccgaagtttgccaccaagaggggggcaaaccgcgggtgggggaacaacagccggataattctcggcggcgggacaccacccgcgtcacagtagctccagcagtggaacacaagagggcanccccaaagtgcaaaacgaacacggacgcggccaacccgtggggagggtgctgcttgagcaaccacagactgcgaccagcaatgagagcgcccaccgaaaccaccgccccgccgggcgaagttccgagccaaagcggcaa

SEQ ID NO: 724361 - DNA, 348 bp, Homo sapiens
cgtcgaccaataccgtgattcgctgagtgctcacttattcacctcattggctgcttcagtaaagtatttaacagcgtcctcggcggttatgcggatcatcccgtttggggcttgtgatgaatgaccaaattcaagccggtaagcataaggaacgttgttggcgaaatagatcgccttagtgccgactttgaactgttcaagcatgtaattgcccgcagctattgtcatgttgccacttttatctatgcgccctgtttcgccgtccggctgagcatctaagccaacctgccagttacctctaaagcgtccaccggtatagccagcaggtgctttgacatccgtcgacgc

SEQ ID NO: 724362 - DNA, 308 bp, Homo sapiens
tggtcacacaacctctcactcaggacaacaccataaccagtgctgacagcaggcacaaccgagcacagtcaaagcattcctcctccagtcaaggactgaaccacccttcagtgctgacaagcacagcaaaaatccacagctaccagctttacagccatcccctcctacaccctgtggaccacgtggaccgtcccagcacagaccaccacacccatgtacaccatgtccacaatccacaccttctctaactccagacgacacccaaaactacacagtgctgaccatcacagccacaatggcacgtggat

SEQ ID NO: 724363 - DNA, 230 bp, Homo sapiens
caaattgcactcttctatatctaccttgcttgaatttgcactcctcttctccatgctggcacttgaactcccacctgcacacatgacattttgttcctcgtgcgtttccgctagggcaccagacgtgacatatgaggatctccatgcaccaaccagccatgattggtgaagacgctcccggaatcagtgaaggctcgagcagcacaccgcgacagctgcttctatagata

SEQ ID NO: 724364 - DNA, 421 bp, Homo sapiens
caaataatacaaaatatgccccagattttaaactttttttacaacatgtacatgcattggatgcaggctaggcatcattatcatcagactttattacaactaccacctgctatgggagaagagggtgaggaagatcacattcaggtagcagaatcggaaacagaagaagaggtcatgactgttcaagctgccataatagctaggccaacagacaccagctgccgtcatgaaattccagccttgcaacctgaacccagcctcagtgggacagtgcccatttccattcaagagccatccctgcattatctgggacaatcacttaattgggggggggtttctacaagacagggcggtcgcccaaaacgccgcccccccctcctttttttctgctcccaaaaaacaccgtggacaggttgaagtt

SEQ ID NO: 724365 - DNA, 474 bp, Homo sapiens
tggtggtggaaggcagaccatactcctacatccagcattccctgttagtcagctcagtgtacagcaccacagaagatacgcagcccctccatggcaccacagccaccacagggctccgaccagtaaccgtggatcccacagacacaacagacaccagagaacaccctgacattccgcctggcatccaaacagcagcgggcaccctgaacaggtcaacagaatgatcagatagagggagacatctgtaaataaagtctacatttctctattatggtataacagtaatccttgtctgtttgcttatacttatatataagcaaaaacttcaaatatagagccgtgtgcagatgttaactgcatgattacagaaattctaaaattttatattacttaccgtagccagcacccctctcaatgtgtggctcatgtccattaacacagaaaatctgtcctcactacatgccatggggatcc

SEQ ID NO: 724366 - DNA, 694 bp, Homo sapiens
cggcgccctttttttatgtttttcggattaaattcttcagactaaaacaggggaagagggtgatttatatactatggtttgtaaccatcggccacaaattaaaccaaaaaaaatagctccacaagtgtcacaggtccagggacagaggaccaacagtgggcatactgagttctaatgacacaaggtgctactacacctagcccatggaccaatccctcttagtgacgcgcgcggcgacaggagatttataggtctgttgcgacttctaagaattaaaaagtgcccatagccccaattattctatacacaaagaggaccaacaagcatacaccacctctattaatccaccattcacgtacgttaactgagagagtcagaaaccacagctcgagcctatactgcaagtacaaccacaatatagcgccagtggcccagatacagctgtacaccgcgctataacagataacacagtgaaaagagcccaacataacatcagtggcacaacatactctgcgggcaaagaggacacacacctatcagcagcatgataacacacgaattaaaacccattgcgacctcaataacacctataactcaatttgtgtccaccaacgtacataaatgacatcacgtgacagtaatccattagaaaaatcgattgataagcacttaaatacacaaagcgctacacgga

SEQ ID NO: 724367 - DNA, 389 bp, Homo sapiens
  misc_feature (321)..(321): n is a, c, g, or t
ctgaccttttttcatcaccagcgcatgaccgtggagaaaactgtgtggcaaacgcgctgcataagcgtattcaccggaacaatcagtacgccacgctgcatcgtcggtagctggtaaagggtggaaaggcgcgaggagataatgtcctgatgaggcgaaaaactgtcgtagggaagagtttcccagtccgccagattcatcaccatttgatcggtaaactggctgatttcatcatgcaaacgcagagcattttgcatatctggtgcaatgagtaccaccggaccggcgtgacgttcggcaatttccctaccagcgttgcancagtgcgccggttaactcgcccagcagacgctgctcacccgctttgacgggcagcgtataacgatatt

SEQ ID NO: 724368 - DNA, 480 bp, Homo sapiens
ctcaatcacgatacataatatttacatctcatgatattattataaataatagctatcagggacgggagaagtaactcatatgtccatcaacagattaatggatcaactgtgtaacagccataccatggaaagttactcagccataaaaaggactgaaattctgatacatgccacaacacgtatgaaccttgaaaacattatactaaatgaaataaaccaatcccaaaagtacaaatattatctaagtccacttatgtgaaatatctagaacaggcaactttatcgagcacagaaaatacattagaagttaccaggggcaaacagagattactgcttaatgggtcagcgtgtttggagtaataaaaaagtttcagaaatagataacagtgatggctgcacaacattgtcagatgtacttactgccactgaattgtgccctttaaaacagggcaagttggtaaattttatgttgtttatttt

SEQ ID NO: 724369 - DNA, 594 bp, Homo sapiens
acggaagaagagcctgcagcccatgaggcaaacagcactgtgcccttgactcagtcgtgctgtcccctcccatctccctcagactcctctccatgaccaagtcagttaccagccgctgatacttcatggcatacccagcacagccgggcaccaagaggcacaacccaaggcctggctaggccgtgttaacgatagtacagacattaattcaaataactttgtgtaatactttactggaatagtaagttcttgttgaactgtcacaggtgagcttctaggaacacaccaggtgtggatacttccactgggtgtgtccatggtcgtggtctgtgcttttgtaaacgaacagaacacttgaaccacctcccgaattgggtcatcggcttctttacgttgatacttaagagatttgcagctctctttcaaggaaacttcccctactgaaaggcataaaaaggttcaaaccgaccatccgagagtcccaattccctgtataacagcattaaaataatctgcctgactggaaagatgagaacactgttgcacaacccaaaatgtgtctttcatccgtgacccattaccatggtgagtcag

SEQ ID NO: 724370 - DNA, 1083 bp, Homo sapiens
  misc_feature (811)..(811): n is a, c, g, or t
ggagagaactagtctcgaggttttcttggtttatttttagtggcttccggccgtctcccaattcgaaaccgtctcccgcggcggccgaggcgggctgcgactccagtggctggctttcactttgtcgctgtagtcctctctcatcgttcggtgatgtgcagacactttcccgtgggggccctcccgcctctttgcgcacgtcctcgtgcccgccgatcgagctcctttcttgctcccgctgcctccttctgctgctcccgcatcttgcgctcccgctcccgcttccttttctaacgtgcctccaaggcggtcccttttcgtctccgtggaagtgcctccctttgccaatcttccccttctctctcgtggtcttttcccatttccgcggcgagctttatccgtggttcttctcgagtgccgtttccgacgtttcggtgcctcctctttctcttttttctttctcacttcatagcatgtgctttccccccctttcgtgcgtgaatgtggcctacgagtggcctacggttccctctttgtcccctcttttctcacctcttttcgtggtgagtgagcctttatcctttctcccgagcacatttgtgcttggggagtggtttagagtggccaagagaaatcatctttcttctcctcgtgatcttccatagagtctctctcttctatacggggaagtcccttatgggtgaatctccatgcggggatctctccatctccccctcctcaggggaatcccgcgttggaatcccggctcaatcagacggcgaccattttgcgacgctccaacgagaacttntccgcgaagaaacgcgttgttccatactggcaaaacacttgagcggcaccagaaacctatcaaactcctccctttcaggaaacaacccctcttttcactataacacaaaataatggcgctctaacatttctcataaacacgcggttaaatcacccaggctatacttccctacttgttccctatcctatcggatacctttcctgaaaaaattatccctcaaagcttcacatttcccaaaatcccttttattaacccatttcagtttaaaacac

SEQ ID NO: 724371 - DNA, 161 bp, Homo sapiens
  misc_feature (10)..(10): n is a, c, g, or t
  misc_feature (38)..(38): n is a, c, g, or t
  misc_feature (120)..(120): n is a, c, g, or t
  misc_feature (131)..(131): n is a, c, g, or t
  misc_feature (153)..(153): n is a, c, g, or t
ggctcacctnaactgaatgcaggaggggcagtgctttncaccagaaagagcccatgtgtccttctcaccatcccctgtgcttacacccccagtcagcatgctccgggggtccctgagccnggccgccccanacggcctccttccctcccaccnaccacccc

SEQ ID NO: 724372 - DNA, 1655 bp, Homo sapiens
atcggctttcgtgccatagctttcctccagcagcccaggagtttgacttacaaggaatctggagtagatatcgcagctggaacatcatgctggtcgacagcaaaattccagcctttcagccaaaagccgacttccagatcaggcatgtcaaagttgatcttgcgaggttcttgctggtcttctctctgatcttaaacagcagcatgcgtttcaaagcatcccctctctgggcctcatgcgcaacagcatggccgcttggcaactcaacactcacacacgcattgcaccaagcctcatgcacaatccaacacatgcatcaccacattggctcaacgcatccaggctcaagccacatgctgtgttacaatcgcatcattcctcggcccaccacaggcagccagcagccccacatcgtctcattacactctcgcaattcactatctgaccatagtcgcgccacaacacttgagcaccctcgagctgtcacactcgcaagcctcgcccgttcgcctaggaacatcgcatcaaaagcccttcgctgcgcaccacacaccatcgcgcatcgtcgcctcctcccattgcgcaatgtcgcacacaaccaggccaagcacaccatcgcgcctcgcacccatcggttcatcacacgaccctcgggccacgcaagctcgatcgcacccctcagccactgggggatacccgcccggctctggtggtggccccaattgggctatcgaccggaccgatactccacgacacaatcctctccacccgtccacgcccttgtcggcaaacacggacaactcccacccatcgcaagctgaggctcgcaacctggctatggatcacgagtaaggagaccactacgcacttactcattcactcgggctcattactaccagctaggcacaccactcggcgcgacactttatacggaacaccttcgggtttgggaactcggcaccacaacacacctcgccgcccggcgccacaaccacagtagtcccctcctcgccagcgatcaccaagtggatcgaagactcatcccctttccctttgccaccatgcccgacaccgcttgagcaagctgcggcacacgctagcagctgcgaacccaccacgaacacgtctcaaccggcctggcacaacatactcacacttcgctcactcacacgcgcgcccgctactcacgacaacactcacctcactacaagccccattgcctgaccttggtcccagacacctgtgtcgaccacacgacctcacatcagggagccaactggttctctacacagtctccgtctggtctgcaacttcatttatagtggctcacgaccagacacatctaccatcagccagcaaccatctcctctgcacacaagagctaccactcgccttcgagctaaccacctgcaggcagataaaccattagacagtcccacacacaacatatcactcacaccctcacacgcatggacaatctcttaactgcatgtcacatccacacaagacgacactcactcaccactgcgaacagtgacgccaaactaaatacataacttgcatatcccactaccacatttgtgtccacaactggcacaacaaaccaaatgtgaatagatcacagacgagcaacacccaacgaagacagcaacaac

SEQ ID NO: 724373 - DNA, 156 bp, Homo sapiens
ggaagggggggggggttataaaattgtaaatgtttttaaaaaaacttgggaatgaaaatgaatcccagggtttcatgggaagaggttgggcccttggtttcaggccttcctgtttcagggcagaaaattttgaagattaaaaaataaaataatcca

SEQ ID NO: 724374 - DNA, 986 bp, Homo sapiens
tacggggacgccatctgaggactgtatcgcaggtccgacggtgtctgctgcgccaggtgtgttggccccccggggggacacgctagtgttgggggcgcgcgtgtggggcccgcctgggtgcggtagtgcgcctgtatgcggctgcgcaggtcccttgggtgagtgtccgtggtgaaaccgacctgggccctgcggaaatgttttcgtagcgggccccccttatggtttcccggtaacggggggtaaacggccggcccacctgtgttttttgccttgcgagggccgcctgccagttaggatcgacgtaccctgggtgatctgtcttaagagacagtcacggggttaccaaagtggaagcccgtggtgggggagaatgttgcccatgccgaccgggaaaaccaagcgtgattcttaacaggtggacattctgccagccgtccccagattggcgccggtgtccaatccccgtgtgttacacgattttgggtaaaagtagacgccccccgctgacaattggggtttagacaacacagaggcacggcaccactcgaaatcttgttagcccaacagcatgaggtgccaaatcagttgtgaaacacacagttggggcgcacgacgaagcctagagtcggaggtacgccacaaatagtgtatcacaaggagtcgcgatcttgagggaagccggcaagtggaataataatactcaaaaatttttgcgggggagatgtgcgtgaggtttgcccgcttataaaacacggtgttgtgtctcgttaaccacagtgcgcaccatcctgcggtacatactttcgtggtccaccatgttttgctggaaccccacccccaagcagtcttaattgttcaagtgctaagcaccacccacaacgggcaattcaggggaatttggcgaaagataggagatgttgtcaggacaagtagggagtatcttgcatttcgaaacaaaaaaaaagggaaccgggccccacgca

SEQ ID NO: 724375 - DNA, 346 bp, Homo sapiens
acttagaggatccctcctacaaggtacgctgagctggtgcccatgggctgagtggactggcgcgtgtggtacacctgctcaatggccagcagatgggtgtggtcacaggcgccgtcagacctcatcacctgtctctgcaagaagcccccagtctcgtacaaggccccgcccttttctttctttggccgcacccaaggcatataggagtccctggccagggattgaatctgagcctcaggtgatacctcgccacaagttgcagcaattgccaggtcctataatccacttgcaccacaagcagcaacctccaactcttgcttcaattaaacggctgcgtctagctgaa

SEQ ID NO: 724376 - DNA, 396 bp, Homo sapiens
ctttcattattgaaattcaaaacggagaacatataattattcaaaagataaaaagtaaaacacataccttggttttatagtataactaactaagataaaaaagaaggtggactggctgggcgtggtggctgacacctgtaatcccagcactttgggaggccaaggtgggtggattacttgaggtcaggagtccgagacgagcctagccaacatggtgaaaccctctctactaaaaatagaaaaaaattagctgggcgtggtggctcgcggcctgtaatcccagctactaaggaggccaaggctggagaatcgcttgaacctgggaggtggaggttgcagtgagccgagattgcactactgcactccagcttgggctacagagcaagactctgtctc

SEQ ID NO: 724377 - DNA, 168 bp, Homo sapiens
gcgcagtgtcgtgatcatgggaagctgcaaggggtgccgtttgacatccactctgacagatgagactgcccagaggctgcaaaagactggctcctgttgagactgaccccagctggcgacatgaggcacagtagggcagtccggtgtatggccaggaacgaaggctct

SEQ ID NO: 724378 - DNA, 134 bp, Homo sapiens
agacgtcattcttgcatccggcactgtgctcttgatagggaatgagtctcacgagatctgatggttagaaaaagtggaagttgccctgaacaagctctcttggccggctacgcgagttcatgcaagaagggacg

SEQ ID NO: 724379 - DNA, 156 bp, Homo sapiens
ggcgaatcctccatcctcctctactcctgccatcagctccacacgcccttagccaacaacagctgaatcactcatcaaaccatcatgtgtcttcactcggcagaaaccaagggctatggacagaacgagtaaatattctgcacctcacacaaaata

SEQ ID NO: 724380 - DNA, 219 bp, Homo sapiens
cgaggatccatgacgaacaatgtgaggtctgtggagtcataatactgtgatctagtatggtcttagtcagctcagagacacaaagcttctaggtcattaggcaatgggtgggggttttcctaagcacccatagacctggtttctttactgagctcgtttttcttttggaatggagtaacctgggggggttcaaaagaaaacgaggtcgtagacagtctg

SEQ ID NO: 724381 - DNA, 120 bp, Homo sapiens
tagtattgaatctcgctcaccaccggcatcgtattggcgtaagtgaatctgacgggcagaggacagaggaagcttgcagatgtttcattatcagacgaagtcgggtcgagacgatcagat

SEQ ID NO: 724382 - DNA, 144 bp, Homo sapiens
gtggccggtggggggggactgcaaaccggaataatgaaccaggaagaatccctgatattcctgtatttcttccacaaagagccactcaaagggccccactaatggccccaccacgatgacacgaagtagccacaccacgagcct

SEQ ID NO: 724383 - DNA, 173 bp, Homo sapiens
ccttctacgtctcatcactgcttgttcggtgcggggaggggacttgggccgaagccgccccgaaccaggtgcttatgtgcctccaatatctgcaggtccggtagtaacatctgcatgacgttttagtggacgtcactcactgccaccctgtcccagtgatgagacgtagaagg

SEQ ID NO: 724384 - DNA, 822 bp, Homo sapiens
aattccctttagctatttatcgtgtatgcacatctgctggcagcaaattttctcaggtttgtttgtgtatttagtgttatgcttggttttggaggctgggttgacatgagacaaaagctctcgatcgtcaagaaaataataataagtaaagaagtatagtgtgcgctggatgcagttgttgttatttatttatcctgcttggggatcataaagcttgtatcagtggtaggaaagttctcagcctagtatttagtttaacgtagttccttctgccccatcttcctcccttcttctaagactccagtgacgtatgtattaggcctgttgcaccacttcccacaagtatctgaatgtacttagcatggtattgttccatactctttgtctctgtaagttcagcttagagtgaatattactgtcctgtattacagttcaacagaatgttccttctgctaaatctaattgtagttaacccatatgctaagtacttaatttgcacgtgactgtgatacagagttgttaaagtttccatttcattctttcttatagattccagttctttgatgaaagtctctattccacccatcaaagtctgtgtctgataacacaatatctgggtcataagtggctccgtgctgtagagtctgttttcccctccattcctgtttaagtgcaggggtcagatcacttaattgttgacatgctaaccattctcacttaaatttccaagtggctccaggcaaaaaatagcatactcaaggtgtaaaacaccaaaatgggtggaacggcccctggcccctcagtaaaagactttttcacact

SEQ ID NO: 724385 - DNA, 213 bp, Homo sapiens
taaattccaaagaccctatcacttgggccaaggtcctccactcaaaggggatccagtaaatagtggtggaagtaaggtacttacgacaattattaagatcaggaggaatagtggtttatcatccaggggttaatagtcaaatattggactttgggttacccatttaggggaataattcacctaaacacgccataaatctatttaacaagagga

SEQ ID NO: 724386 - DNA, 424 bp, Homo sapiens
atactgtagaagacatgataggtagctgtgccataataatcccagttatctacgaggaggctgaggcaggagaatcactatgagccctgggacatggagcgctgcagatgagccgaggtcatgccatagcactaccagcctgggcaacagagtgagaatccatctcaaaaaaaatcaacgaaggcatccaaggaaggcattggagaggtatcaagacaagtcagagtagagggacaaagatcccaggaagaagagcagttcagagcaggtgaagcctggattctggggcagaagccttcctacttatggcccctatccactaacaacaaatcgctaagttgagcagccagttaatatcttcaagaaattacacgacaatgagaactagagcttcccgctaaaaactgaagtttaggatgaggag

SEQ ID NO: 724387 - DNA, 911 bp, Homo sapiens
ggtggggcagctcggcagcatggcgtccgtgacgctgagcgaggcggaaaggtgtacatcgtgcatgggtccaggaagacctccgtgtggatggccgtgctgtgagggactacccgatgtgtcgaacgtgaaagactgatgtgggtgtcccaacacctagtgggtccgccagggtcaagcctgcgtcacacagacaatcttggtgggagtggaacagcagaaagttgcgggcacgccgaaagctgggaagaaaccaaatgaagggctacttggagttctttggggtgaactgttcacgccagttgctaccccctggaaattgaagggtacaaggacggtgattgacccttgggccacccgagatccggctaaagacctctcatatcgggatattttaaaaccaaatgaaacaggcagtgtttcggactttaaaagggacccttcttgatttagtcccttcggggcagcccacgtggcttggggctccacttaattgtgggacatggttgcgtggctatcgtgggcaagtgtgggtgggcacaaaatttggtttgcgactgcccatttacccaattggccttggtacacagggcctggccttcttctttcaaagtaacaaggggattaccccaacgggggtccgaaggtctcgcagcagcgctgaccacgcacgggggggccccgcacagggcaccttctggacctgtgttgcacgatttgaccccttttatggactggtgttccgaactacaggtgttgggcgacaattgtcccccgtgctttgggtccctccttgtgccacgactgggggttatccggcatggtgggcggatgctactccttccaggagggaggccttgtcggtgggccgttgggggggtcggtgaccccaaggggttgtgccgtgctta

SEQ ID NO: 724388 - DNA, 749 bp, Homo sapiens
agcggctgtgattgcaggcgcgcgctgccacgccggactagttttcgtatttttttggtggagacagggtttcgctgtgttggccgggctggtctccagctcctaaccgtgagtgatctaccagcctcggtgccgggattgcagacggagtctcgttcactcagtcctcaatgttacccaggctggagtgcagtggcgtgatctcggctagctacaacatccacctcccagcagcctgccttggcctcccaaagtgccgagattgcagcctctgcccggccgccaccccgtctgggaagtgaggagcgtctctgcctggccgccaatcgtctgagatgtgaggagcccctctgcccggccgcccatcgtctgagatgtggggagcgcctctgccccggcgccccgtctgggatgtgaggagcgcctctgcccagccgcgaccccgtctgggaggtgaggagcgtctctgcccgggcgccccgtcggcagaagtgaggagcccctctgcccggcagacgccccgtcggcaaagtgaggagcgtctccgaccggcagaccgcccgtccgggaggtggggggtcagcccccgaccagtcagcctcacctccggggacaggagatgggggacagtcccgacgcggacaagccaaacgctccgagacggcaaagtgcagcgccagcccgcgaacccggacaaccgcgccgactgggaggagaggtgggggcagccccgccagagccagcagacg

SEQ ID NO: 724389 - DNA, 997 bp, Homo sapiens
cgcggtggctcacgcctgtaatcccagcactttgggaggccgaggcgggcggatcacgaggtcaggagatcgagaccatcctggctaacatggtgaaaccccgtctctactaaaaatacaaaaaattagccgggcgtggtagcgggcgcctgtagtcccagctactcgggaggctgaggcaggagaatggcgtgaacccgggaggcggagcttgcagtgagccgagatcgcgccactgcactccagcctgggcgacagaacgagactccgtctcaaaaaaaaaaaaaaacaaaaaagaatttttttttccgggttgatcccttttgaggcatattccacttcgtggttacagacagcgaatgtagctctgggctattagggaacaattcacctcgggggacattttccagggcataattaacccttgtgctctaaatagagtcacgtgcgtcaggttacctctccacaaaaacacttctttgttggggaatctgcgctttttttccgccccacgccgcaaaacaggggattccttggaagatcctgaggatgaggaactcctgtgcaccgctttacccgagaaagccattcgctggccacgggatatggaggcgctcccccggcgtggtgtgaactctcacagccttaagggcaagcgctgttgaaaggccagaagaggacaccgtctggaaaccatctggcgggggttccaccccttggcggccaagcagcgagagagagcacagcgctggtccttctttaacgacgaacaacctgggttttgcacattgacccgcggtgtttgggtggcacaaaacccctggtatgtcccccaggaataaccacgagagagcttaaggcacacacgaggacccactttggtgaaccccaaaagttgggacgagttcgatgtgaacctggtgagtggccccagtgtattccacgtcggggacaacaaggtggaaacccttcttccaaataaaacaaggacagatgc

SEQ ID NO: 724390 - DNA, 587 bp, Homo sapiens
  misc_feature (54)..(54): n is a, c, g, or t
  misc_feature (178)..(178): n is a, c, g, or t
  misc_feature (456)..(456): n is a, c, g, or t
  misc_feature (572)..(573): n is a, c, g, or t
gggggtcatttaaattaaccctctgaataggtggccccatgtaaacaatatttncactgtaaattgtgaataatcatatatatatttataccccatggctaactttacactgaaaatttgcggcgtttttccacataggatgccttttatcagcagataattatccgctttttaatgngggggggggggaattactacacttgccgtaacaaaaaagaatggcacgtgactaaatgtgcattacctttcggatatacgtgctctcacatgaactgtgcttcctaaacattgagagttgagttgtggccttagtcattgactgaatgtttaactttctttcttgaatcaccgttaaagggaaatggggctttactgttaatgcctaaacaatatgctccatcctttcaaagggaacataaaaaattcgcttttgaaattaataacccccaacctaanataaaaaaatggaaggaaataccaagcctttattttgcacaagaaatctttctcatcccgaaccttggatacctagggcctttctccctatatcttttttaaataaatccttttgnngcctcttgaaactt

SEQ ID NO: 724391 - DNA, 1158 bp, Homo sapiens
  misc_feature (314)..(314): n is a, c, g, or t
  misc_feature (343)..(345): n is a, c, g, or t
  misc_feature (351)..(351): n is a, c, g, or t
cagcctctcacactctcctcactctctctcatctcctgtgaaccatgtgccagtacatccaccaccatcaggagccacagcagcagccgccggggtttcacgtgccaactcagccaggctccctggggtcagccgctctggcttcagcagcgtctcctgtgtcccgctccagggtgcagtggtggcctgggtggtgcatgtggaggagctggctttggcagccgcagtctgtatggcctggggggctccaagaggatctccattggagggggcagctgtgccatcagtggcggctatggcagcagagccggagncagctatggctttggtgcgccgggagtgnnnttggtntcggtggtggagccggcattggctttggtctgggtggtggagccggccttgctggtggcttttgggggcccctggcttccctgtgttgcccccccttggaggcatccaaaggaggtcaaccgtcaaccagagtctccttgattcccctcaaaccttgcaatttcggatccccaccattccagcggtgttgcggggcttgaggagccgtgaaccagattcaggacccttcaacaacaagttttgcctccttcatcgacaaggtgcggttcctgggagcagcacgaccaacggttctgggacaacacaacgttggaccctttgcttgcagggacgcaggggccaccaaagactgttgagggcatgcaccttgaagccgttgtttccggaggcagtacattcagcaaccttcaggcagccagcttggaccagccatttgtcggtcggaaaccggcggcccgccgtgggactcagaagctccaggaggccattgcagggacctggtggacaggacttcacagacaccaacttatgcggcattgacattcagcaagcggcccagaaggccgacagaactggaacttttgctgaccttcttgcaacgacgggccttgtgcattgcctggcccatcctttgaagcccggggttgaactgcgccagcccgaagcacgaccactcatcaccggcacggagaccacctttatgtagaaccccttgtgatagatgccaagacgagtccacaaagatgccaaccaccatttccaacccatctgtgttgggctgcccctgaaccaaaagcggaccgtgcc

SEQ ID NO: 724392 - DNA, 236 bp, Homo sapiens
cgtctggatagacgtccttgatagacgtcctggatagacgtcctggatagacgtcctcgtggagggacggtgctgtgtatcatcctatgtggtatactgttgtcattacttcacttaatacattgtgcttaaggaattgtgcttattgcgtagttcctttcgtaggacccttcttagagcagctcgtactgacgaagtgtgcatgctgctgaatgatgtcacggcagtcgttgaac

SEQ ID NO: 724393 - DNA, 325 bp, Homo sapiens
acggcttgaatgttgccatgagctctccagtccgtgctcgccagaaactcgagtctatacacacgccttgagttctttcaacctccgtagccatcttgcacccgctcttctggttctattgcatgcgcttctggcgcacgtccccgctcggccctgtctgcgcgcttaggcgcccctcaagacttcacgttacgaaaaaggacatacaagaatttggtgacccaaactgacagcgcacaggactgccgccttgacctaccattacctttccaaacatgaccgactgacaaagacactaaacgcagtatactatgacctccacctc

SEQ ID NO: 724394 - DNA, 112 bp, Homo sapiens
tggcttggagtagttccaggaccagaggttgtgctggttgtagaagcagaagttgtgctggtggtagtgaacagagattgtgctggtggtagtgaacagtggctgggagtag

SEQ ID NO: 724395 - DNA, 451 bp, Homo sapiens
ctaacaggctttgagcttggtgtgtataatctgctgaacaggttgtcgagcttggcttgttgggtccacatctgaggcagatctggtgcgtgatcagtctgccgcttaggcagatgttgggactgtagaggcctgagggaggcagaggctgggcctggaggggccaccaagatgcaggagctgggcctggagaggctgcaaagaagcatgagctgggcctggtgaggtcgacttgagaaagttcagggcctggagagaaggctgtgaggcaggagctgggtctaaagaggccattgtaacgatggagctgtgcctgtggaggctgttgtggggcagtaggctcatctgcggagactgccgtgacgtagggtatgggcctaaataggccattgtgagtcatgggcttggtctgtagaggctgattggagaaagttctgggcctggagaggct

SEQ ID NO: 724396 - DNA, 196 bp, Homo sapiens
  misc_feature (130)..(130): n is a, c, g, or t
tgctggtctctatcaggctacagagaccctgatgctggaatagatgaagctcaagttgaacaagatgctcaggctttatttcaggccggagaacttaaatgggggacagatgaagaaaagtttatcaccnatctttggaacacgaatgggggtctcatttggagacagggtgttggacaaggtacatgacttatat

SEQ ID NO: 724397 - DNA, 633 bp, Homo sapiens
atctgaggatcccctctctccacactggtacaaatcatggcatacagacagaagtctaaaaatggtaccacgagaatatttttttaaaaaactaaatgtgtgatacaaatatccagacgaattaaagagtcacgagagaaacagagatagcatataagatgtgacagtgtaaaatgggtagcgaatcaaagtgagacttaaatagaaaatatatataatcacctcatttctaccacataatttcagagtgtgtaatggggagcatttgagaagagtaggagaaaatagagatgagaatttatctcacctttaatactgtgaatactatatgggggggtccccgggtcagagcatataaatatcacacttaagaactgagcatggggcctttgagtaagtgtatatacaggatctgagtatttacacacatatcacactatagcaacctctcgtgaaaaatcatgaggatagaatgcgccagtgtgtatactatataaaaagtgaatagggggggtgtggggggtcatgcgtgtgatcccagcactttgggaggccgaggcaggaggatcgcttgagcccaagagtgtgagaccagcctaggtgacacagtgtgaccccatctctacacaaaaa

SEQ ID NO: 724398 - DNA, 581 bp, Homo sapiens
  misc_feature (515)..(515): n is a, c, g, or t
  misc_feature (518)..(518): n is a, c, g, or t
ggacccgaaggccggggcgtctgtgacccccaactgggaggaggggaggaacgcaatgggggctcccatcccagagcggggacaaaaaccccgggagaaactcaaatacaggggcattggaaccaattctccgcccccctcccccagggaatctctcctgtcagccagcactgggcaacctgggccctgtataacctcgtgtctgtctacccggacaagaactcccccctcctgatcaaagaagggggatcccccttctgagggacataattaagatggcgaccgcacggcaggagaccaaggaaatggcccgcaaggtgattgagcactgcagtaactttaaagaggagaacatggacacgtctagatagaggcccccgtccccatggccgccaccgctctggaccacaggcggggattattctattatattgcacccagcgggcgggctccttccgagggagcctcccacggagtgaagagacatgggggatttttgtacaactgacgctccnccnaaattttttttttttatattttttttatatatatatattttttttttggttaggaagtgtgaa

SEQ ID NO: 724399 - DNA, 837 bp, Homo sapiens
  misc_feature (24)..(24): n is a, c, g, or t
  misc_feature (66)..(66): n is a, c, g, or t
  misc_feature (77)..(77): n is a, c, g, or t
  misc_feature (83)..(83): n is a, c, g, or t
  misc_feature (85)..(85): n is a, c, g, or t
  misc_feature (92)..(92): n is a, c, g, or t
  misc_feature (94)..(94): n is a, c, g, or t
  misc_feature (96)..(98): n is a, c, g, or t
  misc_feature (104)..(104): n is a, c, g, or t
  misc_feature (181)..(186): n is a, c, g, or t
  misc_feature (240)..(240): n is a, c, g, or t
  misc_feature (294)..(294): n is a, c, g, or t
  misc_feature (336)..(336): n is a, c, g, or t
  misc_feature (349)..(349): n is a, c, g, or t
  misc_feature (361)..(361): n is a, c, g, or t
  misc_feature (364)..(364): n is a, c, g, or t
  misc_feature (366)..(366): n is a, c, g, or t
  misc_feature (379)..(379): n is a, c, g, or t
  misc_feature (381)..(381): n is a, c, g, or t
  misc_feature (389)..(389): n is a, c, g, or t
  misc_feature (399)..(399): n is a, c, g, or t
  misc_feature (404)..(404): n is a, c, g, or t
  misc_feature (410)..(410): n is a, c, g, or t
  misc_feature (426)..(426): n is a, c, g, or t
  misc_feature (428)..(428): n is a, c, g, or t
  misc_feature (432)..(432): n is a, c, g, or t
  misc_feature (450)..(450): n is a, c, g, or t
  misc_feature (462)..(462): n is a, c, g, or t
  misc_feature (483)..(483): n is a, c, g, or t
  misc_feature (500)..(500): n is a, c, g, or t
  misc_feature (507)..(507): n is a, c, g, or t
  misc_feature (524)..(524): n is a, c, g, or t
  misc_feature (538)..(538): n is a, c, g, or t
  misc_feature (573)..(573): n is a, c, g, or t
  misc_feature (601)..(601): n is a, c, g, or t
  misc_feature (660)..(660): n is a, c, g, or t
  misc_feature (827)..(827): n is a, c, g, or t
ggaaaacatcctcctcgccaaacncggcttcctcctcctcttcctccccattctcattctcacgcntctccgagganttcttnanagtcctnanannnacttcntcgccatccgcgttaaccaggacggtgcggaaatctcgcccgtgccccagctgctctggcccttccaaaccaacttnnnnnnggggctgtgggccacccccgcaccagctgcccacaccgtgaccatctggccggngcgcaggatgtacttgggcgtgaacttgtaggcgatctcctccccctccaaganctgcctcttgattctccagttccccagagactgatccttgtncgattttttcttnatctgcacaaanttncnctctaggtcgatntnctcgatgntgatgctacncgagnacgagnactgctgggccagttntnattnaccgctgccacccgtgcncgttcccaggantcttgttccgctgcccaaggnctcctccacctccagcngcttccncttactgcggcccaggngcccggtggcgganaagctgccgctgctgctcgaggtggctcgtgaganggtgacgcgcgaggatgggctggggganagcttcagcctctcctcctcgccctccaggagcttccggtaggcgttgatctccatgtncagggccagcttcacgtccagcagctcctggtactcggccagctgctgctgcatcacgtcccgcatctccgtcatctcctgctccttggcgtccagcatcttccggaacttgtcccgctccccggccatggcctcctccagctcccgaatgcgatcttcagcggcantggcctgctt

SEQ ID NO: 724400 - DNA, 242 bp, Homo sapiens
ccaaaatttttgggtttttttttaatttgggggaattatggaaaggggttccccgaaaaaaggttgccccccccggggttaaaaaagggtttttttgggggggttggggggcctatcccaaaaaggggggaaaatttttttttaccccccccttgcccaatttttggatggaagggaattttaaaggtgctttttttgggcctttaaaccccggccgggtttttccccaattttccccccca

SEQ ID NO: 724401 - DNA, 243 bp, Homo sapiens
ctcatcagactgcgcccgtgtggatgaggcgggggtaatccgtgtgcaatggtgacagcgtgggatacatgctctcgtcactggctagccgtggaaggtgcagccgtcagaccaagttggaaaagtcatctttgagcagatcctacagatccgcctcacggacacgctgggcaggctctcgcacatcctggagatggaccacttcgccctggtggtgcacgagcagatccagtaccacagcac

SEQ ID NO: 724402 - DNA, 514 bp, Homo sapiens
ttagtgcactaataaaatactgctcagcaataaaaggagctaactactagatacttgcacaagcaatgttcagagcagtatcatttcatagtagccaaagggcagaagcaacccaagggtcaccaagcagataactggataaacaaaatgtggtatatacatacaatgtaacattattcagccttgaaacggaaggaaattctgacatatgctacatgcatggatgagccctgaggatattatgctatgcaaaataagccagtcacaaaaagataagtacactatgattccactataaggtatctaaaatagttaatttaatagataaatcatcgtagaatgatggtggtcaggagcggctgaagaaggaagatggtggagtagtgtaatcagtacaatatcagtgttgcgcgatgagaaagtgctatagatctgcggtgacaaattggccaaaatcggggaacccctaaaatcgaactggcgggcttcaagcttgggcaactggcccgtcgta

SEQ ID NO: 724403 - DNA, 1590 bp, Homo sapiens
tatcttgtttcagtgttaatcacagtgaaatatacttttcaggataacattttcaaatggagcaaatatcgttacagattgatggcatagcctttatttgccttgtcaacattaaggtaggaagacttctgagatacaaatgtcagactgacagtagtgactcagaagcagaaattcaaaaaatgcacttgctgtaaattctgctacactgcccagggcacttcttggtctgtatgtgtaacatgtattcagctattgtaaagtttctttaacagtcctggaagtactatgacagtaacaaggaagattgatagcagattccatgcctctttgttaatcacattaagaactctgcttggtactctttgatgttgtgtctggaaacatacatccccaccacaccatattgaaaactttcatcctattacccatctgctgccagcaaatgatcagtttaaaggcaaaaaatgggtgatgggggtgtgaaagtcaaagatttgccaagcataccgtttttctactactcattcttctaattaccttttgggaaatgagagaacctaaccatataacattttgaaatgtttccttagggaatctgaataatattttatgtagcttgagttacatgataatgacaagcatgtcttcaaacattagaattaaacccatggatgtggcatagtgcctgttgtttttcatcataagagtttatgataaaactgagtactggagtctgcagtttataaaaagatgtttccttctatttagctggaggagtttcttatactggtggattggttcccagcgcctacagtcagataaataaaaagttgcagcagggggaccaactagtagggagtacagtcagataaataaaaagttgcagcagggggaccaactagtagggagtacatttcatcggttggagagaggaaatttatttcttcaattactttagaacatctgcatgttacaaagaggaatgtgcattaacacaattaaccatttcttttttttaattgaattcatggattcattcctaagttttctaatcagttttgctctggtgtcataagttaagggagaatccataccaaactaattttcctgcataaagagattacttggataatagattttttccagtgcttttggaaatattgagtctaataaaataactctaacagagatacaattattcatatcagtaagttgttcatcagaaatatttcacaaagactagacctgaatctaaattggaggcaaaatcattcaattcaatagagcagttgcacttttctcatatagtaaaatgaccagttgcacctagtaaacagtacagcacaacccctaagtgcaggggatctggaggcaaaacatgagggtcaaagcctcactgtaccactttccagctgtgtaatcttgggaaagattcttcatctgtaaaatgatgcttaaaagctatacctgacttttaggattgttgtaaacattaaatttgtaaatgagaatgatcttataactgtacatgttaaccattgtttaaacctatatgaataaaattctagatgagtcaaaaaaaaaaaa

SEQ ID NO: 724404 - DNA, 1103 bp, Homo sapiens
acgagctgcaattgtcagtggcatcatttatcgggggccccacaggcagtgcgtcttcatgggtcctcctgtgctcattcacattcgctgagatgcctctcaaacacagctgttctccacgggcccactcagtggatttcactgggtctcatctgtcccagtttgcgttttccaaaagcgttattccctttggcccaaaaacaaaacacacaaacaacaaaaacaacaaacacaaacaaaaacaaaccacacaaaccaacaacaaaacaaacacacacaccacaaaacaaacaacaaacaaacacaacacaaacaaaaaaacctcgagcgggggggggccccggatacccaacattcggccctacatacgtgaagtcgcactcaacaacttcacctgggcgcgtccgttataacaactcgtcgcatgacctggggaacaacccccttgggcgtataatcccacctcattaaatacggcctttgacaggcaacaatcccccgctatttcggacaggcgtgggccgattagcggaagaaaggacccgtaccccgaattctgccgctttccaccaacatgtggtgcgcgagccctgtacttggagaacagtggcgacactatgataagccggtccaataatatcgggtcgaacacatacagcgtttagaaattattggtgttaaactcaagcgtacatactgtttcaccccactttgggggcggaacactcggccataacattcccttttataagaatcacgcaggcgcttcgaacccgcggcacagggagtgtgccgattgtgttacccccctgtgggaatcacccgagggccccgctatcttacgcaacacggtggagcccccccacggtcacagccggcgggcaaagagccgtgctcatccgcggagcgggtcgccccatacggggaggccacacacgccgcatacaccggcatctcgcggtgtccgaggtggcggtacaggcctaattccggacccctaagggaagccccggatttatagctgtacgtgccaactccgcaccgtgtgtacagcgcagggaacacaactaacccgatgcgggcagcagctgcggctatcaggc

SEQ ID NO: 724405 - DNA, 264 bp, Homo sapiens
cccctacccccgccgtcgctaggagacgccggaagtgggggaggggccggcggcgcgggcgagggtgggaatctttttcgggctcccgggcgcggagaggaagggacggtgcgcgcgcccggccggccgtcgccgcggtgaccgtcctcggagtccgtgcgtcgcgccccgcccccgtcgccccctcccctctcgcgcgctggggctgtttctcgctccttccgagttaccgccgccgtcccgccgctcctcctctcccggtcc

SEQ ID NO: 724406 - DNA, 180 bp, Homo sapiens
atgggcagcggcagggttgggggcatgtcttgcaggctcatctagtgtccgcctttcactccactaatgctgtctcagtgttttctctactctctactattcgagcttgcactcctggtaccctgaccctggtgcccctggccacatcccgatgcctggggggccaagtggaaacgaaga

SEQ ID NO: 724407 - DNA, 114 bp, Homo sapiens
tgatggcgtgtggcagtttaaagttattagttttaaaaatcagtactttttaagggaaacaatctggaccaaaaattggtcacagaatttggagaccctttaaaaaagttaatt

SEQ ID NO: 724408 - DNA, 396 bp, Homo sapiens
cgtcgacagactgtgaatcaggccttcatggtcaaattgctgcaaagaaaacactactaaaggacaccaataagaagcagagacttacttgggccaagtacacaagcaaaggacattcgaccgatgggaatctgccctttggtctgatgagtccagatttgaggtttttggttccaactgcctgtctctttgtgagacgcagagtaggtgaatggattatctctgcatgtgtggttcccaccatggaggaagaggcatgattgtatgggggtgctttgctggtgacactgtctgtgacttatttagaattcaaggcacattttaaccagcatggatacctttcacgtttattccctctccggcgctcgacgttgccagtttactcatcgtcgacgc

SEQ ID NO: 724409 - DNA, 139 bp, Homo sapiens
tcgataaggccaactaggggtgatcttccagttgctggagagaaatgtggtaactggagtgagagagtaggaacaggtcatgttcaggttatcagggccaagggtcctaaaggacttagcttgtgttggccttatcgag

SEQ ID NO: 724410 - DNA, 779 bp, Homo sapiens
  misc_feature (172)..(172): n is a, c, g, or t
  misc_feature (570)..(570): n is a, c, g, or t
  misc_feature (580)..(580): n is a, c, g, or t
ttaagggattgaattaaagtgataataattcgccatcagtcatgttggccagaaatgtgtaagttgtgatttctatgaaagagtaaaggaattaggtatatgtgaaataaaagttaaatttctgtggtaaggcaagtgagtttcatttaaagtaactcatttttacgggatntgagatttaaaagtgaaattaattcattttgcacagtgtagtcatggttgggctctgagaaaatgttgtaaagctgaaattatttatcttgtgggaagaagtgagaagaaactacaatgtgtggtattatcaagagtttacatttccggggtaaatataaatgagtttcctttaaactcatttttgtggaatttgaggtttaaaagtgaaattaattttgtagaatctagtcatggttgggctctgagaaaatgttgtaaagctgtaatttatcttgtgggaaaaagtgaaaaggaacttaaatttatggtgttatcaacaattggccaggcgcggtggctcacacctgtaatcccagcactttggtaggaccaggtgggcaaatcacttgaggtcanaagttcgggnacagactggccaacatggttaaacccagtctttactaaaagtacaaaaattaactgggcatggtggtgcaagcctgttacgctaacaactcgggaggttgagggagaaaaatttctttaacccggaaggcaaaggttgcagtaacccgagatcatgccactgcactccagcctgggtgacaaagtaagactttgtctca

SEQ ID NO: 724411 - DNA, 360 bp, Homo sapiens
  misc_feature (169)..(169): n is a, c, g, or t
  misc_feature (173)..(173): n is a, c, g, or t
  misc_feature (250)..(250): n is a, c, g, or t
  misc_feature (291)..(291): n is a, c, g, or t
  misc_feature (293)..(293): n is a, c, g, or t
acatttcacaccagtgactagttgaatcccttgtaacgtagtagttgtctgctctttgtccatgtgttaatgaggactgcagagtcccttctgttgtgattcctaggtcttttcctcaaaggaaatctggttttctcactaccggttgactggaaagcagggtacactnactnacgttttatgacttattgtcgggctagatctattaggatcatataacaagtaaaactgtcgtaccacaaaacagtcnaacttctgttggtgaggttgagacaattgtagtctcatttntnacattctgtcattagctattatcatctaacgtttcagtgtatcctttcagcaataaagcagcatatg

SEQ ID NO: 724412 - DNA, 239 bp, Homo sapiens
ctcacatattgtggctggctactcgtgctctacgtggcacaatgctatatattaaaaagaggtggctgggcacagtgactcacagctgtaatcccagcaccttgtgaaggctgagatgggcaggagatcgagactatcctggccaacatggtgaaaccctgtttctactatggtgaaaccctgtctctactaaagatttaaagatttactctagctaaatctaaaaactggttgggcgt

SEQ ID NO: 724413 - DNA, 1049 bp, Homo sapiens
cccatgaaggcccttctcacgacggtggaacaaaatgagcatcagccccgatcgtcgcttctgcagagatatagcaccctcacactcgagccgtgccctcgacagccttaccagcagacacacaccaacacagcgtaggaccgcccacatcggagcggcctctatgcaccgcactcgcaccgatccaccggaagacaccacagcacagagcgggcaagcgccaacgcaagtgccgacatgacccagtgccaactgcccaacgccgggcgtggcaactaaagtgcaaaacacacacaccccacagtgcggccaaccttggcggcgcgctcaccacccacgcaccaccgggcccaccaccaccctacgaacgacggcagcgcatccagcgcacgaccactacgtggacgagcatccaaccgcacagcgagatcgcaacccgcaagacgaccacccccactgaagagacagacacagaagaccagcatgccctcaagacgaaggcacgtcgccgccaccacacgaaaggcgaggaggtgcaacccaaagaacaacgagccgccctcaaacgactgtaaggtccccagcccgacccccccatccacaaccaacgcgcacctgtcacacagctgcgtacgtgaaacgccacacagcacatcaccgcccgatcctagcgacccgataccacgcaacccacacacccattgcgtcgtgacgtggaccacgaacatgcaacggaccggccgcccacaacccccgcgacctccactcgccgccagcaccaattcacccaactcaccacagagcacgacagaggtcccacacgtcaacgctgctacatcacaaccagtccaaagccacaccaagccaaggcaccagacccaagagcatctgcatcgcgacgcccaaccgcctcacaagcgcacctcccgcaacacacgagcgtcacacgaccacgaccgactacacagcacaacatcgcgaccaccatcgctccacgtcaccgtgacccccctcagaccgcgcacgccacggctggaccgacacaaacc

SEQ ID NO: 724414 - DNA, 368 bp, Homo sapiens
tcggccctcttaatgtgtgccatttgaaaaataaattaccctttaaaattttctttttctttttttaaccaactgggtctgtgcaagaattatcctgactgtaagtgtggattaaaatagctgttaaaaattgtcatcatggctgggcacagtggctcacctgaggtcaggagttcgagaccagcctgaccaacatagtgaaactccatctctgctaaaaatagaaaaattggccggggatggtggcaggtgcctgtaatcccaactacttgggaacttgggaggctgaggcaggagaatcccttgaacctggaaggtggaggttgcagtgagctgattgtactccgtcctgggcacacattatggag

SEQ ID NO: 724415 - DNA, 749 bp, Homo sapiens
gaccttgtttcacaaccttgtaaggctgctttgtacagcctggaaggaccgcttcccagagtcgagtcttggcttaatgagagggggaggctcagagactcaagaagcctttggagtttgagtgcaaatgaggtcagtggccttctctctcctccacgtgcaggaggccatcatgaagcctcttgatcacaagaacctggacctggatgtgccgtactttgcggatgctgtgaggtgggtgtcactgtctggcctcgggccgcagaaatgaagcacattagcattgtgattgtcatgtgattgtaatttctaaaatattgctgtcgtggtagattttgttactggaattcatgttttatctatgtattaaacctgaaattgtgttcattatttgtattttgagcttctttcattctttttcttcagcacgacagaaaatgtagctgtctacatctgggaaagcctccagaaacttcttccagtgggagctctttataaagtaaaagtgtttgaaaccgacaacaacatcgtagtctataaggagaaataggtcttagggttgctattgtagacaggcacatttcttttcacacttgaaaaaggctttgtccttccagagttcgcagcagtcaccacatgcttgtgtctcccctgttctgtgctagagtatccgagcattaagtaatgtaagggccgtatttgatgttttcgaatccaactttcaggggttctggcagtgggtggcgcgc

SEQ ID NO: 724416 - DNA, 270 bp, Homo sapiens
ccccagggtttcccccccttaaaaaaggggggcccgggggtttttcccaaacccgggggaaggttttttgggttaacccaaaaaaaaaatccggcctgtgggaaaaaaagcccccccgttcccccggccgggccgtccggggtttttagttttttccccccggttttggaaattttggggaaaaatgtcccccgggggttaaatttccccccgaggggggggggggtttcccgcttccccccccttaggggcggtttttttttttcccca

SEQ ID NO: 724417 - DNA, 749 bp, Homo sapiens
  misc_feature (497)..(497): n is a, c, g, or t
tctaccatgtatctcgatcatgtgctgactctatattattcatggtgatatgtagtccctggtaagctggtatttatataggtctagtgtagtgtctgtacagggcatatcggtgctaggatacatgtgtatctggtcttggtctagtgtaattattagtctgtccttgctgcgtctggtcatggcgttcatgctctttacattgtcctcacggtttgagtgtcctactaatcctaggcacctagcttgtcagctgctcctaccgtcctagcctggtctagtatgccatgctgtgtactataacgttctctgtggttacctgtactcatgctaggactatccagtatgtggcacaagtcatgtccactgtgttcctatataaatgtggataaatgtacctagatttgtaaatgtgtttaaggctagcagctttggtagtgggtgccatggcattaatactgtccctcgtatagccagtctagttgttagagtactgnttactactatgcgcatagctcactagcagatacatagcgctgtatggatgatagtgacttatatcataggaatactattgtccgtagatactgaaagcactaataggcagacaagtacgaggttgctgcggaggtggcgataactcttggatcctatagtacagttggctgtagctgaggggtacccctgtagcccctaaggcaagtacgagtaagacctggtatagagtcacttataagcggtattacttt

SEQ ID NO: 724418 - DNA, 208 bp, Homo sapiens
tgtccaaagcgagtacccaaatgctgaaatactagtgaggggtcgggtgtggtgacgcttgcctgaaatcccagcactttggaggccaaggcggacggatcacttaaggccagcatggtgaaagccatccctactaaaaatataaaaattagcagggcgtggaggtgcatgcctgtagtcccagttacttgggtactacgctttggca

SEQ ID NO: 724419 - DNA, 1059 bp, Homo sapiens
tttgtcgtggggttctgggtttgcctgttgtcgcgctttgtttgttgacgtgtgcccctggtcagttcacttttcggtgtattcccccttagtccctgtgtgagtttgtattctggtggggccaagaagggcgtttgtggaaggtatttcttcgctgggtgaagccggactgtgatgttgtaatgggacgatgctacttggttgtggcttggtaccgatcgttataatgtcgatttggatctgtgtcactacctattttatctcgccatgccatttgaagctggtagaagtatttacctggagttattatgttaaggctcagcttctgggattttcacatcttgcaactgtgtgatatacttcttctcgcagggcataaaggatcccgatttgcatatggagatggctccaattcgcagtggtcagccatttagaatgttagcagcacagaagcagtgaagttaaatacttatatatatgttaaatagatgtatatcgcatagcagggtttgatagcacctttaactagttcatgttccaatattacagctttagagataatgcgcaattttatgtgtatgccttaagtcccaaaaggtgaaacttttgaagattggtttgtgatcttttgtgttaaaatagactcgatacacctataacctaaatgcccccttatatatatgagaaatgatggagaaggaaataagtgatggttttttttgtcttgcaaatgttctatgttttgaaatgtggacactgacaaaggctgttattgcattaggtgtagtaaactggagtttatgttaaattacattgattggaaaagaatgaaaatttcttatttttccattgctgtgtcaatttatagtttgaagtgggtttttgactgcttgtttaatgaagaaaaatgcttggggtggaagggactcttgagatttcaccagagactttttctttttaataaatccaaccttttcgatgatttgaggttttatctgcagttttggaagcagtcaccaatgagacctgttataaggtggtataaccttcttggcgttc

SEQ ID NO: 724420 - DNA, 968 bp, Homo sapiens
  misc_feature (439)..(439): n is a, c, g, or t
tgccgtgtattcctttttgcttctttctgtcttttgtgcctgtgccccaccgtgccgggtgagccttcagggtgtgccctctgttctgcgccggttccgcgtgcctgtgcctgccttggacattttgcgtctgtcggtgtgggtcctggtctcttcccccggtcgtttgctgccctttcccttgctctcccctgtgtacgttgtgtatggtttttcttgggctggagtgctttcgtctatacttctgtgtgcctactgtcctttccttttacgacggcatatttctttctcatcattctaccttcgcctctgcgcttgacgtgtgcttactcggaatgtcaatctccacttaggttggtgtaaaattgagtgtggagtgaactggagtttcttttctgtggcctcgaaagcatgtcttgcacctgttaatggttacacnccaagtggccctgatacatcatctgtatggtgaatagaccgtgggggacacacgtggaccaacataatggccttgatctcatgagagaccgtgcatggtcctctgttagagatgcgcgttatgaagtgaatagtccttcataagggatgcattatgagatcctttttcaatacagcgactgagtgccagcttagtattgtgatgccccttcccagagccaggttatggattccagggaaggccgcggattccggtccttggaagaggcaggatcctggagcagttttgtgaggcccctttgtgtctcccacacgacctccctgggtggtgagtgtacatagaagactttgcctctcacgaacgacatgtatgtgcggtcatttttgttagagatgagaataaggattgagaaggataaactggaatcctggtaagatgcctatatgccagcccgacacctgctgtaattggggtgcatgagctatggagtcagattagttgttgggagggggaatccaagagtctatgt

SEQ ID NO: 724421 - DNA, 271 bp, Homo sapiens
atttcccacttttggataccaatgaccccattcataagttcgccttcaatactttgtccctggatgaaaagcactcatctcctggtctgacatccaaagagtcactcatcgttcaaataaatactgctcatggattcatccttattcacgtggacaacacaaaggttaccatgaaggaaatcatattgaaggcagtgacgcgaaaaaaaggatcctagaaagtttcacgccataagtaccgcctgtagaagcagagcgagcccaatgtcgc

SEQ ID NO: 724422 - DNA, 936 bp, Homo sapiens
ggcgttgttggtggggttacacgcgggttcaacatgcgtatcgaaataggtgtaatttgtgttcggggccatctatcctgtgacacggcatgatgttcgtccgagatgatgcgaggtgtccatgatttgcaaatctacttgtcttaaacattttacaaagagagcgcaatcctcgcgaaagttaggtggaccatgagcattccggaaagcagctgggtaaagagctgtacgagtggataattcacttggacatttgccaaaaggtagaaatgaacctatcaaataccagcgagagctatggcaataaaactatggatgcgatgaagagcagttgaagatgtcaatcagaggcgccaaagctaaaattgagtaatgaaacagactcgtactgacacaacatacaggagctacagaaagtgcaggatgtcaatgaagtcatgcaaaaatccatcttatgcgagcccctcttgcaggtcgacgggacacagtttggaagagaaaatggtccagcagtttacacagaggatgtggcccatggaagatgcgccttagagatctctgtaaccatttcttttgatgtccatttttgagagtggccttggggtactggaacgctaccttatctgatgtcttacataggtcacttaaatgcaagggggattgcacgaaatctttcctgattggcatctacatattattccgatattacggggtagagtgctctcaggttacatcttgctggtgggggacctagggagaccggacatctcatggactttgaaggatgggcgcaacggcggggttgggaatggccgcggctggtgtgacaatggccattgggcggggtacaacatctgcgggaaacctgtgatgagggacaagacaaggggggcgcaaaaattcggggcgtaacaacagaagaggggctacaagaaa

SEQ ID NO: 724423 - DNA, 447 bp, Homo sapiens
aaggcaggcagggtaggtcaatgtctggaggctcacggttttatagactaggggtccccaacccctgggctacagaccggtaccagaaccgggccacacagcaggaggtgagcagcaggcgagcaagggaagcttcatctgtatttacagccacccccccattgatcccacagcagcctgagctccgcctcctgtcagatcagtggcggctggagattgtcataggagctggaaccctatggtgaactgcgcatgtgaggaggttgtgcgctccttttgaaaacctaatgcctgatctgtcgttgttgcccatcacctccagataggactgtctagttgcaggaaaacaagctcagggctcccacggatcctacattactgtgagttgtatatttcactatatgttacaatgtaataataatagaaataaaatgtacataaatgtaa

SEQ ID NO: 724424 - DNA, 109 bp, Homo sapiens
ccttgatcccctcctgcacagccgaagtctgtgatcttaatgtgcccgtcttgtacagcatgaggttctccagcttgaggtcccggtgcaccacgttttactacgtggt

SEQ ID NO: 724425 - DNA, 382 bp, Homo sapiens
ggaattctacacatagttaatagatgtgtcaagctacctcatcagtcatggtttgcattgtccatttcccgtaatgacgttcagcagtcttttggtgtgctcatttgctatcagcttaccttctttattgaagtacctatacaaatcttctatttttgtttatttgcattttattgattggaggacatcgagtctcattcgtgtagcccaggctggacgtgcagtggcacgattctcagctcacgtgcaaactcgtgcgctcccaggtccaagcagtgtctcctgcctcagcctcccgagtatctgggactacagacccgtccccgcggggcatcctcctacagctgccctggccggcttgctcgctttgccactggccgtc

SEQ ID NO: 724426 - DNA, 425 bp, Homo sapiens
catgtccgcaggacctggagtgttggaatctcagctgtgcctgttccaacagctccgctcttcgcccagagccaccagtgtgtccactgcagagagaagccccacaccccttcctggctgcccatcccacctcacgcagctctgtggaccccgagtgtccgctgtgcaccagctctgggacactggaggccggcgatgcgctcccagatgggcttggccacaggactgtctctgcagcgggtgcccttacaatcaccaggaatggcctgcctgccgccctgcccagtggatcctccacacgccgaatgctctcccaccttcccaccgcttcagcacccaaagctgagatgaagcagggacccctcttaggagtcttatcccccacccccaagcatgaaaataaaggaaaatcttgagttatttca

SEQ ID NO: 724427 - DNA, 393 bp, Homo sapiens
tctcatcgatgtatggtcatctctgtgtcagctctcaggacatagagcagacgcatactgagccatgtcagtctacatcggcttgggctactgccatgatattcatcttgactgcaatcacactttgactgcttcactgggaaatttggtgacataaccctaattgtgcccgacttgtcttacccgacgtatccggccatactctagtatgtgtccaatgtcagacgacaatggttaggcttcgttagccattccagagatctaggtcgggcttgtcccgcgtccttatacggagttgcaccgctcgaaggccgatccaatagcagtcgtcgtgccgtcggccgggcactcgatacggctgtggtcgtgtcgtccgagaacccagcaatactg

SEQ ID NO: 724428 - DNA, 210 bp, Homo sapiens
taggcgtaccgcggagagatatgatcatactatgtgcccgctctattgctccccacctccaaatatctcatcaacaaccgactaatcaccacccaacaacgactaatcaacgtaacctcaaagcacatgctaaccatacacaacactgaaaggaagactccagatctctcatacaagatatgcttaatcacttattataagccacaatga

SEQ ID NO: 724429 - DNA, 609 bp, Homo sapiens
  misc_feature (21)..(21): n is a, c, g, or t
  misc_feature (225)..(225): n is a, c, g, or t
gtcttattttccaaggcaccncaagtgtttcatgtagcacggtcgatagggaaacggttttcttagtaccggatgtctatggctcggcatgtgagccgggcaatctcagacttggtggaactgtttgaaaaaaggggcttataggctgttcacagcccaaacccctatgggggcgtttcggtaggtcccagccctgagtttggggccaagtacaggaaaattacngaagatattgttttaatgatcagcaggcaaagattgtgggttgttccccctcccaatttggagaggccagtttccatcccagtgtccagccacaacagtttggtgtacagcaaccctgtcagttcattgggaaaccccaaccttttgccctgggttcccctttttttgaaaaggaatagtatgttttttggtgtaaaaaatcgccctccaagggcaggtaacacagggggtttaatggggggagccctcagttttggggcaggccccagtgcagggaaggggtatggcaatccccgaaactccccaggtttgggggtttccccgggtaatttgaacaagaaaaggcaagcaaattttcctccccctttcccccctttagagcca

SEQ ID NO: 724430 - DNA, 929 bp, Homo sapiens
gggatgactgcagaaaggggacagcgtcaagttccaatagtgtgtcctgggacaaaatgcacaaattatggattacaaaatcagatccctgcgcagggccgcagtggaatgtgtgatagatcagattgggtgtctgtcattaatctatgaaagtaggtagatagaatgatagctctttttccatgtgaaagaaagttcaggatggtgttgagctataggcaaggagatgaggtggagttcgtgctagtgattcgttgaatcagcgcatatggcaagtgagcgcctgtaagggttagggagtctgtgtaagggccctccagggttgtatgaagctctcgaactgatcggtgtgtcaagtcgtcttgaatgaatactcacctctgtgcatgatgccgacgtgtcatcgctcgtcggcctaatggtgtcttccgtcagcacaaggtggaagcctagatcactcaatggggttgtggtgccaggaaggaaggatctcgtcatagcttggtgtccaattgactagaccatcatccatcaaagcacaccatctaatccagtatgatcaagtcggtggaggaactcttggtgaagggtcggaatatctccctcttgatgcctccccgaaatgtggtaatacttatttctaggtgtagctatttaagacagtttaaaccttctggtcatgtttcatatctagttgttttgaaatcatttcaatatgtcgtgggctgggaaagtcaggtgctatagtataaatgtaggagctattggggattaagcgagggaagtgaacactgggggttggaaaatgagggagagggggcaaaaagagtataaatataccacatgagtgtggaggggcggcaaagagtactttgttaagagtgggcagagaaatttatataaaaaggtagttttttagtggtgtgggg

SEQ ID NO: 724431 - DNA, 132 bp, Homo sapiens
gcccgagccaaaaaggttgaaactatgtaaagggtttttatggaaattaccagttccaatattttaaaggggtaaaagggcttttttgtttaaaggaaaccctttgtaaaaaaagttaaatttttaagtcca

SEQ ID NO: 724432 - DNA, 167 bp, Homo sapiens
tgtcgttgtccagtgttcccaattccgagttcgatatgtctcgatgaagctgacacaatcatcgtatcattcatgaagttgatctcagtcatgagtacattctcagagctctgatagtcattaaaaatagcccccactcatcccggagacagctatcagtacgagct

SEQ ID NO: 724433 - DNA, 139 bp, Homo sapiens
cagagacgggacagagttacataaccctaggtgatctgtgcagagtctatgtcacaacgccccagtaggcagagcttagataaatgttacatcacctggtgaccagtgcagagatacgtcacaataccgtctgtaggcg

SEQ ID NO: 724434 - DNA, 362 bp, Homo sapiens
aaaagttttttggtagtcctcccataaacccacaatggtttgtaagatttacctcccaaccaagcacagctacaaattcttcatatgcttgacttcctccgtgtattgtgtaagaatgaagtgtttgtcttcttgtccttcagcaccataaaatactgcattcttgtgtgtctctgggcattgccttgaatccaagttcttaagttctctaagtacgcttttcatttttctctcagagagatgaaagctcctccgttgtgtcccaggaatctcattccatatattctaagaagctatctgcatataataaaatgctgtctgaggtttttgaggtagtggctcctcgtgttccacagctctca

SEQ ID NO: 724435 - DNA, 320 bp, Homo sapiens
attgttagtatgacggatgaggggtgggaggccccggttgtgtcacacagtggatgctaccatctacggcctctgtatgtggagctctgtgtgcgagatcaacaaggttcaggctgggctggaagttgttgtaggcgttctcaaggacggaatctgctctccctcagatactgggctttccagatgtgcgtcctctggaagatgccaggggtgccttcctttcgacactcttgaggcacatcatattgttccctgtgccgttttctctgggataggctgaataagatgattaggatgatcaaatgcgagcagaaggaccg

SEQ ID NO: 724436 - DNA, 328 bp, Homo sapiens
  misc_feature (2)..(2): n is a, c, g, or t
  misc_feature (40)..(40): n is a, c, g, or t
  misc_feature (109)..(109): n is a, c, g, or t
  misc_feature (120)..(120): n is a, c, g, or t
  misc_feature (155)..(155): n is a, c, g, or t
  misc_feature (186)..(186): n is a, c, g, or t
  misc_feature (266)..(266): n is a, c, g, or t
gnggaatcaactcctaatattccccattatcctagacccngcggcctgcgactcttgacgttgacatcgagtagtactccggatgagcccccattggtataatattacntcacagacgtntgcatctgagctgtccccacattaggcttaaaacngtgcattccggacgtctaaaccaaccacacnttacagaccgggggtatactacggtcaatgctctgaaatctgtggagcaaccacagtttctgcccatcgtcctagattantccctaaaatctttgaaatagggccgtatttaccctatagcacccctttacccctctagagc

SEQ ID NO: 724437 - DNA, 274 bp, Homo sapiens
gtatggtatcaaatagtttaggacaatgagagtagaacaataggatgctgtggcctagacttctgagtattaataaagaaaaagaagtacccttcggcctacagatcagagttttacttattttttattttttactttttattatagtttaagttctggggtgcatgtgcagaatgtgcagttttgttacataggtgtacaagtgccatggtggtttgctgcacccatcaacccgtcgtctacattaggcatttctcctagtgcaattcctcat

SEQ ID NO: 724438 - DNA, 554 bp, Homo sapiens
atttatgttttaatgttgctcttaattcctgtctgatgttgcccttataaacatctcttattctttcttcatactacccccaaaaatttctgctgcctcaagacttcaacactattttgttttatttttcttattaatataataattcagtaatgtcatgcctctgagcccaagccaagccatctgcatcccctgtgacttgcatgtatacatccatgatggcctgaatgtaactgaagatccacaaaagaagtgaaaaagccctgccccgccttaactgatgacattgcaccattgtgatttgttcctgccccaccttaactgagggattaaccctgtgaatttccttctcctggctcagaagctcccccactgagcacctttgtgtcccccacccctgcccaccagagaacaaccccctttgactgtaattttccattaccttcccaaatcctataaaatggccccacccctatctcccttcgctgactctctttttgcactcagcctgcctgcatccaggtgaaataaacagccatgttgctcacacaaag

SEQ ID NO: 724439 - DNA, 98 bp, Homo sapiens
  misc_feature (5)..(5): n is a, c, g, or t
ggccnaccgtggggggctggtagttaatcccacctgtcagagatgggcagcatagaatgaagtttatattgcctcagaaatgggagctcattaaaaat

SEQ ID NO: 724440 - DNA, 413 bp, Homo sapiens
cgcgcccggtcggcattgttttctgagtgcattcacggtatcatttcctcactgtggctgcttttgatgttgaagaggagccggtgtctgtccagcgtttctctcttccagggtcacctgtctcttccccaccgactgcctgttattgagacgttgtctttgtctttgttgttttgggtcacctctctcccccaccgtctgcctgttactgagacgttgtctttgtctttgttgttctgggtcacctctctcccccactgtctgcctgttatcgagacgttgtctttgtctttgttgttttgcagtttcattccaatgctccagcttcttgaatctcgggcagtctctctcatgtctttaggaaataagcagccactgtttgtttacgtgttgcccctgtcctgcttcctctg

SEQ ID NO: 724441 - DNA, 354 bp, Homo sapiens
aagttacgctcccaagatgtgacgtttattgcaactgaacagagacaggctgtgcggaccttactcaatcccgtccaacccccagcccctccccaagcccccgctgcaactacgccggcaggtccgcagagtgttgcttgacatcgcatggcggtgcccggagtcttaaaacaccggcagtctatggcgccttcagtcatggtaggggactccatagggcacgcccgccttttgaagccctaaatacagcttggaggcagcggaaccttcatagaggtcaaaagtagagcgaggacactgtcagaggcagaggctctggtctggacggtaccacatatgggcgggatttcatcc

SEQ ID NO: 724442 - DNA, 334 bp, Homo sapiens
  misc_feature (89)..(89): n is a, c, g, or t
  misc_feature (293)..(293): n is a, c, g, or t
ttgagtgaggacagaagaacatcatcctggagtagggcaaggagatcctggtgtgcgatgtgggcagactgtcgacgacccctacgccnactttgtcaagatgctgccagataaggactgctgtatgccctcttatgatgcaaccttatgagaccaaggcagagcaaagaaggaggatcctggtgtttattcttcttgggccccccgagttcttgcgccccttaaggagcaaaactgatttattgccatgctccaagtgacgccatcaatgaagaagcttgacaggggatcanagcgatgaattgccaagcaaacttgctacgaaggaggtcaa

SEQ ID NO: 724443 - DNA, 248 bp, Homo sapiens
tgcaggttgtctgcgaaacctgtttttgaccatatttattgattacatgttccattacacgtccacggcctcgtcatcgaagagtcgatatcaatatcgggcatcgatacacggtccaggatttatggaaacgctccaaaaagcaagtcgtatttaatatgggtcaactattcgtaattcctcagacaattatgcaacggcagaaaccctggtggctgatccactgaactgggcccaaccagatacgt

SEQ ID NO: 724444 - DNA, 509 bp, Homo sapiens
ccaatttcgtcatgtgtttttccctctccaccatttagatgagctgggctgaacctcaggtatggtgtggatgaagggggctggtctcttggtacgggaagattagattagcattttcatgcataccaaaaatggcggggtcatcgatcaaaggcagatttgcaaggtagtccttaaactctggtaggcggtcagccaggggtgcaaaatagatgcctgatacagagtatatataatcttcttctaaggtgccaggagaaaaattctttccaagatagtaggaaggcttcttgggtcccagtggtcggtgactctaccaccataagtaattccaccagtaatgtaaattagtgcatcccagggaatctttccttctttacaatagagtcggagattcagtaaagcacattcccggtcacggtcattcactccatagcagatatccaaccaggggggccaaacggggcggcagggaggtaaggccattgcctgtgaggagcaggacccgg

SEQ ID NO: 724445 - DNA, 1270 bp, Homo sapiens
aagtatactccaacccttgtattgttgtaacgagtgttgctgtgtttccgagatggagcgtgcccgtgtgtcagcccccctgttgctgcgatacagctgccaccgtgggaatattggggctctgttcttttcacccattggggctcacgagattttttctcggggggagcccccccttgttagggccctaccccgcgctgtgttgttgtaatctagctctcacatcccctatacactttgttcctggaggggaagattatccgctggtcctgtgccccaacttcggtggttcccacacccgggctgtctgttctcactcggaggggaggttccccctgttaatctccctcgcacgatgtgtgtgcccgcggttttctttttgggggcaccctttttagggggagccttctcacccttcgccccccccggagtagccgtcgggatataggctctcttcgttgagaggaggtctttcccagtggcatatttccccactgcggtgagaaaacaccacgtgtggacaatggttaatgaaccctacatacggagtgttaaagtgttgccttttggcggcacacataaggcccccccagctttctggcgagacctttatacgtacatgtgacccatcttctctgagagaaaattatagatagcctgggcgtctaatatgtgtggttatagaaactctcgtgggataaatatatgggagaccccttctgtgcccatatttggaggttaataactctccctctgtctttaagacttcagcaaaacgcgttccgacactcttcaagtgcgacattatagatagagcccacttctttttagatggcacccacgcacatgagaggtggagatctctcacacccacacttctttttccgcccagaagagtggttccatatattctgggagggagaggttaattacccataaataaaatatgtggaatataatggtgtagattttccccacaaccgcacccaaaacgcccgacgtaagagtggatattgtgccaatatttgggaggttaaaatgtctttgactcgcttaatcacgccacaataacatcacacagagaatatgcactacctaaatattaaatggaaatgcacgagtataatcttaacttggcactgagttttttcacgggagaggtgtgcttcacatttgagatttacttgtatgtagctcgggatcacattttctgttggttcaacctggttcctcagcttatatgatgggattataatatattttcgtgtta

SEQ ID NO: 724446 - DNA, 1072 bp, Homo sapiens
ggtaatggagacttagaagtcatgtagatgctcaataaacagaggggacgtgatggccattgatgggtacatgataaccgaagtgtacatcatacaaaaaagtgctttattttagagtagaacagcatgatatcccatgtggttagtccagaatagattatccagaagtgcaagcgcagtcgagccggctatgtctaatatctgcattgctccaatcgtgatctgtagactagaaagcgctcaaagaagccctcgaatcagagaagtggagttcatacccactgtaaaccattgccgcgtggccgtggatcagatgtccggccccactgaagacgtcactcccactccctatcgacgattggtttggctgtgctgctggggtgctactgtatcactcgtccgatggcttggttacttcaattttagccaaggaaggggtcgtaattggtccactctcgttcttactggaggctattcaagataaacctgtagagacttcatgaacaactggtaaggtaactaactaaaacctaagttaatcatggtcagtatccgtatttttcccttgtgttcaccagaacgctcaagggtgctttgggtgagaaagaacggactcatatagaagggggggaaagttagcgtgccccagtagaaccaggttggcggcaccttgtttccaggcaccagtggctctatggctagaacccccggattttgggcatgcgacagcggggggaacacccgacgtcccgagggcccgagacagacatggccggtcataagggataccccggtgttaggtttgacatagcgaaaattaggtcgagggtcgagattaataatgctgtattgaccagcatatgggcggctgaggcaagagtagacgcgtgaccacgggaggaccgtggcgcggcgactcccgcggacataggtctggggcaaggatgcactggctcgacccgagataacacgaaagatctgcgcttgtatgtgccacacacacatgacagaccctttctcactcgtcccatcaaaaattcccgggcaataaagctatcatcaaagacatctg

SEQ ID NO: 724447 - DNA, 781 bp, Homo sapiens
  misc_feature (472)..(472): n is a, c, g, or t
ggggatggcgcggcggattagggactgcggtcagctgcgtcacttggcggctgtgcggcggtccctgcgccctggtcgatgttcccgggcactccctgagtagctggcatgcttattccccgccctgctatgccctgccctgtgtccccgtgctcgctcgcatgtgctggcgctgtgcccggtgccccagctctgacgtcgtgcccgaccgctgtgtggatgtgcgcgctgcagggggcacgctggcccgggtgatgatgctgtgatttgcgtgggtgcaactcgcctgccctggggggccccctgcggaaggccggtgatgccggctgcgttttcgtcctgatgtcgctctgcccgtgcgcgcttgggattttgcagatcgagtgtcgcatcgcacaatcagtgggctggcttgggcgaaccgacgtggtggacaccaattccaaccaagtgaacaaacctgtggcctgtnctgagtgtgccattatcgctgccagcttacccttggtgtgaagcaaagccactcttgggtctccagtgggaacgaagacagcacgcttggtttgcttgaagctccgggccagccactagagtccggcggctgtttccccggggttcggttcccagccccggcacgcgtacttttctatcggtgccacaattggttgccggtttattcgcggggaacttttgttcacaaccgccttcgggcttcggggtcccaacatgcacctttgttcccctcggtctttggggacccatagttttgacagcgttgatc

SEQ ID NO: 724448 - DNA, 110 bp, Homo sapiens
tttacggctacgttgttctgaaatcaggctctgagttggtgggtttgcttgtagcttctagtgacaaggcgcagccagatggaagggagagggtccagggcttcctaaat

SEQ ID NO: 724449 - DNA, 327 bp, Homo sapiens
tggaattctcctcccagtcgtgagcagtggcttgtgatgctgctaatagcttcagaacagccttcactctgctaggagtaccagagtgcccacaggactcagggacctatttgcttgtttactccatctcgatccaggcactccaagtacatagcttcaggagtaaaaatggctactgacaatgagattaaaaaacacctctcaccctgtaaggatctcatatccacatgagactgttataacccttacagaagagaggacaccagttgggttatcagatagtcgctgttcacattgcaggctatcccatgacagggcacattatca

SEQ ID NO: 724450 - DNA, 131 bp, Homo sapiens
gactctagcggatccttaggtcagggaaggtgaagcaggaccatgtctgttggaccaatgtgcctgaaccccgggagagcggcggaaagccgggcgacggtcgcggggcgcgcggttgcgacgctgaggat

SEQ ID NO: 724451 - DNA, 225 bp, Homo sapiens
  misc_feature (166)..(166): n is a, c, g, or t
  misc_feature (214)..(214): n is a, c, g, or t
accttcagagagaaactgttagcagagaggagctgccgtctgctgagagcttcagagacctgcagacatctgaatgacttgcctgcagagaggagccactcttttcagggccttctctcagctgagagctgaacacccaatgggataattgcctacagagaggagnccacccactcctcttgagctggttccaacaccaatataaacttctttnttcacccttca

SEQ ID NO: 724452 - DNA, 180 bp, Homo sapiens
  misc_feature (63)..(63): n is a, c, g, or t
cagctctgaggtcaatggtagtcctgggttgtagtagaagtcttggagacaccccaaacttangggatcttttccaggatctcccaaaacattcgtgagaattttcaggtctcagtagataacaggttaacaggccttatcttgggactggttgcttctcaagaccctcaatttcttcag

SEQ ID NO: 724453 - DNA, 1118 bp, Homo sapiens
cgctgagaaccagagagaagccgggaatggaaactccaaacaccacagaggacgtatgacaggagcacagagtgcgactagtggggatgcaaactccgtgccacaaggtgaacgagagggcctttggggcccaagcgctggccccctctgtactccgtggtatgtgtcacttgagccgtggttggaaacatcctggctggctcctgggtccgttgctgcaatacaacgaggctactcataaagcatgaccagctatctactctcctgaacctggccactttctgacctgcttcttcctgtttcacgcttcccttctggatcgactacaagttgctaggactgacttggcgctctcttgggctgactgccagtgctgtaatgcactccttcttcctgcgggcttctctacttacgacacgcgcgttgtccacgctgagcactcatctcttctcactcactctctgcctgaccgactctgacacggtaccttggccgatcgatccacgcgcgtgctttgcccttgcgggccacgtgaccgtcactttcgcgtgtcatcactcagcatcatcatatttgggccctggccatctgtggccttccatgccaggcttatagcttttccaagatccaatgccaacttcactcacccacacctgccagccttcaccttccgtcactgaaagcctaccgaccagttgcacacgctgtcccacggcctctgaaaaccgcaccccctctctggcgcctgcctactcgcccttgccggcccctgactcactctgcctacccagccggcctcctcccaggcattcctgcctaacgaacgaccacacatggacaccgcacactccacgagcctgtcccgcacgacttcccgctccactcatgactcactcctccacccctcctcctcgagcaaccccaccttacaaacctggaccttacaatccctcttattctccgggtttactcgcacggacctcccgtgtgtcacacccccattcacctggtgcaacgccgcagccacgacactcttggacccctcggcctgtgtgccacctgcgacgagacgcggactcccccctacccgcgaccggccgcgctcaacccccgcgcct

SEQ ID NO: 724454 - DNA, 363 bp, Homo sapiens
ggtgctgagttcttcacctccttttagactgagatctgacaagttttgcggcattgctcttgaggatctcagaagggctcttaagacaagactgcaaatggtgtgtgtatttgtcatgaaccgaatgaattcccaaaacagtggttttactcagcgcaggcgaatggctcttgggattgaattcttctggttggtgatgtgaaattggtgcattctctgaacttagttcgtatgttttacgccatacaatcaacccttctttaacgcctttgaaaaaacatccaggatgggatggcccttttgggctttatttttggagcccttgcgaccccttggtccaataggactttccggaaacttccc

SEQ ID NO: 724455 - DNA, 966 bp, Homo sapiens
  misc_feature (850)..(850): n is a, c, g, or t
  misc_feature (879)..(879): n is a, c, g, or t
  misc_feature (934)..(934): n is a, c, g, or t
gagtcttgccgatgcccccagccaaataaaccccttccttctttaactgggtgtctgaggagttttgtctgtggctcgtcctgctacatttcttggttccctgactgggaagtgaggtgattggtggatggttgaggcagctccttaggcggcttaatcctgccctgtggaacatgcctgctggggactctgaccagcctgagagacgcagatcctgagagcgctcccgggtacgcatttgccccggttggacgcttcgccagagcagtgtgtggcaggctaccgtggaggatcaacacagtggctgaacaccatgaaggagcaggcacttggagtctggacatctaaaacttgactgtggaaatgatgttagacaaaaagcaaacttgagagattttcttatttgagttcaaaatgggtcataaagcagcggagacaactggcaacatcaacaacgcatttggcccaggaagtgctagcgaatgcacagtgtggtgatgtttcaagttttgcaaaggagatgagagccttgaaggtgaggagtgtagtagctggccatcggaagttgacaatgaccaactgagaccagttgagagcaatcatcgaagctgatcctcttacaactagatgagaacttgctgaagaactcgacatcaaacattctatggtcctttggcatttgaagcaaattggaaaggcaaaaagcctgataagtgggtgcctcatgagttgagtgaaaataaaaaaagttgttttgaagtgttgtcttctcttattctatgcaacaacaatgaaccgtttctcaactggattgtgacatgtgacaaaagtggatttatatgacaatcancagctcagtggttggactgagagaagctncaagcacttccaaggccaacttgcacagaaaggtcatggccacatttggtgtctntgcagctgatcactaagcttctgatccaaaaa

SEQ ID NO: 724456 - DNA, 707 bp, Homo sapiens
agcctaaaccaaggtgttggcagggccgaggtctgtgctttaggaggctgtaggagagagccacattgctagtggctgccagtacttcttgacttgtggatgccagcattacttgacttgtggtcacattacctcaatctctcctgcgatggttgtgtggtcttctttttgtgtcagattgccccctccctctctcaacattcgtgatggcactttagggcccagccgttgatgatgaaggataatcccctcatctcaagattctcaacttaatcacacctgcaaagacctgtgtttcccccaagtcataagaacatttataggtatgtcacagtgtaggatgtagatgtcttgggtggaccattttcacagctgatcacagtcctataaattatttggaaaagtaggaaggttgcttttgaagtagcaactgtgtagatgtatcataagtatacttccagctatacatacgaattagtcgtagtttgataacttggtaggtgttaccttgatgatccacatttgagatccaactgggagacgaggtccaaaatttgtaccacctaatctgtttgtataacaatggtattgagcgacttttctctaataatggaagtgatgtgctttgagggtcagtgatagctgacagtggttaattattatcaaggtattaagatgagtctgaggttagggaaatgatatgatga

SEQ ID NO: 724457 - DNA, 203 bp, Homo sapiens
cacataggatcttatggactaccgtgcaggttgattcaagtcccactctcaattttggctgggttgaagtaccagccacagagtttcactacactccccacatatacaacataaatggattgtacacccaagtgaacagacccccgtaatgaccaaacatggcccttatgcataggcagataatccaagtccaccattagaca

SEQ ID NO: 724458 - DNA, 357 bp, Homo sapiens
tgctgtactccatactactgctctattgacgagacactggccccaccgctggtcattgacagaaccatggtccctgctcccctcactgacagacactggccccgactctgttcattgacactgtccctgcctctgctcgttgacagacactaaccctgcctctgctcattgacagacactggccccacctccgctcattgacagccactggccccgcctctgttcattgacgctgtccctgcctctgctcgttgacagaaactaaccccgactcatgctcattgacagacactggccccgactctgatcattgacagacactggtcccaactccgctcattgacagaaactggctct

SEQ ID NO: 724459 - DNA, 152 bp, Homo sapiens
aaaaaaaaggggggggggggggggggggttttttccccccaaaattttttccccccccttttttttttggggcccttttttttggggggggggggggggggggggggttcccccttgtttttttcccttttccccccctttcccccctttta

SEQ ID NO: 724460 - DNA, 141 bp, Homo sapiens
taacagcagcatcctccttcattctacccgcgaagatccgagtcgtccggaagtagagcgcccgtgctctcaccgttctaccgcagactcagaaagaccccctccggcacttctaccaggggcaagaagtacaagcccctg

SEQ ID NO: 724461 - DNA, 169 bp, Homo sapiens
tcctcctgggcggcccagtcctggacaataagcaacagatgatattgagtgtcgggtgggaaggaggccagactctgcttcggccatgatttgtgactgcccaggactcttcaggttgggctggcctactcaggattacactgagagtgatggcctcgtaagtacaggt

SEQ ID NO: 724462 - DNA, 922 bp, Homo sapiens
cggacgctgccgaagccgccaccgccttcggggccagcggcgggggccgcccgctcccccgggcgctggctgccgaggagatccgacagatgctacagggtcaacgccgctggccgacagcgatgcgtcctgacagcgctgcaggattacttcgcggcacgatgcaacggctcgtggcgaccgaggcatacccgtgcgtgcggctcgcgtccgtggcagaccgaacggaagagtccccgtcggcgttatccgtgtttgcgggcctgccgaggctgcggtcaagaaccgactctggctcactatcatagtcgcagcgaacatgcgaagaaagcatagcataaggtttgtgacgagttagtctgcagaacgaagatgcctaagtacacagatgaatgatgcgcacgtagtggtcgattacataccaccagaagactctaaacatagtgcaaagaaacgaagccgtctcttgtcgaacacatgggaacaaccaatccgtttgtttctcaattcgagtgaagattcagttcggattcccagtaaaaatctcagcaggacacttaccttcctcacgtggaatgtgggacgatcacttctgattggcggacaaccactggaaaaccctttccttccaggtcaacgctagctcttcttgagccgcctggtcgagatgacttgttcttgacgaacgcttccagtaggaggcgaatggtgatcgtattttcaattcgcgagtcgagtcaacttccgctggtgatatgcactgtcactaaaactactaggccagtccccactgacaccttctgaggccacaaggagaaagcagcatgcgtcaatagcccggccatgttccattagagggataaacgtgagaagaacaccatggctaagcatcagtgaaaagtacgcccgagctgggtagaac

SEQ ID NO: 724463 - DNA, 346 bp, Homo sapiens
  misc_feature (3)..(3): n is a, c, g, or t
  misc_feature (18)..(18): n is a, c, g, or t
  misc_feature (60)..(60): n is a, c, g, or t
tgnaaggggcactccccnacatcctgaaatggccagcgctgaatgaagaccccattaccnaaaactattgcagcactcatcattctttgggcgctggcattaacgcagtttggtggcacgaaatacacggcgcgaattgctaaagttggcttcttcgccggtatcctgttacctgcatttattttgatcgcattagcggctatttatctgactccggtgcccccgttgctatcgaaatggattcgaagaccttcttccctgacttctctaaagtgggcaccctggtagtatttgttgccttcattttgagttatatgggcgtagaagatccgcaacccacgtcaat

SEQ ID NO: 724464 - DNA, 216 bp, Homo sapiens
atgttagtgaaaatccgtattcacaacaggcgaacaatacgatgaattctccgtttctggtgacccctcaatggcttgcgcaacatatcaacgatgaaaatctggtggtgatcgacgtccggatgtcgccggtggggctgacgccgaagaaagatatgcttgccgagttcgaacgcggccatatccccggcgcggtctatttcgatatcgacgagg

SEQ ID NO: 724465 - DNA, 151 bp, Homo sapiens
caactactggcagcggaacaacgaacggcgatgatggactccaatccgcagggactctggctggaatgtttatcctagctcgcgaacacagcaacaacaccaaacaagcaagcaatccaggcacgacctgcaaactggcatgacacgctag

SEQ ID NO: 724466 - DNA, 1226 bp, Homo sapiens
gtgaacaccgggctgagggagtctgcaggtcggctccgggaagccgcgcggccgacgtgggtgagtgacttcactaaatggggaaaaggaagagggggtcggcagtatccccgaaagagggctagcggctgcatgaagaccagcagcagagctccacgagcaggaaaagcccccgaagcagccccagtggcgacatggacctgggccgcttaggccacgcccggggaagagggcctgactgacgctgcaggggctggggccgctggggccgggtcgcagctgatgcatgagagatgcaaccaaaggtgaaacgtggaaagaatggcagccaatcaacgggacccggtggtaagactcttaacagaagcacatgtattgccacttgtgtgcttgacttgacacatgcatcccatcggcatcattggtgcagttgggagaaaggggctcattgagcgagctaaccccaggatgcagttatttgtcgacacacaaaaattgttcgccaaggagggaaagagacggttgcaaacagcaacatgtagggtaccaaaacacaggattgtgacaccattaaagtagttagggtgagaaaagagggaaactcagcggcggaaaggcgtacagtggacttggccagttggagaccggtatatggactagacgcgtggaacataccggaaaaaggggtgcacaacccaaataactttgtggggacgacagtgtagaatccattagcgaagaaaaagattgagttacgttcattggggaaaggggaaccccgatgtagaatagccaagaaacattaaagacgaatcaaaaggggcgaagagaagtaacgcaaacgttgataacaaatccagataggaaagacttggggaaaggacaaagagacgccacaattcaaaatgaggattggacattaagggaacacaagcagacacgttagcccggatgtagctttagcacatgcaagagatacccagagaacatcagtgaattacgtttggcacagcggaacagatgtgtcaaacagtgggtcctagggagcggggacaatacacaaatggctcattggaaaaataccgttagtcacgcagtcgtataagtactaagaacacaaaccaaaggatcgtggataaacgggagcgaaaacaagacacgctttatggcaaagtacacacactgtagggaaccacagaaaaatatgtaggtaccctgacgaattg

SEQ ID NO: 724467 - DNA, 312 bp, Homo sapiens
ggtagacaactagggtagttttgcaggtggtaagccatttaccaagatagttgtaggtaaagaagggcagatttattagagaaatgtgaaaatatgttgcagtgggcagctcagcagagaaggggctacctgcaaagaggcaagggctggaggaaagttttatagggtcctgctgaagggtgctacgtgtggaatgaggtcattgtgcccgcaggttgtttgtgattagctgtttctaacaattgttcatacaataattgttcattattgttctcaacttggggctctccccaacctggggacccttcctta

SEQ ID NO: 724468 - DNA, 347 bp, Homo sapiens
ccggttgttaatctggtcctcctaaattggtcaaattgtgggtctggtccaattcttcaaggtcttcctggcctttttcccggcaatcctggtcccgtaactttagattcagcattcaaggttttgcaaccggttccttggtccttttcggcaattgccgatggtttcaggcttctgggtcaaccttgtccacctgggcaatggcgccttaccattaagcaggaccgttggcctcctgaaacacatctccattgactgtggtccccatgtcctcagaacacacgcactcgtggggccgctgccgggggccatggctgccggcaggtgccccgaagccctcgtcgttc

SEQ ID NO: 724469 - DNA, 122 bp, Homo sapiens
gtcgacagccagtaaaaaaattgttagaaagcgagactaccatcaaattggttctgggaagtgtgaaatcaaagttgcacaacccaaagaggtatataggcagcaacagcaacaacaaaaag

SEQ ID NO: 724470 - DNA, 211 bp, Homo sapiens
ttagttcttaccacaggcatgtaactttagagctatagaataaaataacagattgcacctttgcatatcctcaaaaggattttctgtctctatttcagaatgatttttctaccacatacttgattttttgattatacacactgctgtaaacctatgttacatttcttatattccattccaaaaactctgcttcaaattttaaatgcccttt

SEQ ID NO: 724471 - DNA, 895 bp, Homo sapiens
ggatctctatggctgtcagaggtgggcggctttgaccagagcagcgcttgctggagctcgtcggttggcacgcgatgtttcgtctgaactcacttctctgctttggacagaactgggctgtgggttcatcagagtggtaccatggaggatcacagcccatccatgatccggcgaagactaatgatggtggctttcctgggagcatctgcaggtaactgcaagtactgctcttttgtgcgaagaggtgatgattgttatccagccactcttgttcgttgcgtatagcttttatgcttccagtcatctctgttgtcagaacggagttgatttctggcttaacctctgtatcagaattgtcttgctcggatcatttggtattgttaatattcgtctatgaaataagatgtttcacaacgaattcaacatgctaatggcgatacttaggaaacactgtgcttcaaggtctgcctgtctcctctgctgaacattttacataactgggatagggatacgcaatagcagctttagagaatgaaggctttctggccaggcgcggtgggttacacctgtgatgcccagcactttgggagcccgggatgggttggatcgcttgaggtcagggagttgagaacaggttggcaagatggcagagaccattctctacaaagatagaaaaataggcagaaacaggcgtgagccgtggccctggtgcgggaggcgaggggagaatgttgacctggagcggggcgtgagtggcgcaatggcctggccaccgggtgcagaacggtcccaaaaaaaaaaagaaatggggccgcccgagataaactgggcgcaagagaagaaccacacacaagaagggcaacgcggggcgaacaggtgtcgcaacgccgaaggg

SEQ ID NO: 724472 - DNA, 418 bp, Homo sapiens
  misc_feature (350)..(350): n is a, c, g, or t
cgactgcgtataggctgtcacatagattccatatgactatgtactttgaggttccattgaaatgtaagtgtactgcgcatgatacattaccgtcatggattacattggctacaagaaccatgaggacattgtgatagtgcctgacgatggaactaaactgacatggtagactgcatttttgtgccaagctctacagaagtgtcactaattgcctagattcaaatcatgttttaatgctagagtcgaacttacaactagagaactgtgcactaaagattacttgtatcatatctaatgcatcatacgtgctcgcagaaggagttagaatgacatgacaaatatagacattnagtcgggtgctgtatgaacatgtatgagcatcattctatgtgtagtgtacacgcactgttcggcgctt

SEQ ID NO: 724473 - DNA, 199 bp, Homo sapiens
gttttccctctcagataatgaaaagcatgaaattctgaagataagtgatgattcaacaagtgatagcagttacatgaatcagtgactttactgacaactatcttagaatgagcctcccaaagtgccaggattataggcctgagccaccttgcctggccaggggcatggatttgatcaacagttaggtttgctgtctgcc

SEQ ID NO: 724474 - DNA, 476 bp, Homo sapiens
  misc_feature (340)..(340): n is a, c, g, or t
  misc_feature (376)..(376): n is a, c, g, or t
gtcacctgaggcctttccctcacttttcagggcctgccatgcgatcagggacacccgagaccacttccagccccaacctcccatgcacgtgggagtcccacccgggaggccttccacacatgcccacatcagtcacagcgagtgctcctgggactgtgatggtgcctgtcactctgcctgggggctggggagggtcacagaagatggtccttacctatcttacaaagaattcaaaatagagcccaggccctgagagcatgatttgaaggtgccgctgtggtgtcagacccaccattccagtgccagctgtgccacctgtgtgggcatcagtgtccatcgntgtgaaataggacattacagggtgaagttgggagtnccggcggggggcacatgctcagggtctggcgtgtatagacacccctaatacatgattgtgatcatgatcacagaatcttctggaaactctgcctccctgg

SEQ ID NO: 724475 - DNA, 673 bp, Homo sapiens
agctttggtacagttattcaggaagtgaaaacaagcaatgtggctagagaggctgccctgggagctggcttctctgataagactccagctcacactgtcaccatggcttgtatctcttcaaaccaagccatgaccacagctgttggtctgatagcttctggccagtgtgatgtcgtcgtggctggtggtgttgagttaatgtctgatgtccctattcgtcattcaagaaatatgaggaaaatgatgcttgatctcaataaagccaagactctgggccagcgcctgtccttactcagtaaattcagattgaattttctgtcccctgagctccctgcagtggctgagttctccactaatgagaccatgggccactctgcagaccgactggctgctgcctttgctgtttctcgaatggaacaggatgaatatgcactgcgttctcatagtctggccaagaaggcacaggatgaaggacacctttctgatattgtacccttcaaagtaccaggaaaggacacagttaccaaagataatgggatccgtccttcctcactggagcaaatggccaaactaaaacctgcgttcatcagaccctatggcacagtgacagctgcaaattcttctttcctgactgatggcgcttctgcgatgctaatcatgtcagaggacagag

SEQ ID NO: 724476 - DNA, 102 bp, Homo sapiens
gactcttaaggatccccggttcaaggcgcggaattttccgtatcagaccgatttaagtgctgcaatgaaggagtcctgggagcatggactttcccctgccct

SEQ ID NO: 724477 - DNA, 162 bp, Homo sapiens
cacgaggaagacagccgcttacaatctcaactcaagtctcagttaacaagcgtgtgtgtcaccaacctgacagtgtcatccaggaacaaccgcgggtctctatgctccatacgagggtcactgtgctctacccagtgctctctgagctcggtcagcttcagt

SEQ ID NO: 724478 - DNA, 319 bp, Homo sapiens
  misc_feature (1)..(1): n is a, c, g, or t
ntccaaccgtaacagaaccagtctgacctgtgctgtgtaccatatggagcctgatcatccagcagcagggctgagctcctcggagcccgtgcgcctggtttacttgccgggggaactgtggggacagctcttccatgtactcgctcgagggcaacatggtggagcacagtgtgccagttgtgccaggagctgcggacctcgttgaggaatgtgaccctgcactgaaccctgactggctccagcggggccttacagatacaccgaggttgaaaagatgtgcggctgattggggcccggcgcctgccccttgcgccggggg

SEQ ID NO: 724479 - DNA, 296 bp, Homo sapiens
gtaaagcctgaaaaattttccctttttgcccttaaatcttggtgttgttttaggagacgggggcccagggagtaaaggaaggcccgttgagcaaaccgaaggggtcctttgcatttcaaaacctttttcccttttatagccctgggggggaagattttattaaaatcccacgggaagttgataaggggcttgctgatgacttggaaaaaaacttccccaggttgaagggtcaggcttaaaacctgaattgggattacttctggcccagaaataaactttttttttttccctgccca

SEQ ID NO: 724480 - DNA, 712 bp, Homo sapiens
tgtaccatgtgcgctggcctgcggcaaggccttcggctggctgctccacgctgctgaaacatctgcagcagccacagctggggagaagccgcaccactgccctggtgtgtggcaaggccttcgggcacggctcgctcctgtgcacatgcacctgcgcactgcactgtgctgtgccctgctggccccacaatgtgccctgtgtgtgctgccaatggtgcttctgtgccatgtgagctctgctgcttgctcaagacacccttgcgcactgcacactgtgtgctgagctgtgccctaccctgtgtcctgcatgttgctgtgcaatgtgccttctgtggcatgatgctctggctgcttgcttgcatgcaccatgctgcacacacactgtgcctgagctgcccctacctgctgcccccacttgcggcaaagccttcggtgcagatgctccaacttgcaacaccacctgctgcatccacactggtgcgagctggccctactgcctgcccgcactgctccaatggccttcggccagatgctcagctgctgctccatgcacctgcacgtgcattcgggcgagcgtccctatctgctgtcagctctgcgggaagtgccttcggccaggcctccagcctcaccaagcacaaacgggtcatgagggttcagcctgtgcttgagctgccgggggcgtgcagctgagcagcggctgcggctgggc

SEQ ID NO: 724481 - DNA, 184 bp, Homo sapiens
cacactcggttatggaactctctgcatctggaggcctgtctaggcaagtcttccctacccctccacacaatctacccttctcctgcttcctgtggcaccttgcacaaagctctaataagatatgcaccacactcccatttggttggtttccatgtcaggctccccacaggaagatttccccaga

SEQ ID NO: 724482 - DNA, 114 bp, Homo sapiens
ctgaagatcagggggaagatcttagaccagggggaggactccccagcatcagagatgacacggatcgccaggctgatggcgaagaacaagatgagtgacgggaagaaggaggag

SEQ ID NO: 724483 - DNA, 702 bp, Homo sapiens
  misc_feature (169)..(169): n is a, c, g, or t
ttctctctcacaaaagaagaaaaaaatatgtatctatgatgtatatttttatattaatatatgtagaagcagtgagtacgatatggtgtgtctaccagaggactccggtggagtgaggcacatgggtgagaatgcatgggtcatcagctgtgtcaacacaaccaacagngaaggaatgattattgctgtgtgagaatcctattgcatagcatggtagatgctaagtatttcaaatagacaacccaaaaaatgttatgcatttgaggtgatggatatgttaactggcttcatttaattattccatattgtatttataggtcacaataggactttgtggcccataattataaacaagtataaattgtccatttacaattaaaaatcaattaaaagaaaaaaaaaaaaaaaaaaaaaaaaaaaaaaaaaaaaaaaaaaaaggggggggggcgacaaaaatcccccccgggggggccccaaggtcaaacgcgggacaccccgtctctgcctcgcacaaaaggggcccccttaagaggagcgccgataaaaacgcacgaggccacggcgcgcgttaaacaaagcgggcgcgccgcgaaacggtcgtacgcgggaacctgggggaagagccccacttcgtggggtgggccattactgggacacctccgccagagcttaacgccgaggacaacaacactagcgataacg

SEQ ID NO: 724484 - DNA, 118 bp, Homo sapiens
  misc_feature (24)..(24): n is a, c, g, or t
  misc_feature (45)..(45): n is a, c, g, or t
  misc_feature (85)..(85): n is a, c, g, or t
  misc_feature (95)..(95): n is a, c, g, or t
tggtagatgcatgacttgtgtgtnatgagagaatggagacagagncccggctcctctactgtttaacaacatgctttcttatttngttgaatgtnattcacagatagcacaaactaca

SEQ ID NO: 724485 - DNA, 1262 bp, Homo sapiens
agctatcccaagcaagacagaagtagtgatataccatggcatgtcagcattgccgaagacatactacaaggcgcctttctgaatgacaacgacctagactgcatttgaaaagtgagacgggaatcgaaagttaaacttacagaacatttagtcccagacttcgacacgatgtagtggactcacgccagtacttgcgtttgactggtgtggacgccggacaccttttgaagttggagaccacctgactgagagctagtgggaagcttcacctgctggataagctactagtcattcctgtattctagggggccatcgggttcaacttatgctcccaaactgaccccagactgtgggactacttctccgaagactactatggattacaagaggctacaggctatgactcgtgtggactggttctcgtgacgacggccgacaggacgagacaactaggaccaatataaacacactaaaggacaagacagccacatgccacagaacacaccatcccaagcagtacaccacagggacacggatgacgcagtaagacacatgacactcaacaccagcagccagaacaaccagtgactacaaggcaagacaaagcagaaccaatcaaaacaacacctaccaggacatcgaaccataagacacaccgcaacgcagcgccaccaacgggcaccacactacgcccactaggaccaaccaaaccaccacacacatcggaacaaacacgatacctaccgagcacccggacacagcgaggaccccacgcaccaccagacgagccacaacaacacgaccgcaacaacggaaacaaacgacagcccaacaccaaccacctgcacacaccccaaccaaaacacgaacacaataagcaaaggaagggcccatcgacaaccaccgagagaaacacacaacacaaacacccaagaccggaaccgcactacccccaacacacagaagcaaaaaacaacaaaacacaactgcgactggcgcaccaaaccagcccaccacaaaaaggcaaaaaaccacggcatgaaacacacacggagcaactacagaacaaaaacacacgcaggacacgggacacagagacacagccgacaccaacgaggaacaacaacaccaggggcaaccaaaaaagaaaaagagaaaaaatacacgcaccgcgacacacaaaataaacacaaaacaaacaacaccaaaaggacaaacaaaaccaacccacgcaccaacaggaaacacacgccgacgacaca

SEQ ID NO: 724486 - DNA, 468 bp, Homo sapiens
acaacttcaaaaggatttcaggctgagtgtggtggctcacgcctatacacccagcacttgggaaggctgaggaaggaggatcgcttgaggccaggagtttgagactagcctaggcaacacagtgaggccttatctcaacaacaaccacaaaatctaaaaattagctgggtgtggtggtgcatgcctgtgatcctggctacttcagaggctgaggtggaaggatcacttgaggccaggagtttgaggctgcagtgagttatgatggcactgctgcactccagcctgcgggacagagtgagaccctgtctgaaagaaagagagaaagaaagaaagaaagagagagaaagaaagaaagaaagaaagggaaagatggaaggaaggaaggaaaaagaaagagaaagagagagagagagaaagaaaaagaaagaaaagtaagaaagaaaaaagaaaaagaaagaaaagtaagaa

SEQ ID NO: 724487 - DNA, 447 bp, Homo sapiens
gctgaggcgacacacacctcaggctccacagtagccagaactacaggtgtgtgccacacagccaaatacatttgtgtttctttttaatgagatggagtctccctccgtcacccaggctggagtacagtggtgtgatctcagctcactgcaacctctgcctcctgggttcaagtgattatcctgcctcagcctcccaagtaactaggactataggtgcacaccaccaagcttggctaatttttgtatttttagtggagatggggtttcaccatgttggccaggctgcttttgcactcctgacctcaagtgatctgcccaccttggcctcccaaagtgtcattaggtgctgggattacaggacagctaccgtgcccactctaatttttaaattttttgtagatatggggtcttgctatgttgcccaggctggtctcaaactcctagcct

SEQ ID NO: 724488 - DNA, 1047 bp, Homo sapiens
gtcccctgctgtctgtgggtcccgcggatgctcctcgggccccgggtctcctggcgtttcgggggtgcgcgaggtgcggcgaggcgctcggttgtccctgccggtccgctgggtcgtccggtgtttcgctgtggctcctgtggcccctgttgccggcgcgggagacgcccagggttgtcctggcagcctctcgtcgtgcggactcgctgctgtcgcaagctgcttggggctcccggttagtgctctagggtcccgtacagtcctgcgcgccaggcgcctgggtgatacctggtgtctgcaggggcccagacttttggcgctcccgggtgctggaatggcccctgtgttctccggctccgccggcagactctggctcctccgacctacacctcgggggtacctagtccgcctggggtctggccggggctgggtcctcagtcctccctgggcgcgctgggtccacctgtgttggacctggcgccagtcagagagccgcgcttcgttgctggctatccgcccctgagtccccaggagcagctgcagtcccgagaccttccaaccctgatgctgcgcgtgacgaacgcctgggatccctggtgctggatctgatcttttccttgctgcccgcactgtcctgtctggtctgaagctctcgcggctaccggtccgtagagcccacgctgtgaccctgtgctgtagcttctttccaggcctttgcccaaggagtagctggaaaggaagacgcgattagtggcttaagacttccaagccagaagacagagggttcgaatcccacgcactgccggtctactcagctgtagttagtagcaggctacagcaatatggtagtacgtagagtacgtgcaagccagctggacttcctgggattgaatggggacctggagaacttttctgtcttacaagaggattgtataatggaccaatctagcactcatgtaactatggaccaatctagcgctctctaaatatggacctaatcacgcagacagtgggccggggacaataagggaatataaagctggcgag

SEQ ID NO: 724489 - DNA, 292 bp, Homo sapiens
agcacaagtctgacatgctggagaacactcagacaaaatccttaacatacataaatatcacccggattccctccacaacatgaaatctaaccccatgaaacccatgatagtccacaaaaccagacacgccttatatcacccagtctagcttcacaacagccaagcataatgcaaactcgcccccgcaactcatgaaaatactccacacccaacaaaccttcccccaacacagaaacttgccgggcaaaacaaatgcaatggctcatgcctgtaatcccatcactttgggagc

SEQ ID NO: 724490 - DNA, 111 bp, Homo sapiens
attatagctggacgtaatgacatctgcagaacatcagtcggatccatcgttggtttagcttgctgcacgggtgtaggaaagtctaattgtaaatgttaatagataccttgg

SEQ ID NO: 724491 - DNA, 345 bp, Homo sapiens
agagatgagcaaggagagctagcggaggatggggagcatgaaacaggacacgcctgcaaaaaactcccaatgtggagaagaacgtggaagaacagcagagctgggcagatgtgagtgggcggcgtggggctgggagagccaataccaaatagcctggatttacaggaatccagggctgcctgcaagctcgcgggagctctgtgcttgggcggaaagctattattttgaggtgggaatgcaagcatgctcttacctgaggaaaagcacttcatatgtcgtgagttttacgtaaaggaatttggcgtcatgggttgaactacttaactgaccatctgctttttttgg

SEQ ID NO: 724492 - DNA, 912 bp, Homo sapiens
gggtgtttctccttccataaggccctccttattagggcgtttgtttacatactccacttatcagcttgaattcctacgcttggggcggcggttttttattcaccctgaggtctctttctctcctgggcgcccccctcaccccacccccctgttctcctaatagggccttctttcattcagcgcggggagaaattctcttcgttgtttgtagtcccccccgcacaaggattttgtttttttctcccagcgcaggttttttgtggataccgctttctccgcccacccccgccctctgtgttctcttctccccccaccctttttgggggcgcgcgcttcgcgctcctcctctccacggtggtttctcctccccgttttattgcctcctatgagtagtcgctcgccctcccttgtaacacacacaccccggtgtattgtcttcgctcgtccaggggagtgtgttctctcatctccctctggccgtctccgccacttagtgttttatatatgaggaccccctccccgtcctcccccattttttcttatagccccccgtggtgtgtacaccacttgtgcggggtgttttttttttccccctcctcacactgcctgcctgcggggatttgtggtggttcctctttccccaacttttgctgcggcgctgttgttgctgcgctgctacccaactttgtgttgagccacacgggagtttctccccggcatttcatccttcttatattggtgttgccacgcacctttctcctcctcactagtgggtttatccgccccccccccagttttttctccttccacacccccccaaccaccctgtgggtttaaaccccccccccatggccctttttaaaagaggggttttaatttttttttttttccccttttttgtgggggggttta

SEQ ID NO: 724493 - DNA, 875 bp, Homo sapiens
tgccacttagtgaataacgtgtgtgtgaggacttcagaagggcctaccatggctgtgtggtatcgttcaaacaatcatgggtttcgcccctcctccaggtgagtaatgacagacttagagagatttgtcagtataaaatcagtgctcgaggaagtaaggaggtcgcttagtattaggggagggctgttttccatgatgactgtagtatggtctcaagtcacgaggaaaggaatgatccctggaaactccatcacacagtggtgccttaactgggagccatactggcagcaagaaatggacccaagtggccatggttgggtcagccgcaatggtgtggcattctcctagctttactgtgagaggagctggtatctgtgtgacaagattttgcctctgcacaagtgttccacaatgggtcctcagtcgcaggaagacccctcccagtgtgccttcaatcagttaccctttgcttcaccttttggagacttatcgacaatatcatgtagggacttctttcctaggatttctttaacagaacgagtgtggttcgagaaggatttcagaagatcaaagttacagtctgtttttaaaaccataaggtggggacagctatggcaataggtataaagagacctttagcacttttttctattaaaggaacagcgggaaggtggtaaagataatacgttattattcaccctttgaatgcttgtgaccagatcacgttaatgttaggaatcagcagtgtgaagatgggccagggtaaaaggagatgtacattcctgggtcttgcggtgggtggtgtccaccaaaggggggactctttaaagggaggggaggcgttcaaaagtgtgtgccccggaggaatgggggac

SEQ ID NO: 724494 - DNA, 218 bp, Homo sapiens
  misc_feature (8)..(9): n is a, c, g, or t
  misc_feature (29)..(29): n is a, c, g, or t
  misc_feature (118)..(118): n is a, c, g, or t
cacgcgtnncgttgatgttgtgcatttangtcatatgtttgttggccatttgtatatcttcttttgagaactgtctattcatatcctttgcccactttttgatggttttgtttttttnttgctgacttgtttgagttctttgtagattcttgatattagccctttgtcagatgtagagattgtgaatatttggtctccattctgtgggttgttctgtt

SEQ ID NO: 724495 - DNA, 121 bp, Homo sapiens
acgcattatcaggaaatagcaaacgcacttgaatccaggattgatgacttcaaaatccatatctttggtctggtgcagtgaataaagattatgtctggcgttcaggtccctgaagatgtgg

SEQ ID NO: 724496 - DNA, 675 bp, Homo sapiens
tccactggcccggcacattctcctcagagatccctgagccccgcggataggtcaaaagctggtacccgactggggccttcagtgctgtcttctgctggctcatcctgcagcagggacactggagagcaatggtccctgccacacacatctgcggggaccagggagtgctccttcacctccctccctaacaccttaacacccggggagcctccggagggtggcaggaagtccccagacacccaatgcacaatctgccctcaaattctctatgtacatagcccatgattgcgggggctggccactccccccaatcgttaaagggctacacgcaccgactccacgaagacccatagggacgaggatagaaagagagagacaaacaaacataaataagcaccaagagaaaccgggagacaccccaaacaccgacatataaaaggaaagaacagcaaaacaaatggcaaccgcacaacccaacatcacggacaacggacgcagcaggagaagaacacaaagaggcaacaagagaacgagacacacgaaagaagggaaatagcggcaaaaagaaaacaacgaaaaatgaaagacaggaagcaccagaaaaaacaacccacaaagggaaccgacacagcacaggaagagaaccaggcgaatacaaaaaagagacaacacaag

SEQ ID NO: 724497 - DNA, 827 bp, Homo sapiens
  misc_feature (140)..(140): n is a, c, g, or t
  misc_feature (261)..(261): n is a, c, g, or t
  misc_feature (289)..(290): n is a, c, g, or t
  misc_feature (308)..(308): n is a, c, g, or t
gaacctgaacctgaaaaggttatgagaagccaaaactcaaaccaagacccccacctcctccacctgctccacctaaggaagatgtgaaggagaaaatattccaacttaaagctattccaaagaagaaagtcctgaaaaanctcaggtccagaaaaagtgagcttacacctctgaaagtgcctggaggtgaaaagaaagttcgcaaattacttccggacgtaaacctgaaccaaaggaagaagttgtctgaaaagcgtctangaaaaagacctgaagaagaagaacctanngtagacctaaaaaactanaaaaagttaaaaaagcctgcaggaccagaaccagcaggctccaaaacctgtggaagaggtggaagtacctactgttacacccacgggcacgtggaagattcctgaaccaacaaaagtgcctgaaatcaagccagcaatacctctccctgcacctgaaccgaaaccaaagcccgaagcagaagtgaaaacaatcaaaccacctcctgtggaacctgaaccaacccccatcgctgcccagtaacagtgccagtggttggaaagaagcagaagccaaaggcacctaaggaagagggctgcaagccaaaggtcctatcaaggtgtacccaaaaagccagaagctccacctcctaaagtaccagaggtcccaagagggtgtgcccgaaaagaaggggccccgggtcctcctaaaggctgagtccccggtaagggcgaggtccaaagaaatggcggaagaagggcgcggccccaaaggcggagtccccgggaggccggcgccaaaggcccaaagggcggccccaa

SEQ ID NO: 724498 - DNA, 345 bp, Homo sapiens
aatttacccccctttgatgaaaggattactttattccttatcggatattttaacaatgtttattattcctttatccctctatagaacccccccccccccccaggagattattttgagttgggtcccaccctagggcctggacttttaaatttaactccccccttcccccctttttttacttaggtgggggcatggttcagtcaaaactggtgtttcctattgggttgtgccaaaggagggcctaggcccccccatatggtggcccccccccggagggtttattggcaggctggaaaacaaaagtttccccataaaggccctttttcccccaaaagggggtgggga

SEQ ID NO: 724499 - DNA, 1273 bp, Homo sapiens
ctcgcgtgcatttgggcagctcccataccgtctccaagacccaatcctcaaccattgtatgccccctggatcaggccattggtctcctcgctgtccatcttccacgaagtactccggcatggacgtgagtgactagacataccctgaccaagaaggagctgaaggagctgatccaagcaaggacgactcagccaattagggctcggaagcctgcagagcatgactgcacatatttgcaacgggctgagtgtgaaggacgttgcgaatccagaatcataggagccgagagagcgttgagactgtccaaggaggtactgctcagcactgtcctgggcggccgttgagccttctgcactctacgaatgcaatgccccatctacatggggcgtgaagagagtacatagtatgggcaacgaatgcgcaggacagcccctcgtgggggcgtcctactcgtgcatggtcagaattccacgtgggtgggcttaattcgtaacaaataaaattctctattttaggggatcaagacttgttaaaaaaaaaaaacaacaacacacaacacacaaccaaaacaagagggggcgcgcgcccgcgcccctctataagagtttatctcccacctcgagagggggggccccaagagcctatttcacgcgcgtttcacccccgagttatctcgcgtgtgttcacccaagagtgtggggcccccccctaaatgagggagagctgcccaatattttatatagaagcgctctgagggccccatgtgtggccgcgaagcctgtattaacaccaacaaggtctacgcgcgcacttctgggcgacacacacatcgtgggtttaagcccccttgcgggggacaatatcttcagggggtggaccaaaggggaaacccccttaaacactcatcgagtgcgcgcagtgtcttgccccatcataatatttgggggcaacaacaccttaaacaacttaaccgcagtacgaatattttcaaacaggggcccctccaccagcgggggggtcatcaaattcattcaaaaaaacgtctcgttccacacgaggtcgtctcatcaaacgaccaggggcgcttataaacaaccatacagccgtgtgcaccaatacgtagcaccatgtacccgcaggcccttttagaacacacagtcttacgggggccactaaacactggcgagaccaattcgcgccctctctacacacgcagaacccctatagtgatatctacacccaccaggtaatcattaaacgtgagataggaaca

SEQ ID NO: 724500 - DNA, 103 bp, Homo sapiens
tagcgggagtcaggggaagttaggccggctcctgggcgtcttcgaacagaaccaggatcgcaagcacagaacatgagtagctgatgatgttcagtatcggtag

SEQ ID NO: 724501 - DNA, 132 bp, Homo sapiens
aatttcaaataaaaataggtaaaaataacaaacttagcagtaacagagtctctaaacggcagccatgaaagaactgtactcaagtcgcccttataggagcccttgattcaggcttcaataagtagtaggaca

SEQ ID NO: 724502 - DNA, 704 bp, Homo sapiens
gggacccaaataaagtataggcaatgtgtcaaaatttaatgtttcataataaaaatagatacgttgacttaaaaaaaaaaaaaaaaaaaaaaaaaaaaaaaaaaaaaaaaaaaaaaaaaaaaaaaaaaaaaaaaaaaaaaaaaaaaaaaaaaaaaaaaaaaaaaaaaaaaaaaaaaaaaaaaaaaaaaaaaagaaaaaaaaaaaaaaaaaaaactgaaacaggcataaaacaacgtaaaaaattaaaaaaaaaaaagtgaattgccacctaaaaagaaaacggataaaaatgcaaaagccccaaattaacaaaatttaaaagggaaaaaccccgttttaaaaaaccaaaatgccttaaaacaaaatgggacttaacaattgtaaccttttaaacaaaaggcccccttgaggggggattgtaaaaggaaagctgaactataaaggaaaaagtaaaattaaagcttagtaaattaggtaaaaaagaaattcaataggctaaaaatggctgaattttaaaaaaaaaaaaggagaaaactgaaaaatgttttaaactaaaacaaaatggcccaaaaaccctctaataaggaaatggttatctaaaggaaccgtgttaaaaaccatgttttaggcaaataatccgctaaaaaaccttttatcgtaacaagtatccaaggcgataaatgaaataaggagttctgatgttg

SEQ ID NO: 724503 - DNA, 347 bp, Homo sapiens
  misc_feature (95)..(95): n is a, c, g, or t
aggaaccagcacatcatgatttacttgggggctggccaccacaacaagaattaactgggccatggaggacaaacaggaaatggtggacatcatcnaaacggtgtaccccggggcccccaaaggccccggcctggtggtgtcccccaaggactactcccccaagtaccgctttttaggcgcccccagtttgcgcggataaatgtcgtggagccccttttgtatggaaacgtttttagctatttaaagcctttggaaaatacaggaagctccagggctggagccccttttaaatggaatttataacatggtttttactcccccaaataaaccagcccgtggttaaagga

SEQ ID NO: 724504 - DNA, 444 bp, Homo sapiens
  misc_feature (11)..(11): n is a, c, g, or t
  misc_feature (32)..(32): n is a, c, g, or t
  misc_feature (63)..(64): n is a, c, g, or t
  misc_feature (67)..(67): n is a, c, g, or t
  misc_feature (85)..(86): n is a, c, g, or t
  misc_feature (179)..(179): n is a, c, g, or t
  misc_feature (316)..(316): n is a, c, g, or t
  misc_feature (356)..(356): n is a, c, g, or t
  misc_feature (376)..(376): n is a, c, g, or t
aagccctgaanagatgtcttgtcttcccaacnacaaaacttacttcccgaacttcgacctaannaangtttgcccaggttaaggnnacggaaagaaggtggcgacgcgctgaccaaagccgtggcgcacgtggacgacatgcccaacgcgtgtccgccctgagcgacctgcacgcgcanaagcttgggtggacccggtcaacttcaagctcctaagccactgcctgctggtgaccctggccgcccacctccccgccgagttcacccctgggtgacgcctccctggacaagttcctggcttctgtgagcaccgtctncctccaaataccgttaagctgagcctcggtagccgttccntcccggctgcctccaacggncctcctcccctccttgcaccggcccttcctggtctttgaataaagtctgagtgggcggcaaaaaaaaa

SEQ ID NO: 724505 - DNA, 160 bp, Homo sapiens
ctcctgtctttggagaaccagctccttctcattactgcagacaatgccacacagatcaatgtcatccttggtgctgtcttcgctcttgtttttcttgtttcttccccacttgcttgtcacatggcgctcgtggccccagcccctctgaacggacaactct

SEQ ID NO: 724506 - DNA, 537 bp, Homo sapiens
ccgtctttccatatgtaaggggaggatgacctatcaagtcaaaaacagctgaccacatatggtggctcatgcctgtaatcccagcacgtgggaggcagatcacctgaggtcaggagttcgagaccagcctggccaacatggtgaaaccccatctctactgaaaatacaaaaattaatcaggcatcatggtacacatgtgtaatcccagctactccagcggctgaggcaggagaattgcttgaacctgggaagaggttgcagtgagctgagatcacatcactgcactccaacctgggcgacagagagactgtctcaaaagaaaaaaaaaatggtgcttcaggccctgtgtagaaaaatgggaaattatggaaaagcagaggaaacaactgggtattaagcagtatagggtggtggctcagagcaaattcgcctctgctgctgaggcaggttacgtcatctctccgtgcctcagtttccctatgtgggataacgtagtacctagtgaatagcggtgacttgaggaataagtgagtaaat

SEQ ID NO: 724507 - DNA, 172 bp, Homo sapiens
gacggcagtgcaaccgcctggcttgattgcaggcacctactcatgcacactgaatttggagcgccaccctagcaattatcaaccattaaccttccctctacacttatcatcttcacaattctaattctactgactatcctagaatatcgctgtcgcctgcaatcaagcctgt

SEQ ID NO: 724508 - DNA, 1081 bp, Homo sapiens
cagcgtgcacagcgaggtcggcagtggcacagcgaggtctggcagctgtgcacatgctgatgtgtctgtgcatgctgtgcacatgctgatggtctgtgcatgctggcacagctgatggtcaggcagctggcatgcgaggtctgtgcagctgtgcacagcctgaggtcggcagctggcagcgaggtcggcatgctgttgcgcgctgtgctcttccgcggactctgaatcatgtgcgaccacggccacgatggcgagctcgtggctcggcgctgaaacgccggtgctcaaacgaggaaggacatgactaaagtggaattcgagaccagcgaggcggtggatgtgagccccacgttcgacaccatgggcctgcgggaggacctgcttgcgtgggcatctacgcttacggtctttgaaaaaccatcagcaatccagcaacgagcaatcaagcagatcatccacaggcgagagcatgtcattcgcagcagtctcagtccggcacaggaaacaaacagccagcttcagtatctcagtcctccagttgtatggatattcaggttcgtgaaactcaagctttgatctgcggtcccacaacgagagttggctgtgcagatcagaaggcgctgtagctctcggtgactacatgaattgtccagtgccatgcctgcaattgggaggcaccaaatgtggggaggacattcgtgaagctggcttacggacagcatgtggtccagagcactcaagggcgtgtttggtatgatccgcgcacaagcgcttaggaccccttctatccaaaggtgtgctggctacagccggatgaccagttgactaccggtttcaaacagcaacatttaccatgtattacaggaaccgtgcttccacccaacaagggtgcccacatagtacccccgtcacaggacaattggcgctagcacaggttttagcgcacaacgatttgggaaaacagataataccgacggcaccgccaactcctgcgcaggcgagctacttgacgtctattaacacagacccattgcggctttcgactacgagtatgtaaaattaccatctgctgcgcagcatt

SEQ ID NO: 724509 - DNA, 412 bp, Homo sapiens
aacgctctggaaggaggggacgatagccagaatgagttacagagcagcttctccttccctgcggaggagctgtgtgtggaggcaggtgtggttgagagaaagatctacctccaccctctgtatctggaaaaggaacctgcctacaggtctcaggggcagcatagccctctactctggggacagtacaccgtagaacgacagaagcggctgttaccaacagggcgaaaggctgggaactgggaggaggatgggtggctggcatccttctccttgtagcctgctgggagcatccaggaggtggtagacagctgcctgaagaaaattgctccacggcttggcctgcgagtgaaagggcaccccagatgcacggtcacccatctcgccttttgcagagccttgggtaccgagctcg

SEQ ID NO: 724510 - DNA, 699 bp, Homo sapiens
cgcaggagcccagggccgtagcaccatggggcccacccgggaattgcatgtcttgagccccacttcccccaggactggcacggcgccgtggccaccgtggtctcaccacccggcccgttagatccgccgacgttaggcgcccgccaaccaaggcgcccgcatcgccccgcgccccgcgtcgggtcccatccggcccatcgtgcgctgccccaccggttcggtaccacacgaaggtgcgcccggccgcggcttcagcctggaggagctcaagggtggccggcaattcacccagaaaggtggcccggaagccactcggcacttttctgtggaatccgaggaggcggacaagtgccacggagtccctgcaggcccacgtgcagcggctgaaggagtaccgcgtcccaactcatcctcttcccccggagagccctcggccccccagaagggagacccgttctgctgaagaactgaaactggccaacccagctgaccggacccggtcattgcccgtcccgggacgtctataagaaggagaaagctcgagtcatcactgaggaagagaagaatttccaagccttcgctagtttccgtatggcccgtgcccacgcccggcttttcggcatacgggccaaaagagcccaggaagccgccagaaccggatgttgaaaagaaaaaattaagccctcctggggacttgga

SEQ ID NO: 724511 - DNA, 876 bp, Homo sapiens
tgctgtgtgattctcttttttatggtggatactggcctaaattgcctgtgctggtaaaaatgtttaccggggaaataacttgaaatgatggctacttggtaaatgtcttatgaaattttcatgaacaactccaagcataatgtgttaagaaacacggtgttttaaatccattgtaaggtgggaataaagagtattatgaaagtgggacttttcaactactttctctacagctttgcgtgtaaatcagtctggggtctcgtggaaacttctctaagaggaaatggtcacatttttgggaaattcattccttattccctctgggcgagctaaggggctctttaccaagttttaaagcagcaaaatttatcataacaaaaatactactaatataactacgtgttgtccatgtcccagtgatcccctctcttcctccccacccgtgaaaaaaatgagttcctatgtccggggagagggggggatgatagaacacaagtgtgttgtgtcccatgtagaatctgggaatatggccattctaactaaggagcccccatgttctggccctcctgactttgggtagcataactgaagtttgtgctccaacccctttgggtaaggaatgcctgacactttaatgggctgcttcaatttgaccctctatctacctaattggggtgccagataccttctgttaagcctcctgtttgtcacaacccttcatttgcggccgtctctgaaaaggcccgatttggccccccggttagcactctcccttgtgacaaaattccttctgggggagtctcgcagaaggtttcccacccccaggttgggcacccgctcataaagcgacaccaatagggggacacagttgtccgaata

SEQ ID NO: 724512 - DNA, 1344 bp, Homo sapiens
ccaatacagagtccagtggatgaccgcaggatggtgggggcagcgggcttctccaggctaccaccagacgaccaaggcccgtgacgcacgtgccatcctgcaccttcgagcgagcatcccgtgtgcacagcttggaaggggtgcatggcaccgcatcaccattggttcagcatgggtggaaacgctggatgactacgcaggcatccttcaccgtgcctgatgccccatgccagcggagcatggcattgtgtgacacttggcatggtgtatttgcaggatcaccactgatgtgcattggccctccatgcccaaagccacatgttgtgacgacttgtgagacatgggcaaattgacgatctgtgtccggtgtgtgcaccgatggcacatgcacccaatacgggggcacccgacccaggaccttaacacgtgcacaggtccttgtggcatttgcagcgacgcagtgactcaaagtgctaaagcaaagccttgcacgtggctctgagtgccagaggaccccatcattctgatgttacacgatcaccagtatcatagtacacgagacccgtatcctgtcttaactacaagtgcttgacacgcttcttgcttgggacagccatagaaccacaacacccatgacagacacggggacgtggacggggccatatcgttgccccaaacatccaggcaccagcatgcagataactggcgcgctggtcgttgcacaacgcgcacatggtacagcaggatcctgtgacagccagggatgcgcaccatcggtcgcagaacaggccccccgcaggaccgcgggacaacatcggcaagcggccggatgcgacaggcgccgatcaacggcacaaacaccatgctgcaaaccatggacttgcgaacacagagcacgcctttggcgaagcaacgggtaaaatacccggcagccatcaatcagcacacgctacactggatcatcgccaccgaggcgcaaccagacgagtctcaccgattaacaaccattaacacatagccatgagcaaaggggcacagaagccagcacccacgtaagcacaacgcagccatcacacaatgcgacaagcgagcacccacagcccacacgcacaaccaacgggggcacgcgaggcatccagcaaaccgggacacagacgaaccccagacagacgaagacacgtacaaacccaagcaagaccaacgtacgacaaccgcacacacaccccggctgtagacacaaagcgtcggttgcaacgcacaaagaacacaacccagagtctgtacccacacaacacgcgctagtacacaccaccaagagtacacacacaacgcgcacaccagcgg

SEQ ID NO: 724513 - DNA, 414 bp, Homo sapiens
  misc_feature (13)..(13): n is a, c, g, or t
  misc_feature (43)..(43): n is a, c, g, or t
  misc_feature (377)..(377): n is a, c, g, or t
  misc_feature (396)..(396): n is a, c, g, or t
gccttgaaaaaangaagtgtctgaggcacttaagtcagtatgncaacaataatgattattaaaactgaggccacctgtttcttatagccctcttgagcatattttgggaataggagaaataaaagttaagagcatacaattaagacaggcatggagaaccagaaggcctccatggtagctttgaaggagtcccttatctcttggaatcacagagcaggtaagggtgaggagcctctggtagacacattcttctaccacctacctggtaacaggttgactatattcagtctcttgtcatggagggtacaatgctttgtcctcacgggatattatttatgggatatgggatttgccttccctggaacttcagggcttcnggatgggcacactgttagnatttttatggggtgggac

SEQ ID NO: 724514 - DNA, 749 bp, Homo sapiens
ttgtttttacaacccaagtctttcaaatacttagggattgagcaggtcgtctggcctttaagcctttggggcctttgttttgcaaaactcaaaaccccccagggcccggaagtacccgaagcctccaggatgggtgaaatccaacgctttttttccgtgggtcaagccaccggttcattttggaggctctgtggttgggccacctcaaggagccgggcaacccccccttttgtgatgggttcctttgtggtgggggtttcctcaaacccgaaattgtggggattaacaattgccaaccattaggcccctccctttttccttccctttcttgccaaacagggggttaacaaccccaaaggcccggaaatgcccctttcccggcaaaggtttttaaggggttatttggtcccttctgggggcttctcccaaatgggttttcccttaccggttttatttttcccccggaatggttggggcccggcccatcccctttcccccttctataaagggtgggaattaaagtcccccaagggggttttcccttggttaaaaaaagaaggggggggggggtttttttcttgggttccctggccccaattaggggaaaaaaaaaaccctcctttcccttttttccccggtggggccaaattccccccaaagggggggggggttcccctttccctgggggccgggccctttttttggggttttttacccccccttttgggggattaacctgggccttggga

SEQ ID NO: 724515 - DNA, 600 bp, Homo sapiens
ttcgacggtgtctgttacatgctacaacgcagatgaatcttgaaaacatgccaagtggcttaagatcacatactgtatcattccatttatataaaatgtcctggccaggcgcgatggctcatgcctgtaatcccagcactttgagaggctgaggtggagggattgcttgagcctgggagattgagctgcagtgagctgtgatggtgctactgcattccagcctgggtgacagagcgagactccgtctcaaaaaaacaaaacaaaacaaaaaagtcttgtgggtgggggttggggggcagtggacagttcactgcttgtattctgggtacttacttgtgaatgtctgactcctgagcatcacagtcagctggtgatgtgggccaagttacagactgtctcttcaaggaacagttaccttcttacctttacggtgtaggcgttgtaaaatcaatttcatgtgaagaagagatacggaagagtgatagcttccaaagctctgcagtccttattgtgtatgtgtgcctgtatttacggtgtctctatctaaaaagtgctgatagtaatgaaagtcatctattaataaaagtaatgataaggtta

SEQ ID NO: 724516 - DNA, 203 bp, Homo sapiens
ttggcgcgcaacgccggtcacagcgcagagtagaagtctcgtgtccattcttgaccggtcactcctgcctacgctacatagtacgggatctctctaaaatgaccgggtgtcgcatctcctcctgcgatcttacgatatttcactccgtttctcctgctcaatggtctcttgggtcggcagggtgttcttctccgcgatcgaag

SEQ ID NO: 724517 - DNA, 348 bp, Homo sapiens
cgaaggcactgcggctccctggggacactcgtggcctctccaggttactacagatgggggacagcgggtcctttggattgatcgcagagttgaacaacagagaatgtgtgcacagtgccaggcacaggtgtggtcaagattcacctgggagaggaagtgggcaggggcagaggagtgtgcccacctgagctgaaaggctgcatggcaggtgaccattatcaccagtgtcgccagccaggtcacctctctgaattttgtggttgcaacctccatgattccctagagctgtttttacccagaactaatgaaaaattctgcacattaaattcatgctattagaaaaaaaaa

SEQ ID NO: 724518 - DNA, 123 bp, Homo sapiens
catttgggggaaatgacggagctgacaccccttctgtcagatgaggagctggagaaagattttgacgtagagtttatgtgtaaggagacttatgatatggtgtgtaaggagaaccgtcgacgc

SEQ ID NO: 724519 - DNA, 423 bp, Homo sapiens
agctaaaagattgtacttttctgcgttcagctgaacggtggagggctcagtgaggtgcctcacacctgtaattccaatgctttgggaggccgaggagggaggatcacttgagtctctcaagttgatggaacacaggtgccagccacgacacctgactaaatttggtttgatacggtttgttttgatgtagagatggactcttgctatgttgcctatactgcgcttgaactgctgacctcaggcagtcttcctcccttggccacccaaagagatgggattacaagcatgtgccactgtgcacagctgagatttttcgacttagtctttttgtacacccagtatcttatagaatatccataagatagattcataaataaaccattttcttcaatgggataaataaataaaccactgctataaatg

SEQ ID NO: 724520 - DNA, 702 bp, Homo sapiens
ctgtgctgtggtgtggagaacccctgaggttctgtgagaggtggccttcatgcgcgggactgaaccccatgcagactggtgggcagtatgcaccaagggcagagcagtgacttccctgtccgggagattctgtgccttggggagtggctataggaagcagggaaacagactgcagtatacaactctgagaactggaaagggacaggtttggcattcggctaaagggaaaacacacacacacacacacacacacaggcaaagagatgaatttggaagcagagagagttcaaaacttaaaaggaaagttgagtttagaaggaacttgccaagcttaagtgtggaagtctcgctgtggagatgtatggaaaagccaggcatgaaggaacatggctatggccagctagtgcaggctgcatggagggggtagacacaggtggaggatctcaaacgtagtctagcaccaggtcttacactgaagcaccaggtagtttataccaccaagccaggccttggactattctagaccacactgtctgccaccttcctgaagaactgtggtgacataatcatctttagtcaccttgcaggtaggcaagctctgcaccacatggtacagggccagagggagaacagtgaaggtttggcatagtttcacatgtgtggtcatcactgacatcagaacaagggtcttcctgggtcagt

SEQ ID NO: 724521 - DNA, 152 bp, Homo sapiens
cggcacaggttgctacgatttctgcaaacgggacaaagaaattggcaatatcatctcttattgcaattgataaaaagtttggatagagttgggttgtcattcacagtagagggattggattattacacctgaattgattgaatttaggtgaa

SEQ ID NO: 724522 - DNA, 159 bp, Homo sapiens
tgatcaacttgagctcggtaccctcgataggccacggatgtagtatttttcagtgcaatattagttggcggtttacgcagtatagtgagtgaaaggttgacgccattcatgacgttgaatgctccgtggaagcctggtgtgcaaggtgcttatcgagaa

SEQ ID NO: 724523 - DNA, 385 bp, Homo sapiens
cacgaggctgttgcagcagtttaaaggatccactcagccgccttaaccgccaaccagcaggctaagggaggaacagaatgaacaatgtttggatcccaatgactggagatgaaagttgcaaaagctctgcccaggcttctaccaaggattaactttccagggcatctgctgaactgctcttcggggctgtctgctgagattggcggtgggaccctcccgcctctcactcgtgcctttgttccccacgccggcctaaccccgcgcccctgcgctcgcggtcagggcacctgacccacgcgccgcccgccggggatgcgggagccgccactgctaccgctgccaccgctgccgggcctgctccgccaagcacatgcgcaatggcgac

SEQ ID NO: 724524 - DNA, 350 bp, Homo sapiens
ggctgtacttccagcatacctcgtgatacagtcgccacagatagtcttactatctctagtcgtaggtcggttgtacactgtcactcacctttagtcggtccagagcgcctgcacctagcttggttttgtaggtgcagcatacctcgcacggtccgactgaatatgcgtctgagggcagcaatgtggtatggtcttcgataatgcttggtgttcatcggcttcataaggaaagccgggtacttcaacttgtttctgtagatattaccagacatgttgacacgttcacagcgtgcgttctccaccttccggcccatcagtccctgtttagccacgatggtcgtcagtcggcc

SEQ ID NO: 724525 - DNA, 464 bp, Homo sapiens
  misc_feature (230)..(230): n is a, c, g, or t
  misc_feature (460)..(460): n is a, c, g, or t
aattttacatctgcaagcatattttagaaattcaccaatattgatgactaattatttggccaaaaaattgacagtgattgttgcaattatatttctaaagacccatgcaatacaatggtgatttaaaatatgttggtcatatgagtttttaaaactgaattgtttgttatagaagtaatataaatatttaaaaaatatatatctttgaaaaatatagtgttttttttttntaaactgtattccaaagccgattcctgagactgtgctttatatgcacctacggctcctaaaaaacatcagccacagcttcaagcctaagctcacccgagacccaagtcaggacacctctggtgtggagcctggggatctgtttttaaagaactccacagtgcacagtcagcattcagaaccaccattctaaagttttatatgtttcacatggataggcagatagttgaanttgt

SEQ ID NO: 724526 - DNA, 281 bp, Homo sapiens
ctgcaactgagctgtgatcattgtacactgcactcccgcctgggtggcagagtggagacccctgtctcaaaaacaaaagtttgttagtgtattagtctattttcatactgacttataaatacaatatctagagactgtgataatttatcagaaaacagagaagtttaatggcactcacagttcccacatggcgtggggaaggccattgcaaatccatggccagcaaggcgcaaggcaggagcaacaggcaactatctataaccacgggtggccaggccaag

SEQ ID NO: 724527 - DNA, 1569 bp, Homo sapiens
  misc_feature (1263)..(1263): n is a, c, g, or t
ggaggaaacaggcatgttgacagacggacccgcgctgcgttggcctgggagtgacttcacaggctccactgtcagcaagcacacctggtgcctctgtctccagccgccgaggcctgtgacaccatgaggatcataatctatctacctgcctggtggagccagaagatggcagtgaagctgtacctgtgccaacgtgccacctcttccaagcacaagctgcttataacatggagagcgtactgctgtgtcatgtgcagctgagaggatatgggtgcctcgaccgaggcacaggctacaccgtgcactcaactagaaaacatgcatggtcccataagccgctgcacactggacatcgatccacgcttgacacagcatggaagacatattggcatgcagactaataagcgcagaccacgtggctgacacgactgacccacagccactatgacgcaacaactatccactgttctgatactacaagcacactctgcgctgagcaaacacgcgtacataggccacttgcaacgtctactctgcagattggcacaacaccataaccaggaaatgacaagaagacacaatcaaggcactaactcgctccagtcgacaccatacgcccaacgaacgacagctcaccaccacgaaccgcccaacagcacaccgcacggaacacgcccagaaacctatcgacaaaccagcagcgaaggacaccacgacatgcgaaccatacggcaccacaacgacgcgcccccctacaaatacacaccgacgcaaacgcacacatgaacccagcaccacatcacaacaaggaacccgaaccacacgggcacgcgccgacaccatgtcaaaccgcacccaacccactcacctccagaacacgccggcaaacatgcgcacaatgcagcaacatacagaagaaaaaccagatcgacacacacagggagggccaaccaagtcggctgaccacaatgaccactagcgggaaaccaaaaacaaacgacagaacacacacaaacaaccaaagaaaagaccaacaaaacaagacgcacaagacacaaggagacaagaaaatacaagcaccacgacaaacacgggaaatacaccaacacaagtgcgaactggcacggacaacagcaacatcacaacagagaacagaggacacacacaaaaagaaacagacaaacgaacacaacgggaaaaacaacgatggagggaagcaaccaagcaaaacaagaggaagagcgacagggagaaagcacacanatcacaatcgacacagcacacaggcagcacacaatcaccgagacacaactaggaggcgacaccaacaaagacacccagaaaaagaacacaacacaccagaagtcaaaataagaacaagccacaagcagaccacgactaacgccacaccacgcacaccgaacaaaccaacgagagcgaacgcgaacgggaaacacgaaaccaccacaccagaccacaaccacaccccaagacacacagagaactcacagagcataagcgatatcaagaaccaaagaggaaacgaaccagacagacacaacagcgcaa

SEQ ID NO: 724528 - DNA, 141 bp, Homo sapiens
tatcatggtgactctgtcttagagaaactgaagagttcgtcagcagtttttacaagaattcgggacctccgcgttgcttcttttcttccaatatttggacacttagagtggtttttgttttttcttttcagatgttaatgt

SEQ ID NO: 724529 - DNA, 381 bp, Homo sapiens
ggcgggcggtggtcactgccgtgtaatcccagctctcagggaggccaacgaggggaagaatagcttgagcccaggagttcgagacctgcctgggaaatatagcgagaccccgtgttctccaaaaaaaaaaacaatcaaacacaacaaaaaaaacattgtgtggcgaccgacattcagcatctaggaacatgttttaaacacaacaatttctgttggtccacgcgcggcccaaagatgttatcaattgaacatatttggcaatgatagtcttggccccaaaagaagaacttcctgtcgcctatagcacacaggtcgtagggatccaacacaaataaaaaacacccgccgttggaacgccgtagttttcttcgaacacactcc

SEQ ID NO: 724530 - DNA, 355 bp, Homo sapiens
  misc_feature (13)..(13): n is a, c, g, or t
  misc_feature (56)..(56): n is a, c, g, or t
  misc_feature (350)..(350): n is a, c, g, or t
gtaatccccagcncccatgagaggccaaggtgggaggagcacttgttcgagaccancctgggcaacatagcgagaccccgtctccacaaaaaataaaattagctgggcttgatggcgcccatctgtagtccaaggtactcagaaggctgaggtaggaggatcccttgagcacaggagtctgaagttacaatgagctataatcatgccaccgtactctagcccaggcaacagggtgagaccctgcctctaaaagaaaaataaaataataataaaaagaaaattttagggccaggtgcggtggctcacccctgtaatcccagcctgggcaacgtggcaaaaccccgtcactncccaa

SEQ ID NO: 724531 - DNA, 239 bp, Homo sapiens
ccccccccccccccccgggggggggattttagggggggggggggtaggggccccccccccaccccctccctctttttggggggggggggggggggggggggcccccccccccccttttttttttgtgggcccccggggccccttttttttttttttttggggggggccgggggtttttttttccccctttggtcccccccttaataaggttttttttggccggggggggggggggggga

SEQ ID NO: 724532 - DNA, 304 bp, Homo sapiens
gcacagacgccagagcgaggagggcgctacgcgacttggcaagatgacccatgtcctgccgtccaaccttctgaccctctttgccccccgcgaccctattccatacctgccacccttggagaaactgccacatgaaaaacaccacactcaaccttattgcggcattgcgccgtacatctcgagagattgaggaccctcgagatgcccgtactccaacttgcgctgaaacccgagaggagcgcatgctgagcacaagacgctaaaagattgagcggcgacagcaagatgtggagacagagcttaa

SEQ ID NO: 724533 - DNA, 724 bp, Homo sapiens
tacgtcgctgtctttccactcgttgtacgccttgtagctttcggccttcttgtccttgtgggcgtacagcaggtcctggcgggtctccagcttgacgtggccgtcggtggtgccggaggcgaggttgtctgtgagctcgtcgcgatcgtcgagcaggccgcgaccgaaggaccacccggattcggttgcgcggtcctcgccggacgtcaggaacgatactgagaggttgtcgtgctcgatggtgtcgagcagggacgcgttgcgctcggcgtttcgcaccccgatgccgcgcagctcttcgcgtccgaacgcggtgaggttgccgtagccgccctcaccgggaccagtgagggcacggtttgcttgggtcatcgcttcgacctgggggatgaggcgctcgccgagctcagtgagttgaccgcgctttttcgcctcggcgagcatttgagccgccaggtcgtcgtacttgaagctggacaggccgcgcgaaccgtggcggttgacgctaccggtgtagatctgctggaagccggcgggtgccgcgctgtagctgtcgatcgtggcggcgggggagtacggctgcttcgttgagtagtaggtggtatctgccgcggcgccagtggcgcggctgcggcagcaagcgctgcggcacttaccgcagcgatgcggcgacgggatttaacggacacgggaagactcctaaaaacacaggtgagaaggggta

SEQ ID NO: 724534 - DNA, 387 bp, Homo sapiens
ccagagccataagagaaggcacactcctggagcagccagtcttgggcagagtggtgggacagaagcgagtgccggctaccgtacagggctgaggtgtacatgttcccattgtagagtggagaggtaacgggaagccttggtttgcttgtcgaacatgtcctgagaggcctataaaagtgctcaatccaggtccttgtaggtgtaggtgtcttccagctatcgccccccgaaagcctccagccccttatataagctggtttgtgtgtcactgatggctgacaggacgtcattgaacatcaggcgcaccagcacattctggaccatctagcaaaaagggtgtctgaacgctcatgtactgtccatcgtcacgggtgacgagtgccaggt

SEQ ID NO: 724535 - DNA, 150 bp, Homo sapiens
ctataccatttcgtattactctttgtaagattacacatgccagctactccccgataccagttgagtacaggcctctaacatcaccacgatcaaaagggacaagcatcaagcacgcagcgagtgcagctcaagggggatcctctcagagtc

SEQ ID NO: 724536 - DNA, 119 bp, Homo sapiens
ttttttgtttcctaagtaaattaaccctaattttccccctttcattttgtttcagcctcctgtataaaaaggcccgtattttttgcccctcatactttgtaataaaacttgaacatgta

SEQ ID NO: 724537 - DNA, 203 bp, Homo sapiens
  misc_feature (36)..(36): n is a, c, g, or t
aaaatgaagagagaagcatagaatagctgttctgtntctagcttgggtgtcctggtgctactaattaataatggggatatcagaggaaaagcagcttggtgacagaagacgatagttcagttcgtaagattttaccttgaggatgtttagcaatcagttggtttcactggcttaaaattcaaagaattaagttagtgctaaaa

SEQ ID NO: 724538 - DNA, 223 bp, Homo sapiens
gccggacgctgtacactatacattctgattaccatgcatgcgccagtctctctcacagaacagaccgtgacccaggagcagtgtccgtagtggagaatcagctactaacagagatggatggtctgtaaacacgccagcggtttaaccttatagggagccactaacaggccagatataattgaccctgcaatcctgcgcccgggccgcctggacgaaacactgt

SEQ ID NO: 724539 - DNA, 449 bp, Homo sapiens
tacggccccagcccgtgaaagccggtgatgcaatcgccacattatgtaagagtgtaggtatctcaagaaattacaaggcataagtgcactgcttgggggtcatatgcacagaacaaaagacaatggaccagatgtgactttgaaaggcctactgagtacaaagcatacacctgaaaaaccttagcgcttaaaggctaaacctgaagcttaggtgtgtgaaaggtaaccaaagaaatcgagtaaagtaaagggagtaaaacataataacagtaggaaaaacatgaaactggaaacgaacagaatacagtgtaataaattggagaaaaaagaaatgatctacatatacaaaaaaaataagtgcacacagaaaaaatgcagcttataagtaggataagtaaagtagataaaagaagatagatgcatagaaattaaaatagtaaatattaaaa

SEQ ID NO: 724540 - DNA, 334 bp, Homo sapiens
ggccaccccaggcaacaagggagatgggcccaaccaaaatctgccagttctgctaatcagtcccatcaggtccacactcttgcacgagggacagctctgcgaaaccagcatctggtggagttgactgagtgggtgaaactgagatcaagctgctgagagagaaatgcaacacagtgcacatgtaggtgcaccgcttatcctgaaggtggaggacggcaacaacttcagggtgtctatccaggaagacactgtggaccagctgtggaccgtggatagcacagcggcctcctctctaatgcggctctccaactactacaacacccagggcccaatt

SEQ ID NO: 724541 - DNA, 501 bp, Homo sapiens
  misc_feature (109)..(109): n is a, c, g, or t
aactgagaaagccagaggccaagagaaaaaccctcgccttccaaagaaacgattgaaccggagaagcaagcaggcgaattgtaatgaggcgtgcgccgccaatatgccntgtacattccccaagcatggcctttttattttactttttttagcggtttaactttgtaaaaggcaaagagggtggatcaagtttaaatgactgggcggcccctttcccatcaaaaaactactgacaacgaaggccgggcccccctttcccatttgtttatctatttggcgggcagggaaggaaaaaacttgcatgttggtaaaggaaaaagtggggtggaaaaagtggggggggcccccagtgaaatttagagtaaaccccagcgggcccaaggggtcccgcaggctgtaaacccgtttaatcagaggccccttttttttttttgttcaaaagattttaattattggaaggcccaatttttttaaaaggcaaataaaaagtttaaaacctta

SEQ ID NO: 724542 - DNA, 197 bp, Homo sapiens
cgaaacaccagtagcatgaggaacaggtgtcacggtggacacggggcgtgcgcgctgtctctccacctccatcacacttatgctaacagggacgcagacaccttcaggttcctttgctcaatgagatgccagaggctcttgaattcacaaaggggaggccgtgatgatcctcctgcatctcgtctcttctctcgtac

SEQ ID NO: 724543 - DNA, 410 bp, Homo sapiens
ggctccgtaacgaggacttacataattacctttttatgtatgtatgtacgtacttgtttatttatttatttttgagacagggtctctctctcccaggctggagggcaatggcgcaatcttcgctcactgcagccttgacctcccaggctcaagtaatcctccctcctcaaggcgtgtgccaccacgttcagctaattttttaaatttttagcacagacagcgtctcgccatattgctcaggctggtctccacctcctgggctcaagcgatcctcctgtctcgacctcccaaagtgctgggattacaggtgtgagccaccgtgtaatcccagcactttgggaggccgaggcgggtggaccacctgaggtcaggagttcaagaccagcctggccgacatggcgaaaccctgt

SEQ ID NO: 724544 - DNA, 872 bp, Homo sapiens
gcagtggcgtgggtgggaagcgcagactcgcaaaagcgatgccgatactggtttcctggggctgcggcccacattcgggtgtgaccccaggctgctcgtagagcgcgctgtgcgggctgcaggctcccaagacaaatcaagacaagctggggacttggctgagcaggaattgcgtccaggcagccgcgtggtgtgctggtaggttggaccagattcctggcaagcatgtgcgagttaacaggagccgctacgagcggtggcttgttgtcagaggccccaaatgcaaaaagctcttcttcggtggacactggcctccaaggaacaagggctgacaaagaagagaaccacaagtccagaagaagtcactgacttctcaagaaaccccgttcgggttgacgcatcatccatcgagaacacatccaaagtccctgaccccaaagacgtcctcgcaccacacaggtacaccaacgccaagaagctcaggcggaaggagcagcatatgggagaagctggccaagcagggcgagctgacccgggaggtgcgcagggaaccaggcccggaatcctcaacccatatcgtgacaacaaagggccaagacccgggacccaggaacaacgtagagcggaccttctacgaccatcatgggactcagacaaccccctggacaggccagtaggttggccaggatgagataaacctggagcagaccaagaagaaggagtgaagcggcagcaagcactgcaaacaagacagcccaggcgccgcagtggaggatggagctagcggagctacctacaatccatccgatgaagaccagcagacctgtactcagcggccacgaggtggagagcagcggagaaagagggggacg

SEQ ID NO: 724545 - DNA, 253 bp, Homo sapiens
tcaagcgcctggcgcactgtcctaactgctggttttccactctggttttagctcccggcgtttgcaaaatgaaaattgaggatgtgaagagcactacgaagacgcagcgcatcgcctgccacagccacgtgaaagggctggggctggacaacagcagcttggccaagcaggcggcctcagggctggtgggccatgagaacgcgcgagaggtgtggtcattgtaccagggagttgggggctgcaagcatggctg

SEQ ID NO: 724546 - DNA, 166 bp, Homo sapiens
ttttaacctaattggtatttccagggtttcacaaaggccagattttatttcagttactcagagcgaagaaaatgtctctgaagaggtgactcatcattacccatagaaaggtatccactgtatccatctcttataggaacagaaatatatcacatttccccccccc

SEQ ID NO: 724547 - DNA, 798 bp, Homo sapiens
ctagcatttcttgatggttgactcaactgtataattaacaaatatacatagcacgagtcaattgaatcatagtgccagttatgtcacttattggtcagtgtgctaaaggtattcagtcatgtcgtctagattgactgttaccatgtgtgcaaaaattgtccacgcatagataatgctattgtacaaaggatctgttaatcttccttgtaattgcctgcctattagtccatattctgattccttatgttcatcactgatatgttcctgatcagggtcagttgctagtagttgagcatttactgggtgaccatggtttaggggttagatgttatgtgttgtctgcgatgttaacgacaaattgtgtacatgtaattccactattggtattaccatattcagtaatcacatgatcaacggaagtgtacccaataatttcctataaaattttgcaaaagtcctttatacccctgaccacactcagggtgaatttttgtctcctcgggcatgtcgaacaatacaggagagaggacatggtgagatatcagacaaagcaccaaagtagcgtagtgcagtattttcctcttttctatacttcgagccattatatgaagagcaagtttggtcattacaaatccttgtggctattacctgagatccgataatttatcccccgctcataacatgggcgattgccatactcacctgcagcacacatccaacttgctaatgtgctgcgacggaaatgccttttcgccatgcctgcagagacccacaactcgctcgcaccacctcccaaaa

SEQ ID NO: 724548 - DNA, 100 bp, Homo sapiens
agggagcggggctttaatctgttggtctcctggactgaagagagggagaatagaagcccaagactaagatctcaaaatggtttattacccagactctttg

SEQ ID NO: 724549 - DNA, 261 bp, Homo sapiens
gcagacccagacttcgctcgtactcgtgcgctcgcttcgctttcctccgaaccatgtctgacaaaccgtatggctgagtcgagaattcgataagtcggaactgaaggaggcaagaccgcaagagaaaatccactgccttccaagacgattgacagagagcaagcagcgatcgtatgagcgtcccgccatatgactgtcatccacagcatgcctctatttactcttagctgttacttgtagtgcaagagtgatcagttaatg

SEQ ID NO: 724550 - DNA, 476 bp, Homo sapiens
tcctcctgcggtggaagtctagaccacactcgtttctttagtgccaaagttacgagcggctactctcacttacctactttactaaaatggcatacagattggcattgaccgtgttgaagaaattttaccactaagaaatcttttgcctcatctacaaagccatagttaagacttgaggcattcaacttaatgccaagtataagcatttcccccgtttttctttcaattttattcttcattctgactacagtaacttggccctgaactacgagattagccaagccaacagtcttctaattggttttcagaaacttcaggccgggtgccgtggctcacgcctgtaatcccagcactttgggaggccaaggcaggtgaatcacttggggtcgggagttcgagaccatcctggccaacatggtgaaaacctgtctatactaaaaatacaaaaattggccgggcatggtggtgcatgcctg

SEQ ID NO: 724551 - DNA, 326 bp, Homo sapiens
  misc_feature (293)..(293): n is a, c, g, or t
  misc_feature (307)..(307): n is a, c, g, or t
ttgaattcaccttttcccaaaagaaagcaactgttggccaggcacagtggctcatgcctgtagtcctagcactttgggaggctgaggtgggcggatcatgaggtcaggagatcgagaccaacctggccaacatggtgaaaccccgtctctgctaaagatacaaaaattagctgggcctgggtggcacatgcctgtaattccagctacttggggaggcttgaggcagaagaattcgctttgaaccgggggagtcggaggtttgcagttgagcccgagattcatgctgctgttanttccagcctgggcnaacagagccgagatttccg

SEQ ID NO: 724552 - DNA, 157 bp, Homo sapiens
tttctctgctcgctctaattagtgaaaaacaaaccagtattgtatatctcctcagccattcatttttatcattcaggttgtcctcagttgcagcagcaaatattcctttcatttcattcaaactgagtctatacactgtattgctaattattaggca

SEQ ID NO: 724553 - DNA, 342 bp, Homo sapiens
agactgcggagtcagacggcgctatgtacgccctcttcctgcaatattatatctctggaatctacctgccctatggttttctagatacacgggcttggtaattgttacccaggctgctatcacggccagtagctttaagagatcctctcaccacagatttccaaagtgctgggattgcaggtgtgattcatggcacccagcacttgtgctgccttatctgtacatgatccaggcccagaacccaaactccggcactgtatagatgaccactttcgtaaactactgacctagcttgtcgccaatggttgattgaacttcccataactccacttcgtgtctgta

SEQ ID NO: 724554 - DNA, 1050 bp, Homo sapiens
  misc_feature (307)..(307): n is a, c, g, or t
gccacggctgccagaccggaagcgctccgctggaccggatcctgctccgctgagttgaaacccgggcgcagcgaagatgccggctaccactcttctctcgtggatccgtgataccaaactcatcggagtacatggcactgtggcctatcagatagtcacatgtcaaaggacctgtccccaggagtagacaagaatgatacagatattgctggatgaagccatcgtacttgacttcaaggggcgaatggatcgttccttcaaagcagctatgaacactgatatgacatgaatgctgcttaggaccgangcactactactagtaagctcgtcgtaactagtcttcgtgatatgttcgtggacaggaagactgactagaaatagctgtcggagtttcccataagaggccgaaaggctggatgaagaagcacatactggtacgtactgcctggtggacactcagcatagagttcgtgtacgccagtatccgctgggatgacgcccgtgggcctgtgatctcgacgtgtgagactggcaagctgtctacgtgcctgacaaacgcgttggcctaacacgcagaagaccagcgcaccgactgcaacgctgcatggaacgaggccctttattattaagcatagcctacgtcttaaaggggcccacggaagcaccctggggcaccctggaggcaacctaccatggtggcacccacaatgcgttctttcgcgaagccccccgttccaacgaacactttggcacttactacatgccgccaagcgccgagaggtcctgcgatgggccacccgttggccgctgttggggtaggcacagagggatgggacacgtacggggtgtccaggcggtaacagcgcacaggggaacgcgatcccttctcatcacacgcgtaaaacgcgccatggcgaggcaagggggtggaaacaggggggaaagcccccccggggtggcccacgacaccgaagccccggagccattccccacgaaggcccccatggtgcggccaacgccacctaaaattacccagggccaacggaactt

SEQ ID NO: 724555 - DNA, 493 bp, Homo sapiens
gggggagtctgtcagagaggagaccctcaggagggctaggagaggaaggagcaaatacagaggatagaaggtcccgtggcctggtgtgccctcacacagggtatgggtggtccaggactgccactcccgctgccacaccaccatctgcatgctcgatggcttgggttcgaagtagatgccccacgtgcttgttcatcacgagtgtcttttcctgcctgacatagaccccaaagatgcccagctctgaaatgcactggaccactcgggcagggctgccaggccgtagcaggcaattctcaaaaggctcaggttcgatcttctccatgaggatgtaggaggccctctcctcacggtccttcagctgtttcagggcctgtaccatttcctccccatataggttgttacctccagcctctctctggggctttagcacaaaccggctaggggcagcaagggcctcggcgatggcctggtccccttcttcagccacatc

SEQ ID NO: 724556 - DNA, 155 bp, Homo sapiens
  misc_feature (38)..(38): n is a, c, g, or t
  misc_feature (48)..(48): n is a, c, g, or t
  misc_feature (73)..(73): n is a, c, g, or t
ctagctataactctccttcctgcaagtatatcactagnacctgcttgnagaaagtcgacacaaaaatgctatncaacgggctgcgagcataatcaatactaacttggcgcaagtagagaaagaccaagcacgcctcatcatgccctcggcatatc

SEQ ID NO: 724557 - DNA, 122 bp, Homo sapiens
gcccggagggcagctgttgaacatagaggagaataacagagagctcgctggccaaactcattcaatgagtgaagtatctccgtgagtctcagacataccgaaaggcgggtccgcgggattgg

SEQ ID NO: 724558 - DNA, 884 bp, Homo sapiens
ggggcaaagctgcccaaggctgtgggagcccaccttgcataagtgtcccctggatgtgagacatagagtcaaaggagatcatttggaactttaaggtttaatgactgcccttttgatttggatttgcacaggggctgtagcccctttgtttgggccaattttcttgactgtgtgtatttatgcaatgccctgtaccccaatgtgtgtatttacccaatgcctgtaccaaaaccaagtaactaacttgcatttgattttacaggctctagatggaagggatttgccttgtctcagatgagactttgactgaccttttgagttaagtgctggaatgagtaagggcttgaagggactgtggaaagatatgacggtgtctttgaaatgtgaggacatgagatcttggagggaccaggaatggaataattatggttggatgtgtactcaccccaaatctcatctgggaataatagttccataatctctgtatgtcaatttcccccatatattctcgtgatagtgagtaagttctcatgagatcctggatggttataaggggctccccttcactcggttctcataccttcccttgttgtgcagggtgacgaaggaccatgttactttcccttctggcataattgtaagttcctggaggctccagacatgcggaggggagtcattaaccttttcctctttccttataataaccagtccaggatggtttatagagactagagttagtatacgaccttgaaccgtgtgcttcatctcacaaataagaggaaagtgtccaagacatgggttcagtgcacaaggtaaaaacacgaggggttacatggtcaaaagttgcacacacagggtcaacgagggggaagtcggaaacaact

SEQ ID NO: 724559 - DNA, 948 bp, Homo sapiens
  misc_feature (51)..(51): n is a, c, g, or t
  misc_feature (66)..(67): n is a, c, g, or t
  misc_feature (69)..(69): n is a, c, g, or t
  misc_feature (78)..(78): n is a, c, g, or t
  misc_feature (95)..(95): n is a, c, g, or t
  misc_feature (97)..(97): n is a, c, g, or t
  misc_feature (99)..(99): n is a, c, g, or t
  misc_feature (106)..(106): n is a, c, g, or t
  misc_feature (119)..(119): n is a, c, g, or t
  misc_feature (144)..(144): n is a, c, g, or t
  misc_feature (148)..(148): n is a, c, g, or t
  misc_feature (159)..(159): n is a, c, g, or t
  misc_feature (161)..(162): n is a, c, g, or t
  misc_feature (164)..(164): n is a, c, g, or t
  misc_feature (173)..(174): n is a, c, g, or t
  misc_feature (182)..(182): n is a, c, g, or t
  misc_feature (185)..(185): n is a, c, g, or t
  misc_feature (196)..(196): n is a, c, g, or t
  misc_feature (203)..(204): n is a, c, g, or t
  misc_feature (212)..(212): n is a, c, g, or t
  misc_feature (215)..(215): n is a, c, g, or t
  misc_feature (266)..(267): n is a, c, g, or t
  misc_feature (294)..(294): n is a, c, g, or t
  misc_feature (297)..(297): n is a, c, g, or t
  misc_feature (342)..(342): n is a, c, g, or t
  misc_feature (349)..(349): n is a, c, g, or t
  misc_feature (380)..(380): n is a, c, g, or t
  misc_feature (385)..(385): n is a, c, g, or t
  misc_feature (398)..(398): n is a, c, g, or t
  misc_feature (405)..(405): n is a, c, g, or t
  misc_feature (926)..(926): n is a, c, g, or t
acatgtttcccaaatggggacctcaaaatctatactctccagctttaagantgcgcggggcatttnntntatatttantctcccatggatagganantnataatgntttcacataaaantacagtatgaactgatggacaaganctcngggccaggcgncnngnggcccaggnnctcacccnggnccagcgactcnttttttnntgcaaccntgngcgtcactgcctcctgggccaaagtgagcacaaaggtcctctctgtggtgnnatgcccttgcatttgtgttctaagggnggngggcagacaccattgcctttggtctacaactgaggaaacaatatngggagtnaggtcacagcttcaaggtgacatggccaggnaagtngcagagccagttntgggtcntcacacactttcctcttcttgactgttctggcgcaggtgcttaagatttgggggaaggtgggtgggtatctggcctcttctttgggactcaaattgtgttatctctctgagaacccacaggctccctctttagggctgaggtgagaagttctgaaagtcaagcagacacatccaggcatttgggcaagaaacttcttccttccaaatcaaaggtgaaatgaaaacgattatgagcccacgggggatgaacagaggtgaatggtgggctagtctcgaggatggcctaattcagagtttcctaagtgtcagccattcatggaaccacccctgtgatttttgctacctctctggatctgtgcccacttttacgttatgtttttctttaaactgattcactatttttttttacagttagctttatcctagacagaacatctatcaaactacaggtcaatatgctaatcatatttttatattatacattaaatatataactaaatagaaaatattaatttgaatancatctaaaatcttcttgtgaac

SEQ ID NO: 724560 - DNA, 115 bp, Homo sapiens
cctgtcgatcgcgctcggtcccgcttagtctcggagtttcccagacaccacaacttgcgcctttgtgccccactctccatgatgaaccgcagcacaccatagcagggtggatcct

SEQ ID NO: 724561 - DNA, 1777 bp, Homo sapiens
  misc_feature (535)..(535): n is a, c, g, or t
tctgtcccgcagggtgtttggttgtgtcttcggcgaacacacacggtcttgttttggtttgcccgacgcagcgagtgtgtctggtgtggtcactccacgtgctttctttccggtccctctttgaaagagggttgctcgcggtcggcccatcttctgtgagtgctccacatggccgacgacgcggtctgcgtgatagttctgtttattgttgcacgccagctcgtggtgtggtttgtcccacgatccgaccggtgtggtagcccgcccgccgcacgtgtttccgtcgtgtgatattgtcgccccgccccgtcggggtgtggtggtgtgcgcgccccggatggttggttccgttctcggagggtttcccccgcggatgaacatttgttggttgtggagaccccccttgttgggaagtttacgaatttgtgtctttggggagcccctcgtcgctaggttaacgtctgcccaccgtgtgtcctcacagatttctagctcgcccccacaggtatgtgagaccttttgtggagggggcccnccacctcttttcattgtgcttcgttgtacaacgactgctctattaacattgtgggggacattttttgctgttcgtagtagaagagactctgtgtctacaagccttcaatattgggggtgatgacctcagtgttgtgtgctgtggccagcacactgttatacagaagattgtggtgttgtcgtcacaccagcggcggcctgaaaccactacgtcgaggtagggtgaaaacccaccaccgcaacatgttttgtgtggtgccccccccacagcggagatagcacacaacgttggtctcttgtcgccccaccatttggtgaagactttttgtcgtttccgcggtgacatctcgcggcgagaaaagtgcctatatttatacctcgacatcaaagccgtcgctggtttatgagatatccccgcggtggtgtctcacgcgacccacacacaaaagagagagagagagatatacaagagagagtgcccacacacactgtggtagagagagagacatataaatacagagagtctctgacaccacactgcggggagaggaatagaagagagaagagatacgctccccctcaccgagagttgcgagagagagagagagataaaaagagagatgccctgagataatatgtgtgagagagaaagagataaaaaggagaggagaaagagagatattctcaccacagcagagagatagacgccacaaccctgatccacacaaagagagagggagagaataaataaagcggagaaagagatagtcctgacccacacaagagagaaaataccacacaccaaaagtgtggtggggataaacagactcgtataagtgtaagagtgtatacacacagaggagcacacacgcgcactcgtctttgagagagagactttataggactcgcccatatgtggagaactctcacacacagtgtacccccgccggtgggcgtctacattggcgcaccacgagaccccctttgggttaaaaaggtaaattctttggcaccacattgtaagagatacacccagaaagagcacacatctctttcttagatcttacaccacatccggagacctgctctctggtccattccccttgttatgtaacctgggtcttaaagaacctggttagatggggtgttagagtgatattttcccggtataccccttttttggctgcaaccctactggtccaataagaaaaatttgtaaataaagttcttttgggtttcttat

SEQ ID NO: 724562 - DNA, 184 bp, Homo sapiens
tgccgcccaccttccgacacgcctactaccgcggactacaccggctgaccaacgacacgtgacacggaacacacctgacacacgtgaccccacggccaagaccccacaacttctggatcgacgacgcactatcctgactggacactgcacggatgagcaccctatgatgacgacgacctacctt

SEQ ID NO: 724563 - DNA, 339 bp, Homo sapiens
cagagggccaccaggaactagggattacacagaaagacggtccctagagccttcaggagcatgcctctgacagcctcctgattgcaggtttttagcctatgagaaagcagatgtctgcttttaggcccctgagttaacactcatctgttagcaaagtctgcagaatccagacaccgacactcatgtttttacttaaaacgcagccttccctttactcgctgaggctcactgcaccccaccttatcaagagaagcccagcgtgtctgatgatgaagccactgtgccgctcatcgtggaaggaacacggcatttccctgttagtcaaaatttagacattga

SEQ ID NO: 724564 - DNA, 284 bp, Homo sapiens
ccccaccccccatctccaccctgaggaccctggcccccagcaacagcagcatcctcacgcatctgctagggagtccagtgcacgcctgctcgagagctccagtgcagctttgccacaggattgcaaaaacaaacccaccatgaagaggtcgggattgtgtgcagttcactccctgcccacaactgcgggtgccgtcaagcactgtgctcatgagttccttgggtcggcttctccaccgtcagtgtagtggtgccttcgttggaaatacagctgggttcatcctt

SEQ ID NO: 724565 - DNA, 907 bp, Homo sapiens
gctctcatggaactcatggacaaagagaccaagctggtgaggttgccccatccatgcagcaaaagccctgctccgtgcaagcctcagccctatagtggcacacagagccccctaaacgtccgacggtggtgccggtgttgtgggggccagtggtcaggtgatagaggggatggggtgtggaggcaagcagagggacattgggaagggtccatggatcgcaggcccagttcaggggttggataccaggaggcctgtggcatgagcagcgatggactatgtagttgactttggaagcatgcaggacctgtcctggccaagggacaatgagaatggggccagcaggtgggaggcaaggcctgacctccctcacctccgatctggactttagttgagctataggctggtaccatacaggcaaatattcaggtgcttgatttgcaaaccaatacctccccagtggccctgctgagctgcagacagagggagacgactgggcagccaggaggctgcagtggcagcaaaagctggtcatgcgaacgcggcatggagaagaacacatcacacatttgagattccatcgtacaccacacatacaccacaaaggagagccatgagcttgagatcaccatttgaggcctaacatggaagcaccacggtagagatgcatggaattaccacagaaaaccattggagaccttaatgcaaagggataccaacggcccccgagggagactacagcgtgagagaataccacaaacaaggaaacatggtcatagggaaagccaaaaggccgtaaacacaagaaaagacgggaacacaaagacacacaagaagatagagacgacaacaggctgggagccaaacgcgaagataccctaaaaccaaaacaacaggaaacgcaggagct

SEQ ID NO: 724566 - DNA, 212 bp, Homo sapiens
gcgtgtgcgtgcgtacgttctctgattttctggtccgcctgcttcggggcactcccatgtgttcgatccatgcttgctcgcggtttgctcccatcaccgcgatggttgcttcataccccacacactcatctgcagccagccaccattgcagcgtgacataccattcatggacgacaacggataccggttgggcaccggagctagcgcgactg

SEQ ID NO: 724567 - DNA, 599 bp, Homo sapiens
tgtcgtcttatatatattatttgagttcttcgcagtacatgtgttggtcattaaagttatagggaaggaacaaaattatttggtcagaattaaaagatgcttaattatttagtctgtttgtggagggcaggtattcacgtggactgagatatcaatgtaggatacagaaaataactgttcattgtcttcctgacagtgtgcgtaaggcactatgctgttgaaagcttcaaagtgtccagatgagggaaggactaattaataattactcctgattcgtagatcagtgaggtaagagtgtttcaaatttatgatagtcttttgggtattcagaaacctttccttatactgcactggccaccagagcttaattttcccagcagttacagcaatgggagatagaacagtctcaatcttttgccaacaatcaggttcctagaaaccaggtaggtgtatcccataacaagggaggagcataccacagaccctcatttgattaattcatttgatctatctatgttattaagtacctactaggaatacggcattgtggaaatactatccacacgatcacccttgtctagatgcttatctactttcct

SEQ ID NO: 724568 - DNA, 754 bp, Homo sapiens
gagcggcgtggttccgggctccgggctctgggtggctggcggctgtgagcgtgcggcactgcgtgcgcattgccattcggtgcgccgtcggcggcttggcccatgtctggccagcgtggcatgacggcaagcggtgacctgatgcccagtctgcacttgtgaagcattgagctgcttgcgcctgccgctgggtctcgtcctacctccggtctcggccgccgttggcgcttggacgcgcgactgcctgcctagaatgcagaaccatacgcgctgaacgggacctggctggcgtgctgagcctgcgctgcgacagccagacgcagggcaatgcaagctgggcagctaggcgcacggcgacaaggcgcgtgtaggttcgcgccttgcagcgaagatcacttatacatgtgatcacgagcggttgtaccagttgcgcattccagtttcgtcaatcagaagctatagtccctggacatacagggccgaaacgtgactttacgttggaatttatcgtacagagattcccatatttccattgactttgaaacaaaaccacgaggatcaagggttctgaatcacaccgtgtaactactaccttgcagccagaggaagacgtgaccattgggacgtctggcacacccgtccctgcaagtctggtggaacgaacgcccaatggcaacagaccagatgtggtatgagggatgccttggattccagacaccctatcattctgtacctgcatgggaacgcaggtacc

SEQ ID NO: 724569 - DNA, 366 bp, Homo sapiens
tgatatctgtctgacccacgctgtctggaacgcccgcactgctggtgcgtgccgagtgagcacgcgctcgtggacaatgatggcctctacgaccccgagtgcgaccccgagggccgcttcaaggcgcgccagtgcaagcagacgtctgtgtgtgctttggtgctgtgaactcgtgtgtggcgttgtgcctgcatcggacgaagggcgaccttgagcctacgcttgcgatgcagctggtgcgcacccaaccatatcctcattgacctgctgccaaccgccccactcggccggctgccgttcaagccacttcgatgaccgtgggacgccggagcttgaggcggctcttccacgaagcgcgtatcgggc

SEQ ID NO: 724570 - DNA, 914 bp, Homo sapiens
  misc_feature (18)..(18): n is a, c, g, or t
  misc_feature (84)..(84): n is a, c, g, or t
  misc_feature (156)..(156): n is a, c, g, or t
  misc_feature (166)..(167): n is a, c, g, or t
  misc_feature (171)..(171): n is a, c, g, or t
  misc_feature (177)..(177): n is a, c, g, or t
  misc_feature (181)..(181): n is a, c, g, or t
  misc_feature (185)..(185): n is a, c, g, or t
  misc_feature (191)..(192): n is a, c, g, or t
  misc_feature (195)..(196): n is a, c, g, or t
  misc_feature (227)..(228): n is a, c, g, or t
  misc_feature (236)..(236): n is a, c, g, or t
  misc_feature (330)..(330): n is a, c, g, or t
  misc_feature (334)..(334): n is a, c, g, or t
  misc_feature (350)..(350): n is a, c, g, or t
  misc_feature (359)..(359): n is a, c, g, or t
  misc_feature (398)..(399): n is a, c, g, or t
  misc_feature (497)..(497): n is a, c, g, or t
aacaccacttcaagcatnatagatgaccctctttttactactgaactaatgaagcctttttcattgcattgttctgcatttatntctacagggagaaaactggttgtcctggatgtttaaaagttggtcgttgtcatggtgtgttacttcatcctntctatcattnnctcnatggcncaangttntgccanncgnntccagcagcggttgaactcagaggagaaaannaaataagnagagaaagtttaaactgcagaaattggagtggatgggttctgccttaaattgggaggactccaagccgggaaggaaaattcccttttccaaccngtancaatttttacaacttntttcctganagcagtttagtccatactttgcactgacatactttcccnnctgtgctaaggtaaggtatcccccctcgatgcaatccaccttgtgttttcttagggtggaatgtgatgttcagcagcaaacttgcaacagactggccntctgtttgtcactttcaaaaggcccacatgatacaattagagaatccccaccgcacaaaaaaagttcctaagtatgttaaatatgtcaagctttttaggcttgtcacaaatgattgctttgttttcctaagtcatcaaaatgtatataaattatctagattggataacagtcttgcatgtttatcatgttacaatttaatattccatcctgcccaacccttcctctcccatcctcaaaaaagggccattttatgatgcattgcacaccctctggggaaattgatctttaaattttgagacagtataaggaaaatctggttggtgtcttacaagtgagctgacaccattttttattctgtgtatttagaatgaagtcttgaaaaaaactttataaagacatctttaatcattcgtcta

SEQ ID NO: 724571 - DNA, 413 bp, Homo sapiens
ctgcccacgaagtgcagtcaaagtcaattccgaggccaggcgcagtggctcaggcctgtaatcccagcactctgggaggccgatcacttgaggtcaggaatttgaggccagcctggccaacacgggaaaaccccatctctactaagaatacaaaaattagctgggcgtgttggcaggtgcctattatcccagctactccggaggctgaggcaagagaatcgcttgaactcagggggcagaggttgcagagctgagattgtgccactgcactccagcctgggtgacagagcgagactccgtctcgaaagaaagaaagagaaaggaaattccccagggaagtacctcggcttatttcatgaagaggtactgaaggaagcagaggcatgtggaggacttccccacttcgtgggcag

SEQ ID NO: 724572 - DNA, 194 bp, Homo sapiens
cacagctgtactaatgtggcgactgaaagatcactgcagtggacactgtctggaagaggctgcacatagcccctgcttagggactggattgtttttgcacgagctttttttttttttaaactaccatctccccacttttaaagccagatacttgacagggattttagatcttaatgggtccgatggtagggaat

SEQ ID NO: 724573 - DNA, 1289 bp, Homo sapiens
gcttccctggtgtgattccgtcctgcgcggttgtctcgtggagcagcgtcatttaatctccgtccgccttcatctcctacctaagtgcgtgcctgcacccgatggaagattcgatggacatggaccatgagccccactgaggccccagaactatctttaacggatggtgaactaaaggggcgacaaacgacttatcacttataaggttggataactgactgacaacatgaggcaccagttaactacttttacagaaaccggatacaaggtacagagaggactggatgcaaaagggactgcacgttggcccacacttggtgcgaaagccagacggcacacgtgacacttacacgcaaacgggacagttccaccttaccacaggtaacactttggccaaacattgttgcaacaactgctcctggtaccaagccacagcgggtattccacgttgtgagaggccattgtgggcgacatcacacccaccccacccccaggttggggctccttcaacaggtacttgcaaaagatggtgggatcacacgctgggccaaggttggcacatcacatcccactttgggtgacaggccacctataccagtcaacacctgctgggccgggcccagcatcgccagccagctcccaggcaacgcgcttggccacacgcaagcggccagcgacaggcgacttgcgttgtacacacaccagccagttaacaacagcgaagatagcttcccgggcgacacaacgccccagggagcacctatggcccccaccatagggagacagcggaacacgagcaacagcacaacaaggcgatatcacacgacagagaaaacccacacacaaggtccaacgacacgagtttggcctgggcactggcagtcgcacaccgcacatctcgatgtgaaagcaacgtcaacttgctcctgcacacacaagcgcactcgcaacgagacctgcacaacgcccattgccacttgacgtcggccgctgaaccgtgcacatcgggccaacggaccgacacgcgcgcaacgctgttcaagctgacacacagggcgcgccaagaggcgccagagcacacacccagttgatcagggcagcaaaactccgccgacggccccccgcaagacggtgcacacagaacgagcaacactacccgcccgcggcgcacaggcacatcacacagcagcgacaagcagtttgacgacacgcagcaagccgctacaggaggacaggagccccatccgtccaacgccacccgagcggacgcaagcaactccaccatgagc

SEQ ID NO: 724574 - DNA, 102 bp, Homo sapiens
taaggtatggatgctatcctctaggatctattaagaggtgatagtcatcgcatgtccgaggtgtcatacaccaggttgttggcgaacatactccatgaggaa

SEQ ID NO: 724575 - DNA, 179 bp, Homo sapiens
ctgcacgtaaccctcctccttaggcctggaggccaaggtgtgggtccccccgcctgatctttgaaaaccctacccagggctgctgtcccttcccagggcccaggcctcagcccaggcctcggggccaactctttgtataacctccctgaatgtattaaaaactaattttggggaagcca

SEQ ID NO: 724576 - DNA, 417 bp, Homo sapiens
ttcagtgcccctgtactgccctgacgtctcaggccaaagggagggagcaagtggggatctacagtggccactcagcaaaaacttactcccggggcggggaagcaaacagcccctgctgaccctttgcggatctcagtttgctccttttatggacctttactggagagagttccctccacagaatgtctgaagtcttgcattctttcccttccatcactgtattgattcttttttaaaaacagccaccacccctcaaactcccacctcacctcatctctgcagaatgttcacagcaaaacacctttgtctgtttttagattcttgaagaattagtctgttcaagacattgtgtttaaagctgggagcccactgggagtccacaagtgctgcatatattgggtagcaaaagaaaatggg

SEQ ID NO: 724577 - DNA, 343 bp, Homo sapiens
cctgccgatcgttctttattcttatttcagattcaaagggtagactttgggatttcatgtgtaggtttcttacatgggtgtatttcctaatgctgagatttggaataggaatgatttcatcacgcacgtagtgaggaatatccaatacttcgttcttcagcccttgctccactccatccctccttctctgatagtcccccatgtctattgttgccatctttacatccatgagtactcgatgtttagctctcacttgtaagtgtgaacatgtggtatttggttttctcttcctgcattaattaacttacgaaaatggcctccatccatgttgctgcaaaagaca

SEQ ID NO: 724578 - DNA, 494 bp, Homo sapiens
agggcgaagattctgctcgctcctgcaagagatagcaggctagctcatctcccacacccacagggtgcataccagcactttactagttactaagatggactgaatgcctgttctcatattgactgcgtatctgttatactctgatatcgtaaattccctcgcgcaagccctgtagttggactgttattagtgctctgctgtcttctgttatttactctgtatctctttgtactctgtatctatatatcaaaagctgctgctatgtctctcttctgtcttattctcaagtatctactgatgtatttagcaatttcaaagcatagtctaccttccttatttggggcaatagggaggagggtgaatgtttcttctttctcatctactcgtctcacactgagtggtgttagtcactgagtagaggtcacagagatgacaaaaggaaaaatgggagctagagggttgtgacccttcatacacacacgcacgcacgccaa

SEQ ID NO: 724579 - DNA, 301 bp, Homo sapiens
  misc_feature (19)..(19): n is a, c, g, or t
  misc_feature (172)..(172): n is a, c, g, or t
  misc_feature (193)..(193): n is a, c, g, or t
  misc_feature (217)..(217): n is a, c, g, or t
  misc_feature (230)..(230): n is a, c, g, or t
  misc_feature (250)..(250): n is a, c, g, or t
  misc_feature (273)..(273): n is a, c, g, or t
tacagctgaatcagtatancctgaaggatgaaattggaaagggctcctatggtgtcgtcacgttggcctacaatgaaaatgacaatacctactatgcaatgaaggtgctgtccaaaaagaagctgatccggcagccgactttccacgtcgccctccaccccgaggcacccgnccagctcctggaggctgcatncagccccggggccccattgaggcnggtgtaccagggnaattgcccatcctcaagcangctggaccaccccaatgtggtcnaagctggtgggaggtgctgggatcgacc

SEQ ID NO: 724580 - DNA, 189 bp, Homo sapiens
tgggtgtctcatgactgtcgcccgttcctggtgggcatccgctgtcttcgagatcggctttgtgttgctgatcccgctggtgtttatcgtcgcccggcgtccggcgtgtcgttgatcaagatcggtatcccgctgctggccggtctgtcggcggtgcacggcctggtgccaccgcaccagaacgaccca

SEQ ID NO: 724581 - DNA, 118 bp, Homo sapiens
taaatcatgctctgtaccggcatgtgctgtaagccagcgggggaacgtgttctcagctccgtgatgcatgagaagacgttcccctgtcgtggcacatggcacatgtccacggctgtaa

SEQ ID NO: 724582 - DNA, 423 bp, Homo sapiens
gactctaggaggatccccctccgtcgaccgctggatttgactcagagaggaccccagaggtgtctccatcttccctatatattttcagcccttgagggcttcattgtagatcaaagcaaggcccccaggaagggtgacatactccctgggaagttcacctcctggtccttgttccggtccaagtcttccatcagccttgcaatttcagcatcctgcagcttcgagccaatggtgagctccttctggatcagctccttcagctccttcttgctcagggtgtgcttgtcaccctccctgccggagtacttgtggaagatggccacgaggaggccaatggcctgatccagggggcatgccatggctgagggctgggcttggagcggtagggaggcggccaaatgcgacgcgagcggtcgacggacg

SEQ ID NO: 724583 - DNA, 485 bp, Homo sapiens
ttggtcgtactctagaggtatccccttacaatcagcttctagactgatcatttgttcttaaaattattacggaacacgagaagctgtgattgcccagacttccagtctatgttaaagctgattgttacactttatcagaccacagactactccggaatccgtaacatcagtcttcatggtgaaacgcatcatattcaatacgactgctgattggaaggatcctacaaatcctttccgtttcccaaatattggtgtggagaatgtttctaggaattgaattctgagcagaatcataatgactactgtttggtctatttcttcacagaccgagatttcgataattgccgtattatagtctggctagggtataggagcaccttcaggtagtgtatcatattaattatatcttatattactagttgaaacatatgggagttatcagagaatgttgaattttcaaagtataggaaaaagtgatgcctgta

SEQ ID NO: 724584 - DNA, 122 bp, Homo sapiens
actaaccctaagccttgtgttaggcaattactctgccactgagctccattcacagccaacttcttacctgagacaaagaaaaagagtcacaaagactgacacagcttcaaaagaaaaatcat

SEQ ID NO: 724585 - DNA, 234 bp, Homo sapiens
cagacagttcaatagcatatgctatgggcggggattacaggcatgagccaccaggcctgaacaaaatatatatatatatttacagtaatttcaacattgaggaaaataaatgggtaatacttcctaaacatccttaacatttatgactatccagatggacagaattttgattggctgggtgtcagtataagagtgggactattcagtgctgctattgaaacttctaaaactagg

SEQ ID NO: 724586 - DNA, 89 bp, Homo sapiens
gctccctcccaaacatctgtgttacttctgtgccagcagttacgggggagatacgcagtattttggcccaggcacccggctgacagtgc

SEQ ID NO: 724587 - DNA, 184 bp, Homo sapiens
cggcgtgggcgtgacacgaggcgagcgggtgacgggcagttgtcggggggtaggaggcatcggtcgcgatactgcgtgtcggggtggtgtggtgtggtgaggccgtaggggacgtgcggtttgtcagtcgtaatgtgatgtgtggtgaggagcgaagtgatgcggtgtcgcgagtgcgagtctg

SEQ ID NO: 724588 - DNA, 336 bp, Homo sapiens
ctttggccctttttgggggcccttttgacccggtttgttcaaaaaaccgggtgggcccgggtccggatttcccggggtttttttcccccccgggtccccgggggggtggggtttttggtttttcaaggatacccccttttttttttttttgctggcccccgccccccgtttttttttttttttctttttcgggccccccccttctttgggttttgggttttttttgtggggtcccttatttttgggggggccttttttgttttttttttggtttggcgccctttttggggaatttttttgggggtcccttttaagggtttagggacccggaaatta

SEQ ID NO: 724589 - DNA, 134 bp, Homo sapiens
actttcctacgtgtccacacgacgctgttcctgcgtgggacgctacccacgttaccacttcaccacacggggactttacgaccgggttctggtggtgcaacacctttacacacgtatgacacccacacgactac

SEQ ID NO: 724590 - DNA, 1010 bp, Homo sapiens
  misc_feature (237)..(237): n is a, c, g, or t
ggtgaaaacgaggtgctgcagaatgtgacctgctgcctggcgaaggcagacaaggatgaacacggtcactcaggacctacgggtcctcaagagtgactagaacggagcagagtagtaattcttgccgtctgacattatctaagcattcctctctagagggatctccatgtaagtccaatggtcggtgaattcgtaatgtggtcgagccatagggaataagcaccatcgagacacggntgcctgcatcttcaggtgggtatgtgatgggctcaaatgcgcaggaggcgagaatctcgatctcctgtcacgctaagtattgacctagctatgatagatgtcgacaaggagactagttggtcctacagggctgacagacggatgcttggagtaatcaatccggcacatatacaatccaagatctccaggagaccgacgaccgagaagagaaactaatggtcccagaagaaccctcggggggcacccttgggcgtgtccacaagggtaccggtcccatcaatgcagcgctgcatcttgtccgcgtgcatcagggtggtgagtcggaaaggtatgtcgcggggtgccgtgcaatgttaggacgagaaagtagctacaactggctcgctattcacacccgtttgtcggtaccaaaggcgattcttaccgccaaagggggacaatgggcgcgggggctcaccgcacaggtagaggttcaggccctgcccatggaataggaatattccttaggaaaatggtccctcgtggcaacaaaatacctgagtctctctgctttggctctccaccaattcaaaaatttgtaggagcactttatacaaagttgggtataatactattatcacgattccaagttatgcgccgccaagagaagagataacacaacaacaaaccacacacgcaatactctcactgagcaggaagcgaggagacgcatcatatctacatgcagtgacgacgcgcagccgtcgagcccacacggcgacgagcagcaaaaa

SEQ ID NO: 724591 - DNA, 390 bp, Homo sapiens
ccggacccagatgggatctctgggacaccctgccctgctctacaattgggatcctgggaaaagtgacagaatctggcaacaggggcctgctctgtcgcccaggctggagtgcagtggcacaacacagcggactgcagccttgacctcccaggctcatgcaacctcccacctcggcctctcaggaaactgggaccgcaggcacgtgccatcatgcctggccaatttttcagtttttttgtagagatggggtcccctgtattgctcaggctggtctcaaactcctgggctcaagtgatcctcctgtcttggtttcccaaagtgctgggattgcaggtgtgagctactgcacccggcccaataaaaaaatctcgttctgtgaaagaaatgttt

SEQ ID NO: 724592 - DNA, 175 bp, Homo sapiens
  misc_feature (144)..(144): n is a, c, g, or t
gaggatctgtacttaaacagagaatcagagccctcaatcaatttccagacttgagccagtttacagacccagaaccacttgaatgaaggggaagctgagtccccttgaggaaggaccccattacattaccgacaatttatacanatgaagctttcttcccacccattccccaggg

SEQ ID NO: 724593 - DNA, 103 bp, Homo sapiens
acacggagcctggctgtcagatctacagctggccccgcgtgctgctcctgctgctccgtcaaggccctggatttgggtgctcagctgactccgacgagggcat

SEQ ID NO: 724594 - DNA, 653 bp, Homo sapiens
gggaactgataaggatgagaatggtggtgccagcttctgagggcctgcttggctcctgggggcaaagctcttgcccgaagcaataacaacagcagcagaagcaatcccggggagctgccaggggtgtctgtctctgttctccttggcgtttccttcatggccgtgaatcccagctcacccatggacagaagacctcccctcatctgaaagcctttctgccttccttcctgtagctgtcgctttctcaggcttggactgtcccctggttcaccctgtctttgggatgtggcccttgagctgggcgggctccttgggtggattagagagctggccgagctgcaagcacctgagttacctgcgagggtgcccagagtggagcttggcctgagggcgtgttgcagccctggccccaccagtccacagaggcccccaggagcactgcctttcagtggaccgggtgggggctggtgggaggggccccactagctgagcttctgctgccctctgctgtctgctgagatgccaggctagtggagagggcacaccatgtgcccaaatggtgtgatgctccttgtagcaggataccagggtactggggggcaatgctatgattaacttgcttcaaataaaaagttcccgccccataaccggca

SEQ ID NO: 724595 - DNA, 385 bp, Homo sapiens
agcgggggtgcgcgcggccgtgcagcctgggcagtgggtcctgcactgtgacgcgcggcggcggtctggtcctgcctgtaacggcggcggagagtgctgctccagaacacccatgacaggcgagcagtgtcggcgaatccctgctggctgatgagcgccggagatgtgcgaaccgctggttagcctaggcgcctgattgcctaggagcatctgcgcagtcgcttagcagtgactcaccgctcagacatacagtatttaactacaacaacaacacatcctggtcagcaacttcacacgttatctgtacatagaccacttggtccagatcaattcacactagcattatgcttacctacatatcgggggcacaaaacacctcactgaa

SEQ ID NO: 724596 - DNA, 682 bp, Homo sapiens
  misc_feature (11)..(11): n is a, c, g, or t
tccaacttagntgcgaactcaggggcgagctgctaactcaggggcgagctgctaactcaggggcgagctgctaactcaggggcgagctgctaactcaggggcgagctgctaactcaggggcgagctgctaactcaggggcgagctgccaggggtgtctgtctctgttctccttggcgtttccttcatggccgtgaatcccagctcacccatggacagaagacctcccctcatctgaaagcctttctgccttccttcctgtagctgtcgctttctcaggcttggactgtcccctggttcaccctgtctttgggatgtggcccttgagctgggcgggctccttgggtggattagagagctggccgagctgcaagcacctgagttacctgcgagggtgcccagagtggagcttggcctgagggcgtgttgcagccctggccccaccagtccacagaggcccccaggagcactgcctttcagtggaccgggtgggggctggtgggaggggccccactagctgagcttctgctgccctctgctgtctgctgagatgccaggctagtggagagggcacaccatgtgcccaaatggtgtgatgctccttgtagcaggataccagggtactggggggcaatgctatgattaacttgcttcaaataaaaagttcccgccccataaccggca

SEQ ID NO: 724597 - DNA, 772 bp, Homo sapiens
gattgcttgagctgaggagtttgagaccagcctgggcaacatagcaagatcccttcccttaaaaaaaaaaaaaaattttggctgggcatggtggctcatgcctgtaatcccagcaatgtaggcagccaagacaggtggatcacttgagtccaggagttcgagactagcctgagcaacatggtgaaaccttgtctctactaaaaatacaagttagctggttgtggtggtatgagcctgcagtcccagctattcaagaggctgaggtgggagggttgcctgagacctggcagatagaacgtatgcagtgagctgtgatcatgccacctgtattccagcctgggcaacagaattgagaccctgtgacacgcacacacacacaacaagatagataagctggtaccactctggccagcatcatcatcagccgcttcccatgttgcaacacgtacattacatgcgtcagagcactcgcataaatgaagaggccttccctaacgggtggattggaagtcttccaacgagtacacaccagagagacaccacacacaaagagggaagaacacaagaggacactgggcaacaccaacagaagccgaacgaatagagaacaaaggacgagagccaacgccgacgaggaaagagacgcagagacacagcaagacacacaaagagggggcaaacaccacaaaaagggcgcacaccgagcacacaaaagagtgacgccaacagagaagcaggagagcaaacacacagacgccagacgagaacacag

SEQ ID NO: 724598 - DNA, 249 bp, Homo sapiens
  misc_feature (11)..(11): n is a, c, g, or t
tccaacttagntgcgaactcaggggcgagctgctaactcaggggcgagctgctaactcaggggcgagctgctaactcaggggcgagctgctaactcaggggcgagctgctaactcaggggcgagctgctaactcaggggcgagctgccttggttgtgctgtacacacatctgttcacaactcctttgacgctggaagccacagaagacatgttgataatattgccagatttctgagcaagcattttagt

SEQ ID NO: 724599 - DNA, 309 bp, Homo sapiens
  misc_feature (220)..(220): n is a, c, g, or t
aagcttggcacgaggccggggccggccctgacagactgcctcagctgctccagccacgcctccttggagcctgtggagcagacttgctcctggccaaagacagagcagccgagagtcccccccacagtagcagccacctcggatgcccccggaggtggaggcggagcaacggctgcgggcaggactgctgccctcacacctgcctgaggtggtgggcgcnctcagatgcgccttcatcgcgctggtcttcgtcactgtcttcttggtcctgcagctgcgctctcgttttagttttcggggggtgaaggt

SEQ ID NO: 724600 - DNA, 114 bp, Homo sapiens
agaggatcccgatcagcatatcagcagaggcatcatttacagggacctcaaactggacaatgtgctgttggaccgggatggccacatcaagattgccgactttgaggatgtgca

SEQ ID NO: 724601 - DNA, 319 bp, Homo sapiens
  misc_feature (11)..(11): n is a, c, g, or t
tccaacttagntgcgaactcaggggcgagctgctaactcaggggcgagctgctaactcaggggcgagctgctaactcaggggcgagctgctaactcaggggcgagctgctaactcaggggcgagctgctaactcaggggcgagctgccaacctttcagcagcttctacacacccagctcctgccacccagtggcctctttaggccaagctcatgcttctacaagggcctttccaggcccaacttttgtctcatggcaacctttcctggccagattcctgcctgtctcccagcagctcgcctctgagctgcagctcgccc

SEQ ID NO: 724602 - DNA, 3460 bp, Homo sapiens
gagacgctccggactcgtcgccgcaggtgtccaccccccagggttcctgacccctgcccctggacagcgaccccttctcagactccagttgggccggactctccaaacctgcttccgcaatgggtgggttgtgagtgctggtaatgaggagccgtgggtgcagccagccttggagatgccgaagagacgggacatcctagcgatcgtcctcatcgtgctgccctggactctgctcatcactgtctggcaccagagcaccctcgcacccctgctcgcggtacataaggatgagggcagtgacccccgacgcgaaacgccgcccggcgccgaccccagggagtactgcacgtctgaccgcgacatcgtggaggtggtgcgcaccgagtacgtgtacacgcggcccccgccatggtccgacacgctgcccaccatccacgtggtgacgcccacctacagccgcccggtgcagaaggccgagctgacgcgcatggccaacacgctgctgcacgtgcccaacctccactggctggtggtggaggatgcgccgcgccggacgccgctgaccgcgcgcctgctgcgcgacaccggcctcaactacacgcacctgcacgtggagacgccccgcaactacaagctgcgcggagacgcccgcgacccacgcatcccgcggggcaccatgcagcgcaacctggccctgcgctggctgcgcgagaccttcccgcgcaactccagccagcctggcgtggtctacttcgccgacgacgacaacacctacagcctggagctcttcgaagagatgcgcagcaccaggagggtgtccgtgtggcccgtcgccttcgtgggtggcctgcggtacgaggccccacgggtgaacggggcagggaaggtggtccgctggaagacggtgtttgacccccaccggccatttgcaatagacatggctggatttgccgtcaacctgcggctcattctgcagcgaagccaggcctacttcaagctgcgaggtgtgaagggaggctaccaggaaagcagcctccttcgagaacttgtcaccctcaacgacctggagcccaaggcagccaactgcaccaagatcctggtgtggcacacacggacagagaagccagtgctggtgaatgagggcaagaagggcttcactgacccctcggtggagatctgagcctcaggatgcaggagcctcctcctcagaccctgttcttggccttccatcctctccccacggctgatggtccctccaaggccgactcctaaggaatcaccatcaccctcctttctattctgggggcttctgagagagcccagcctgatgccagaacaaaggacagagaatttaagcacagaaatcccagacctgttgttctctccatccagcgtgaccagggcccgagagacctgatggccagggtggggtgtccagcaccagccaagctggtgctccagcgcacctccccagagctccccgcactgacggggctgcaggagcaggtgcagtgggcgcccacactggccctgcagtgatgcagggcgggagggagataagaagaccccgcagtcaagtggagcatggccctccctggctccctgtccctgggctcagcacgaccacacaggacacccagccagggaattctgaagaccagagagcagcccacgggcatcacgagcgctctgctcctctcctgggcccctgctcttcccaaagctgcccccaaatcagacatacctctgtggctctcctctggttcacctttacagagcataaggctgtcttggatcccaacaggcacccagccctgcatggggggagcctgggcctaataggcaccccctgtacctcaggctgtggcgggagcagagtccccccctccggcccctcttcctttaccccttctcctccagcagtggcaaaggggtaggctctagagccagcacaggtcactgcctgacctggactaagaaccccacggccccactgtccacacactgcctccccaccgcccacctcggctgctaggcccctcgcctggactggactggggagggaaagcgccttttcctgcagctcttcagagccacagacctcagggtggagtgagcccatggtgggcagtgggcaaggcggtgggtggtgggcaaggcggtgggtggtgggcaaggtgggacctcctgcagcctggaaagaggagggaggccaaggccattccctaactccctcctgcccctggtttgaggaggagggactctggagtagcagaggggctgggaaagagggggcaggggctgctgggacactgagcaggagggaggcctgagcacactgctttggaaattattctaaacacaaaaaagggaaagaaaatgttatttctccctaagtcaggagcatgcagagctagcccacctcatgtccagctgtccactttccatcctggagaaagaacagtgtgcctcaaactcctgccctccccaggcctctggggcccgctggaaagggctctgaccccctggcccggccgggctctctagtggtgatccggctcattctcctgcaagttggaagcacaattttccccccaagtggaggaaaaggaaagggccccagcgtactgaagaggtgtttattttttaactaacagcctcccaccccattaagactcaccaggagaggtctgagggccattcagaacccactcctgagtgggtgggtgggtgggactcagtccagagacctaacattcagaatatagcattggttgcctattttgagatggatttaatctcccacagtattcatgagaccatctgatggaatcagatccctgagccaccttgcaggacgttttccccaacctcttacaccctggatgtcactttggaaaccaagcccttggaagcaagtggggtggcatgggagagaagggaggaggtgggcacaggtggtgagcttatgtgtgggcattttactgcctcacagaagccagccaagtgccaaggtcagcttggctggtctgaggccacctttttagccaaaaacctagggttcattttcaggactttgataatgaacaacaaaatggggacttctttgggcagatgctaggtcagttgttttcacctaatatcctcttttagctgcatgtatatttatttataattataaccctggtggactgcagccttcatctttattgggaatgagtttgttataaatcagaaatgggtccatgatgaccactgttttccaaacccagtctgttccctgctccctcgctggcaagccccaccacacaggagtgaggccaggggctaggagttctaagaacagaggctggggtgagggtggcacccaggcagctgcatctggtctgttttaatttaactgtatttaatttgctttcaaaattaaaagtcaaatacagtttttaacagtcaaaaaaaa

SEQ ID NO: 724603 - DNA, 387 bp, Homo sapiens
ccgtcgtttaaatgtgtgactgggatacctgtgtagatttaactcgataggctcattctactgtcttctccagtgtctcttctatagaaacagttacaaacctacggccaggccaggcagtggctcacacctgtaatcccagcactttggaatgctggggcaggaggatcacttgaggtcaggagctcgagaccagcctgggcgacaaaagcaagactccgtctccaaaaaaaaaaaaaaccttgcttaagtgtggtacattggtcaccacctgcatgcacccaatactgatccactcattatacccggggtgtgggtaccgtgtactctcagctactccaggtggggctcacttgagcctcaggattggccctctagccgggcgcc

SEQ ID NO: 724604 - DNA, 260 bp, Homo sapiens
  misc_feature (11)..(11): n is a, c, g, or t
tccaacttagntgcgaactcaggggcgagctgctaactcaggggcgagctgctaactcaggggcgagctgctaactcaggggcgagctgctaactcaggggcgagctgctaactcaggggcgagctgctaactcaggggcgagctgccctgcccttttgcgcttgcagaccgccttctatcccagagcagcttgagaactcctatgaagctcagattctaaaggtagcagcttaggttccgtcggtggaccctctagagt

SEQ ID NO: 724605 - DNA, 959 bp, Homo sapiens
cctactatgctccggcgggcgtatctcaataattgtctgaatcgggccacggcattgtcccgtagatgttgttcctttccagggcacactccatgggccacccctgtggtgggccctcgagcgcaccttaaaatccaaggaattcccgggccacatgtgccagtttccgcgccctggtggggaatctcccaaccgggctctttcaaggtgcccccgaaagtgccgtcaaacatgggaacacaattcggggtccacaacattgaccctgcggcgaagggcttcccgtgtgtgcgtggtcacaccacccccctgtgggtcataggcccttccctaggctgccgccctcttggaggtatctttatggctttggacatgaccacaggacttttggggggctgtcactttctctggtgccacacaaacgcccctcttctggggcacgcgtctttccaatgggggccccctcctcaatcgaaggccgcactgggggtggcccccccaccgctcgcgcgtgcgctttcggatgatggcaaccccagcgagtgtcttattcgccctcgactcggaagacaccgcgccccctctttgtccccctcgccctggaaccccgccccgcttttcgcccaatcgcactcacaggccatcggccttgttcccaccccggcagcggggcacacccctgttttcgccaccctctgatggaaaggctctgctgctccgattcacccctcggcgggcgttttattatctggggctccccccatcaaattgggcatcgcgattcgcctcctgcgagaagcacccacgtggggggagagtcgaagcatcgaactaacaaaaactcttatatatatcaagattcttaagactcagaaccttgacgtctttgaacgaccgcgccccccccctttgtgtgtgaacgtcccccctgaacctgaaatccctttttccacaaaaca

SEQ ID NO: 724606 - DNA, 548 bp, Homo sapiens
agcaagcggggaagaacaaaactatgaggggcaaggcagtccttccggagcaggtggactccagccatcctcggcgtggggctgtggccccaacagcagagaccgccccaaccaaagacaggtcagtttaaatgttcctggtccttctcccagagcttcaggggggtgggcgggctggcagagcgaattaatcaagggagaacaacggcctcagccgggtgcgtgcaagaagccggcgggcaggttaaaaaagcaaaacataagatgtggctccccagcacggtaaaaggcacttctgcaagtgaacaggtatgtggtgcaccagggaacggggtccacaggtgtaaacggagatggtccggggcaaaccagggggtgtggttaccgcagtcggggagagctgagaaaccctagtaaggacaaggacatgcgttggctccctccctccccttcacccttgcagcttatttcgggtaggggttctgttctatgaaagctaagccatgaggcagaatgagtaaggtggccttccaagtgtgtgatgtacc

SEQ ID NO: 724607 - DNA, 930 bp, Homo sapiens
gagtccagataagaatgccagcagggcgtggtgcgtggggcttcttctccgtgaaggggctgcaacgaggggcatggcttagactcatgtctgtccgttgtatctaggatatgggtgatcagcacactgaagaaagcgcccaggggccattggagccctacagatcaaagctgctagtaaggtcgacatggagccactttacatgttcacggcatcagactaggcgatcgcgacccgttccatacgtgtgatccagctttgtcgtcacggcagcgcggtcagcagaagacagcttaaaccaagctccttaaaacacatggcgtgaacattctggaaagctgcaggcttgttgcacttcacataacgtggtgacaaacaacgtgttcttctgagctgaacataacatgcacttcaagtactgtcaagtgaaaatctacaagacaggtatttcacagaggtacattttccctgcctagagactgcgttacccaagattggctgcgtttaccccaaaagcgcagcccgacattgcaacattcgcaagcatgtagcgtctccaatggaccacatgaccaactggcagtcacgtatacagtgggacgcagttgctggtgatagtctgacaacttgttcaacattttcaattttctacacattgactgttacgatcttaattcaaccgttttaaattgtgcaccaattggatgacagggtgagtttggatgaacaatatctggaagctattaatggaaaattaccattgtatataagggaagaaggtgtgaacagtggaattattcagagaaagggcagtccaggttacatgtgtaaaatttacaacttggtgatcaaccagagtattacctggaatttagcgaagagagagtaaccaggtaacataagaaactcagaagaacgcagagaaggaat

SEQ ID NO: 724608 - DNA, 946 bp, Homo sapiens
gaagctcacttcttcagtgccattgatgtgagatgtgctggagtggctatcaaccctttccttcctaatagattatgttgttaactacgatatctgtgcgctttggggacaggtccgaagttctcttcataggcttacaactgtcacttttacgcagatgcggtgagacgggatttactacgtgcacgcgtcagactgtcacgccatctcgttcgtcgacagacctcgacttacacatgcaacctataggcacacggcttgctttgacatctatctctgtcttactgtctcagccttatagacgtcttcaggtaactagtaggatacgaaacacctgtgttcccgagcaggtaaggagtagtaagcgtacttacttgactctagagtccgtaacccagggttaacttggcaagtcagtaggtcggtgactacttttcagactttttccactggtacacgtgatatgccatataagccaatgtagtccagtttctacagatcatgttccaagctaactgaatcccacttcaattacacactcatgaactcctgatggaacaataacaggcccatagtcctgtggtcatgatcgtgcacacttgctagactcagaacaaaatactactctcataaatgggtgggagtattattggtgacaacctactttgcttgcgcctgagtgaacggactgatattcatatattcatttattcccatggacatttagttagtgcttcgatatataccaggcatgatgctgagtgacactctgtgtatatttccaaattttgtacagtcgctgccatattgatatcatatttctagacttccaccgattgaggccccggtttttacggcaacctgaccagtaggattcaccccgttagcacctaaaccttccatatgcgtaacattacctcttggtctcctccggcaacaacgttga

SEQ ID NO: 724609 - DNA, 197 bp, Homo sapiens
  misc_feature (11)..(11): n is a, c, g, or t
tccaacttagntgcgaactcaggggcgagctgctaactcaggggcgagctgctaactcaggggcgagctgctaactcaggggcgagctgctaactcaggggcgagctgctaactcaggggcgagctgctaactcaggggcgagctgcagctgcaggctgcatgtgtggggtagcaggacacgccacttgggcagtca

SEQ ID NO: 724610 - DNA, 136 bp, Homo sapiens
gcgacctccttggtgccgcggccggtggcccatatggggtggatctacgtcgtcgtcgcagtggcgtcaggcgcggtattcatcggcgaggcggcccagttgctgcgccgtgccaattctggcctgcgtgatgcct

SEQ ID NO: 724611 - DNA, 251 bp, Homo sapiens
  misc_feature (11)..(11): n is a, c, g, or t
tccaacttagntgcgaactcaggggcgagctgctaactcaggggcgagctgctaactcaggggcgagctgctaactcaggggcgagctgctaactcaggggcgagctgctaactcaggggcgagctgctaactcaggggcactgctttgacaggtagaaagcacaagcaggatgggagaggcagtcgtgggaacctgcagcgtcctcttcacacactattttctgcagctcgccggggacctcaagatcgc

SEQ ID NO: 724612 - DNA, 158 bp, Homo sapiens
  misc_feature (42)..(42): n is a, c, g, or t
  misc_feature (87)..(87): n is a, c, g, or t
  misc_feature (125)..(125): n is a, c, g, or t
  misc_feature (141)..(141): n is a, c, g, or t
tttgttgccggcctcgccgtggacgccccgaccatgggccangcagggcgtctgcctcctcccaccttccgcagacctcaggccttnaaagctcttccttggtcctgcttagttttgtggcatgntcttctataaacttgnttcaaatgctccagatc

SEQ ID NO: 724613 - DNA, 138 bp, Homo sapiens
aataaataagtcaaaatcacaaatgacatatacggatacatcgggcaacattagatataagtacttgtatgatacagacacgagtcaaaatatccgtctttaaatcaagatatgtttagtaggacataaacacacaca

SEQ ID NO: 724614 - DNA, 247 bp, Homo sapiens
  misc_feature (11)..(11): n is a, c, g, or t
tccaacttagntgcgaactcaggggcgagctgctaactcaggggcgagctgctaactcaggggcgagctgctaactcaggggcgagctgctaactcaggggcgagctgctaactcaggggcgagctgctaactcaggggcgagctgccagcttgtaatttttagggactgcaaaacaaggctttttcttcagcgaggcgccgagctgacgcaaacatgcagatctttgtgaagaccctaactggcct

SEQ ID NO: 724615 - DNA, 233 bp, Homo sapiens
  misc_feature (11)..(11): n is a, c, g, or t
tccaacttagntgcgaactcaggggcgagctgctaactcaggggcgagctgctaactcaggggcgagctgctaactcaggggcgagctgctaactcaggggcgagctgctaactcaggggcgagctgctaactcaggggcgagctgctaaagtcctaccagtggaagatgctcaacacgctcctccttgctggagcagctgaacgagcagtttaactgggtgtggcggctggt

SEQ ID NO: 724616 - DNA, 532 bp, Homo sapiens
  misc_feature (6)..(6): n is a, c, g, or t
  misc_feature (166)..(166): n is a, c, g, or t
  misc_feature (260)..(260): n is a, c, g, or t
  misc_feature (274)..(274): n is a, c, g, or t
  misc_feature (276)..(276): n is a, c, g, or t
  misc_feature (278)..(278): n is a, c, g, or t
aattgnaggtgcatgtgcattatcacagatttaaaatcatgcatattctccataaaacttttcaaatgcagttaaacacacacacacacacacacacacacacacacacacacacacacacacacacacacaaaaccaagcaattataagtcctctgaagcatgtnactgtgtttagctgctactctcagcaatttaaaaatactttccccacaattacattccagcctgttatgtaattcaaaacaaacaagtcagagncatcgctcaaatgncngnaccaacaaatacaggtgctttgcatcaaggaaatgaatcttctggaggaatgcaactggggggcggcggcccctccggggcctggggctgggcttctggtggggcggcggggcccccttctgggcgggggcacacagtgcgccccgggggctgtgccaagctgccctgtggtcatgggggtggactgggggcttcctgctgtgggtaccctttcccgtgttgtgttccaaattttacattttagattttaaatt

SEQ ID NO: 724617 - DNA, 433 bp, Homo sapiens
  misc_feature (98)..(98): n is a, c, g, or t
  misc_feature (146)..(146): n is a, c, g, or t
  misc_feature (161)..(161): n is a, c, g, or t
  misc_feature (176)..(176): n is a, c, g, or t
  misc_feature (179)..(179): n is a, c, g, or t
  misc_feature (191)..(191): n is a, c, g, or t
  misc_feature (214)..(214): n is a, c, g, or t
  misc_feature (262)..(262): n is a, c, g, or t
  misc_feature (277)..(277): n is a, c, g, or t
  misc_feature (283)..(283): n is a, c, g, or t
  misc_feature (285)..(285): n is a, c, g, or t
  misc_feature (292)..(292): n is a, c, g, or t
  misc_feature (295)..(295): n is a, c, g, or t
  misc_feature (305)..(305): n is a, c, g, or t
  misc_feature (334)..(334): n is a, c, g, or t
  misc_feature (344)..(344): n is a, c, g, or t
  misc_feature (356)..(356): n is a, c, g, or t
  misc_feature (378)..(378): n is a, c, g, or t
ccgggcgcgctgcgagcatatgctgcagtggttcagcaccttgttcctcctctcccactcctcctcggcctcctcggcagctgagcgtgcgattgccnggccagcggtgtgaaattgtaccaattgtgcactgggaaggcctccanggccccttcggggcnctgggtgaagatgtntangacgtgttctcngttacgcctcccttcttgatgcnctttaacttcctgcctgatttgccgtaaaccggagcagcctggtctgntcctcgcgccggaantccttnangacgatnccntacttcttcntccgagcctcctcccgaagcttgcggttnaactcactgnccgcgcccgatncgggcatctcctcctcttggtnaatattcttgttgcccaattcccgctcgcagctgcggtcgcgggctccgagctcg

SEQ ID NO: 724618 - DNA, 320 bp, Homo sapiens
catagtaaactaaaagagagatcagctgagtgaggctgataagacaaagactggaatgcatagagctatctggaaggagatcctaataacccaattagaagatggggcccagagaatctgcattgggaagtcggccacccttcccaggtgattgtatagtacaaactttatgacagattaatttcactcaaatgcaaagattaatcccagcactttgggaggccaaggaaggtggatcacctgaggtcaggagctcgagaccagcctggccaacgtggtgaaatcccatctctactaaaaatacaaaaattagctgggca

SEQ ID NO: 724619 - DNA, 148 bp, Homo sapiens
tctggtcgaagtctgacccggtgattaccatctcagcctcccagagtgctgggataacaggcatgaaccactgtgccatgtcagaacattgtatctattgccttcagccagaataatgtcagcttgacataatatttgatcttctttt

SEQ ID NO: 724620 - DNA, 811 bp, Homo sapiens
ggataagactcgaagacttagattgactccgttattccgaaaggggcacaggcatgccaatatctgcattcacgatacatttgtgacgaagacagttagcctggacatgggacgctggtgactctcagcagatcaaagatctggcaaattcaccttaatatgcaatgactcgtcaaggagatactgttcttcctttccagcatcctcaggacagctgacaggacgaaccacaggctatgcccgactttcctcaggctcatgaagggcaatgtcacacgcttggctccctatgaagcacagctcaaaggatatggaaacgacacagtcgggagagatttatctcacataatggacaagtcacagccgcacagcgttcttgctctcattatctgcacatgaacgcaatatcgacagctattcctagaacgaactggagctcgagtgttgacatcagaggcattgacacatgctgctacaaagatctgcgggtacagacgttagcatcgtgatacaaacaacatctcacctgctttcggaccatgagctcaccgagtcttggacggcacttgtgcctcaccagcccagacgcacagagaactctgacagcacgttgcctggtcgtttccaatgtgcaaacatgaggtactccgtgtaaatggcagtcccgtgcggaaacgaccgcacctgcaagacgtcaaagtacccgcgatactcctttagccaaatcacatgccaaatctctcaaccatgcctgaaagttacccaaggaacctgcaccaagtctggaacagacacaccgcgacggtgcacc

SEQ ID NO: 724621 - DNA, 729 bp, Homo sapiens
ggagagaatgggccctgaaggtgatggagcccgaaggcgtcatcgagagtaactggaatgagattgttgacagcgtttgatgacatgaacgctctcggagtcccttctccgatggcatctacgcctatggttgcgacgaaggccctctagccattccaaggcaagctgacgctcatatctaccttgctatcaagcggcgttatcgattgtgattagctcgagtgtcccaatcttgtgtgacttgcgtgaacacacggggcatcatttcgccatgatctgatgtctcgccaggcagacttgaattatgagtctatacagccacccgaggagttcgtctgcgtcctaggcgacccgatctcggatagaattggatcgagctagcgatacacgaacgtgtggtcaactggcaacgtagggaggactacaatgtggagaagccgtcactgtcacagcccttagtaatcaggggtatgtaccagacggtgcagtagcttgagggtagcatgacaactgctaggatgtgaacgctccccgacaatcgagtcgtgagagataaccccataggacgcgtgtgcttctgagtatggcttcaaccgcggcaggcataccgtgctgaacccacaataattagcatcaaagaatgtttgagtacctggacatgacggcatgacgaaaatgttgaaggccgcaggaatacaaggactcaggatcattatgaacatacatacc

SEQ ID NO: 724622 - DNA, 188 bp, Homo sapiens
gcataatgcagttggttggaagtacaggacacaacctgggacttctgcgtctgaagtgggagcagtcttacgggactgaacccttcacctgcaggatctgatgcttcctctgggtagatagtgtcagaactgagttgatacccaattggtgtctgctggaggatttatggggaacccccacccccaca

SEQ ID NO: 724623 - DNA, 214 bp, Homo sapiens
cacagagcagtcagtctgacaccagattctcatagacacagctgtctctgacgctgtcactgagatagctagtccaggtccactcaggcacagtcacagtagtaggtggtagccatactcttcttacttattattctagcttagcctaactctgaggttcaagattttagtcagtaatttgtgttgaagatatcattagacatctgatgaaaca

SEQ ID NO: 724624 - DNA, 101 bp, Homo sapiens
atacataatggcataccagatacaggggacacaaacagctctgtgtatatgaactacaaccagttgttgacttttgttatcaaggtggctccccttacccc

SEQ ID NO: 724625 - DNA, 275 bp, Homo sapiens
ggcagtatgtgagaagttctccacggagaggcacgtgggggacaggacccccgtataaactgacgaaggcgctgcaggaagagctgctcctgaagacagcgaggacctgcgcagccatgcctggtaccacggcacggatcccccgacaggctgtctgaaaaccttttgcagcgagactggtgactatccgtagggtgcgtgactctcgtgatcctgccctggggtcccatgggctaccgagactcgaagttcgctagatcagtggctcactaggc

SEQ ID NO: 724626 - DNA, 998 bp, Homo sapiens
  misc_feature (439)..(439): n is a, c, g, or t
agcgggttcttgaaacccagccaccatgctgtgaggaagtccagacaacctatggagaggcccctttcaattttactgaaagttctctctcaaaccagaaaaagaaatgaagataaaacagataccaatgtaacttttacctgacaaaacaaccctccaaagaatcagcacaatttaaaagtttagaataattctttttgtggaagctcttataggctgaggttgtgctcaaaataaaaagaaacagccctgacagcattaacatagcacagacactgtccttcgaagcgcaagcaggcagcaccacaagcacacggcagcacacaatacagcacagcagggcagggcacacgagaccggcaaggcacccagggcgcggcaaaccaggcaagcagcgcagaaccaaaagaggcacacgaggacaaaaacaagaactatntactacttactactggtgtggcgtccagttacatctggtactacctttagattttcttctttcctttgggagtacgattaatgcataatccttgctgcactgactcattctaggttatacctgttttatcactctggcttccccaaggtcaacctgcatgttcataccaatcattatctagacatgcatgcattttctagacaggctggaaatctccttgtggatgtttcaggggcatctcaagcataatatgtccaacagacatatcgatcttgccacagaaccatgttctatgcatcttaccaatggcactttggggtatgaacatcccatccacgtactcaacatggggaaactcaggggccatgctggggagcaactcttccctaaccctggccatctgtcttcaactggcctaacatcaaagcctattagctccgcctcccaactgtcactccctatactccattgctcgtccaatacctccatgtaaacaccctctctctcactacacattttaaactggtgtcgaaattcgccagagcacctttcatacata

SEQ ID NO: 724627 - DNA, 336 bp, Homo sapiens
  misc_feature (141)..(141): n is a, c, g, or t
  misc_feature (147)..(147): n is a, c, g, or t
  misc_feature (237)..(237): n is a, c, g, or t
tatgactgtgggaacgagagctagaagacgcactttagatgcttatagctcttacctgctggagagaggaagtggtggatgatacttgatggtagaactgacagcctccaacagagctgaggccacccccaatggctctgncactgntggaactgaagccacctccaacgccaagaccactgccataggagtagctgcttcctccacccaggcctatgccactgccgacaccactgncaccgcacatagccactggagacggtggactgcaccacagagatgttgactgtgtccaaccccttcgccattcagcctgcactcctcacccttcacacc

SEQ ID NO: 724628 - DNA, 298 bp, Homo sapiens
cagtagactcctaatcatcctgtctctggggttaggctaacactcattggccaaaatgttctttctaaggcaaaccgacgcatctcaccccattctcttaacagtagagtttactctcctaagcagaccaccaggaggacccaaaggaatgtgtttaatgggtacataggagctttactctgtgagtaaatgcaggactgtagccaagctgtaaagttaccctctgagggtaacttgggtacaaaatgaaccagataattgtggcactttactagacaagaggattgtagagggatcc

SEQ ID NO: 724629 - DNA, 405 bp, Homo sapiens
gataaggcacaagtgaacagagactttaggaagtggaagggagaactgtaaaagttacgcagtgggcagcacaggcccttggtcattgcgagggaggccgagccaggaggaggaggacaataagaaggcctaacaggcatctgaagattccagaaggaagggtcagaggatgaaagggctaaacttttccataattgctaactacggggccctgagagtcaaggagaaagcaagatgtctaagggacactgagagcctgaagttctggagggcagagccatgttttggacagagcctcactctaagatggcgaaagggcagtgagagccttaagtactggggggcagagccatgtattggaccaagcctcactccttgagggagaagagcatatctgacgatgaa

SEQ ID NO: 724630 - DNA, 969 bp, Homo sapiens
  misc_feature (7)..(7): n is a, c, g, or t
  misc_feature (70)..(70): n is a, c, g, or t
  misc_feature (115)..(115): n is a, c, g, or t
  misc_feature (135)..(135): n is a, c, g, or t
  misc_feature (144)..(144): n is a, c, g, or t
  misc_feature (212)..(212): n is a, c, g, or t
  misc_feature (239)..(239): n is a, c, g, or t
  misc_feature (286)..(286): n is a, c, g, or t
  misc_feature (288)..(288): n is a, c, g, or t
  misc_feature (325)..(326): n is a, c, g, or t
  misc_feature (338)..(338): n is a, c, g, or t
  misc_feature (346)..(354): n is a, c, g, or t
  misc_feature (356)..(358): n is a, c, g, or t
  misc_feature (360)..(360): n is a, c, g, or t
  misc_feature (366)..(367): n is a, c, g, or t
  misc_feature (550)..(550): n is a, c, g, or t
  misc_feature (878)..(878): n is a, c, g, or t
  misc_feature (904)..(904): n is a, c, g, or t
  misc_feature (952)..(952): n is a, c, g, or t
gcccganaagccgcagtcgtcgagagcggtcaacgaggtgtttcggtagtctctggccatcctttctgcncacccggtgtcgcgtgggctgcaccccgggcggggacggtccgcngggcacaggagggggccaanatgccgatnaataaatcagaaaagccaaaaagctgccataatgtgaaggttgttgttaggtgcgcggcccctcaatnagaaaaaaaaatcaatgtgctacaaanaggctgtcagtgtggatgagatgaggggaactatcactgtacataanantgattcttcgcaatgaacctccaaaaacatttacttnngatactgttttngggacccnnnnnnnnncnnngngggggnntataacttaactgcaagaccgtgattattgattctgtacttgaaggctacaatgggactatttttgcatatggacaaaccggaacaggcaaaacttttaccatggaaggtgttcgagctattcctgaacttagaggaataattcccaattcatttgctcacatatttggtcatattgcaaaancggagggtgatacaagatttttggttcgagtgtcttatttggaaatatataatgaagaagttcgtgaccttttgggcaaggatcagacacaaaggttagaggttaaagaaagacctgatgtgggagtttatatcaaagatttatcagcttatgtggtaaataatgctgatgatatggatagaattatgacgctaggccacaaaaatcgttctgttggtgcactaatatgaacgaacatagttcccgttcccatgccatctttacaattactatagaatgcagtgaaaaaggcattgatggtaacatgcatgtcaggatggggagctcntcttgtagatcttgctggttcagaanacaggcaaaactggagctactggacagcgctaaaggagctacaaaatnaatctttcacttccacc

SEQ ID NO: 724631 - DNA, 241 bp, Homo sapiens
ctgcgatgtagcaatgagtatcgattgtatttcactagtcccaagaattatcactgcattgttatattaggatggaatataaggacactatttaactgttttgatgtctacaagtagtgtcaatttagcttgtgttcagctcatattttataaaatagaggatacgcatacttgtagaaaagtctcctggttaacattaaggcttcgagcggtccaggtgctacacgcagtgttaattccc

SEQ ID NO: 724632 - DNA, 426 bp, Homo sapiens
gtcactctagcaggatctcgaaaatgacatagaggcaggatcctactctgtcgcccaggctggagtggagtagtgcagtagtgctatttgggctcacggcaaccttgactcctgggctcaagtgatcttcccacctcagcctcctgagtagctgggatcacaggtgtgtgccactacacctggctaatttttgtattttttgtagagacagggtttgaccacattgcccaggctggtgttgaactctgaggtttaagtgatccacctgccttggactcccaaagtgctgggattataggcatgagccactgcacccagccaataagttttattgtaatgaatgaacccaatgcaacattaggcaaaagtaaagccatattttaaaaaattgtctattagaatgtttttgatcttttatcaaaatat

SEQ ID NO: 724633 - DNA, 209 bp, Homo sapiens
gttctagaggatcccggacgtatggtgatcagagctgggggagcagtgtgagcagcaggagagagatcaccaccattcatggatcaccacctgtgtatcaccaccattcagggatcaccaccgtgtgtatcaccggccattcatgagatcaccaccacttcatggcatcaccacacattcagggaaaccgacgctcgcaaattcgtaac

SEQ ID NO: 724634 - DNA, 108 bp, Homo sapiens
tctagaggatcctctagattgaggatccgccaagcaacacccaaggcagagccggcccgaggccaccaggctgtctctcattcttcagcgattctcagtagacagtca

SEQ ID NO: 724635 - DNA, 802 bp, Homo sapiens
ccgccgaaggttaccccgccgtgttcgtgcgccgcggccgttttcttgtaagtaaggcgctacacacccaactttttggcgcgcgatatgtgtggttggttagtccaatctctctcccgcgagagcggggtatggtcttcaatacgcgtcccccacatactctataagtagtggtcgttacctctctacgggcgctatctataaaatggccctcaacgcgagagaacgctcatctctctagtggcgctcgcggtatatggacgcccgccggtaaatatctactctcttcgaggcgccacctatatagagacacctccgtaagtgtgcggggaaagaatatgataacgcgccctcgttgatatcttcgtgggcgtaaaataaataattaggtgggcaggcgataataatagttcaccaggagtgagcatagatgctcgtttccccgcgcagacatatagatacccataaagttttctcacgtggcggtgcgaaatggtgccaccactcgcccagtggaacgaacgcgcggtacctcatcttgggtaatttacccatgggatctatgacaagagacgcatggcatcagttcgccctacctcgtcggggtgggcaaacttctatgtgtggcccctcttgtctacaagcaacgacccacttgtaatgttcaggaggttttgtgtgattataaaaagaagataatgtacagtcttgatgaaacaatgatcgtgaacacacgagggttgttggttgatgtaaaattagggccaaattgattaacccgccccatacattggtcagagaa

SEQ ID NO: 724636 - DNA, 897 bp, Homo sapiens
tggcccccccttcccctccaaattccgggccccccaaaactgatttttttaaaaaattgacaaaacgggtctctttccttttttaccgggctgggaagcccagggaggtctcaggtcccgacagccaggggcccagggctgtctccattctttcttggagaagctcttgaactgtgctcttgtgcctgtggggggtgccccatctgtgaggccacaagcggattcccatctgtgaagtggggtgggttctcttatatatcctgtgggcccctttatgtagaggggtgctctcctctccaccacacgctgtgtgcgggttgttgaccacacagagatctcaccgtgtgctgtgccccctatctccagtatacctgtgtgaccccatatatttgtgagggagattgtcgcagcggggtatcccgtagatgtgagtgtctcccatatgtggggggtgtgagacacactgtgggctccacttctgtggcctcgtgagagagcctccttgtgagagtgcgacacacaaagtgtgtcgcgccccggagaaaagtctccccgggagagagatatctctccaaagacagagacacacccccgagagacacccggaggtatcaccctgtgcgcgagttaaccctgttgagaacatgtttgcccccgacgagggcttctcccagcaaacccgaggaggggggtttactctctcgccgggggagaagagcccccacacagtgatgtgtgaacctcctctccccaaagggtgttgttagggaagaagagccctctctaaatcaacactgtggtaccacagcggccgatacgtttgagagggagcaaaactttctccccgcgataataacccccgccgcgagacacgttttggagataatagagcgtgtg

SEQ ID NO: 724637 - DNA, 357 bp, Homo sapiens
  misc_feature (2)..(2): n is a, c, g, or t
tnaggctgaaggtcacaataataatgctgagtaaaagccaaccataaaaaatttgttttttaagacggagtctcactctgtaacccaggctggaatgcagtggcgtaatctcagctcactcactgcaacctccacctcccaggttcaagcgattctcctgcctcagcttcctgagtagctgtgaccacaggcacacaacaccatgcatggctaatattttggtaattttatagtacagaatggggtttcaacattgtaggccaggctaggtctcgaatctcctgacctcaggtgaactggcctgccttgagccttcccaaatgtgctggaataacctggcgtgtagtaaccatgctc

SEQ ID NO: 724638 - DNA, 180 bp, Homo sapiens
ggccaggcaaggagctgaggagcgctcggtggaccacgaggccttcagcctctagacttatgccctgcccccgccatccgccccacgctgtacagagtccatgaggagccgccggaccaccggggaccgactgccttcgtccagccgcggcccatccctgaggccgcctgtggccaccat

SEQ ID NO: 724639 - DNA, 176 bp, Homo sapiens
tcaagcttctaacgatgtacggggacatggtggcgtaggcgtgtaatcccagctgttcaggaggctgaggcaggagagtctcttgaacctggggggtggaggttgctgtgggccaagatcgccgcattgcacttcagctagggcaacaagagcaaaactttgtctcaaaaaaaaaa

SEQ ID NO: 724640 - DNA, 275 bp, Homo sapiens
gggcccccctatttttttgggggggaaaaaaaaaaaattttttttttttccccccgggaacccccccttttgggcggtttttgggcccccaaaaaggttttttttcccccccccaaaaccttttttgaaaccccttcaaaaaggggggccccggggggaaagggggtcccccaaagggtttccccccctttttttttggaaaaaaaaaaaacccaaaaaaacccctttttttggggggggggaaagaaaagaaaaaaatttcccttttggcctta

SEQ ID NO: 724641 - DNA, 893 bp, Homo sapiens
ggtcccacgccgggcggctgtgccgtcccgtgtgtgcagcacagctcccgccgtgtcgccggttatggtgagacgctttcctgcatgatggggtattatacacctggttttttgccggtggggtcgcattccccgctgggccgagtttgtgtgtacgccttgaaacttttccgtcggccgccagcgcgctcgttttctcgcaccttgtgcgtgagtgctgcacgactcgctggcctccctgttctggagtaatgagaggccacggttagggtggctccggggtggaccgctctctcctgtggtgggacaggggcgccctccctctgagcgtgggtgtggtcttgatggtttagccaaacctgggtagccccccctcggagctggcccatctctgctgtacaccgtctccctggtggccgttgattctttggccttcatcacaggcggttagtccagtcaggggttgccccgctgtgtcgtgtggccacttagtttcgttggaaccacttcgctctcgggccgggtgaccgctcgcacgctcgcctaccagtctctgcgccactgcgcgtggctctcggtttctctggagtacgcgccccccctccctcggcgctgtgcccttgcggtttatcgccccgtggtcttgtctgtcctccacgattttatgagggacttttttctagagtgtagagagaggaccctcagacgccgctgataattcgcgcggggccttggtcacccgcgggcttcttgcttatctttggtagaacgggcccgggccttcctcatgccttgggttgcctgcgggttctgcgagcggcaccacttttattttccttgatatgggaagcataccatttctgggctcgtggagaaaaacggcccaacatgtc

SEQ ID NO: 724642 - DNA, 836 bp, Homo sapiens
cgtttttagcgtggggtgttcttctgtgttcacgcgcgggttgttttatgtgtccggcggggccgccgggggggtggccccgggtgagtctgcgcgacggggggtgtacagcgcctggttgccccgggtgacaccgttgtggcgggctttttttaagagtacccctctggggtttttggggatcttgttgcgccaatggcctcgacgaggtgtggcccactggagttttttaacccggggttttctccaatctcgtgtgacaaaatggtgctcccacgagactttgcggccgtaatacttgcatctcccgcaggtgattctcaacgtggaacgcccccccacgggggggcaaagttttcttctccggattcacctctctctctccgctcacaccctctctggggggacccgatacaattgattcttttataattcttaacaaagggagaagcaaatgttgtcccccgtgctgtcttccccacacatatatacaggttgtaggttggggcccgcctttgaccccctagaggcgaataaacactctcgtgtggcccacaccggggagccgacccctcttgtctttattcgcttctcttcttgtggcaaccctctcttctaggacccccgcgcggtctcacgtgaacccccttgcgaatacgcaccccgctccctcatctgtggctctctagagacagaaatgtggtccgcccaccttgtttaaccaccatagataagcaggtcctcctgtcctcaccaccgagtttggagagtgtttgtccagacaaaaacaaaagagagcgggtgtttctctctgtcccaacaatatacagagaaaa

SEQ ID NO: 724643 - DNA, 309 bp, Homo sapiens
gtcgaagtagcgaattgtgccatgcactccagcctgggcaacagagcaaggctccatctcataaataaataaataaataaattgaccacaaatgtaagaatttatttcgtggactctcaagttttgttcacttagattcatcatgtcatagctcatatgctacgtaccacatagatgttaatatactattagctttatagtcaggtttcaaatatacgagttcttcaagctttgttttcttctttcaaacattgtttgtgtttaataattcatcattaagtgtaatatattgatagcggttagggttta

SEQ ID NO: 724644 - DNA, 104 bp, Homo sapiens
agtatggttcctgtcccacgccgtaccttccattcccagctcttgtgccagcaatcgagaacaccagcactttgcaaggaaagactgtccaatcacagataggg

SEQ ID NO: 724645 - DNA, 220 bp, Homo sapiens
cgagccggtacccctagttttagaagtttcaatagcacctagctatagaagtttcaatagaacagtagtaattgaagactgggtggacaaaatcagcacctgatggaaaatgaaaggtttcagcaaaagctctcgataatgttacctccaggggtaccatcatgccaccattatgggtgctacaaatctgtgaatttatttatgctatggaaacttctaa

SEQ ID NO: 724646 - DNA, 1020 bp, Homo sapiens
ctagttctagatcgcgagcgggcgtccttttttattttgttttatatcaaaatagcccgctgggatcatggtggtactagggagaagaggggaggaggggaaggtgaggcccacaagaaaaaaaaaaaaaaaaaaaaaaaaaaaaaaaaaaaaaaaaaaaaagaaaaaaaaaacaaaaagaaaaaaaaaaaaaagaagaaaaaaaaaaaaaagcaaaagagcgaaaagaaaacaaaaagaggagaaagagaaacacacagaaaacaaaaagaagaaaaagagaaaaaagagaaaaggacatacaaaagagagaaaagaacaagaagaaaaaaaagaaagaagaaaccagcaaagagacaaacgaaagaaaaagaaaaaaaagaaaaaaaggaaaaaaacaagaacgagaaaaacaacaaaagcaaaccgaaaaaaaaagaaaacaccaaaaagaaaaagaaaggtgaataagagaaagaaaaataagaaaagaaagaagaagaaaaaggataaaaaaagataacaaaaagagaaagaaaaaaaaatgagaaaaaaaagaataaaatgaaagaaaaaaagcaccagacaaaaacaaaaagcgaaaagaccaagaaaagaaaacaaccaaacggagaaacaaaagaaggagcagagaggagagaaaaagaaggacaacaacaaagcgaccaaaccacacaaaaaaaaaagaaaacaaagaaagaacaaagaagacacagacaacacgacaaaaaaaaaacaaggaaaaaaacaaaaaggaaagaaacaagaaaaaaaaaaaaaaagagacacaaggcaaaaacaaacaagcaaaggacagggggaggaagggaagaaagcagaaagaagagaaagagagggagaggaggagaggacgcgcggggaacaaggggaaggcgagaagaaagaacgaagaggaaggggaggaggaagagggaggggaagggggagggggagtgagcggaacgagacgggaaggggacaagaggagagaggaagaag

SEQ ID NO: 724647 - DNA, 113 bp, Homo sapiens
gcctgccggatatgactccccgtttcagtggaccctgtggcaggtgcttttccctatcacagggtgtttgtgtgtgtgcgcgtgtgcgtttcaataaagttgtacactttctt

SEQ ID NO: 724648 - DNA, 730 bp, Homo sapiens
gagcgtgtcatgtgcacagttttagtatgggaagatgagaaaattctggaggtggccgggcgcggtggctcacgcctgtaatcccagcactttgggaggccgaggtgggcggatcacctgaggtcgggagttcgagaccagcctgaccaacatggcaaaatcccatcactgcaaaaaatacaaaaattacctgggcgtggtggtgcatgcctgtaatcccagctacttgggagctaaggcaggagaatcacttgaacccaggaagtggcaggatcgcttgagctcaggagttaaaagaccagcccgggcaacacagagaaaccccccacctctacaaaaaactttaagattacctgggcacagtggctcacacctgtaatcccaacactttgggaggctgaggcgggaggatcatttgagcccaggaggccgaggctgcagtgagctacgattgtgctcctgtactccagcctgggccacagggtcacaccctgtctcaaaaaaaaaaaaaaaatgcagttccaaaggcgcatgggccacgtttccagtgcttgggggccatgtggggctgaccgtgcgaaaccttagagccgggggatacgtccgtacatcgaaaacgtttacctggacggccctgggactgcaggctgaccgtgaccgaggtacatcgaagccatgaccgtctgaacagcctgggcagaaagaccacccgggcttcccaactcgcggg

SEQ ID NO: 724649 - DNA, 137 bp, Homo sapiens
gtatatcctgtacaaccaaacaagttatataggtaattgtttgctatcttaatttgggttcgtattctttgatgttaccacatttggtataattgtatcgtatagctgtatagaatcatgtagtatcaaatatacga

SEQ ID NO: 724650 - DNA, 306 bp, Homo sapiens
cggagcagcatcgggcgttttatgagttgttgccctatctggtggtgggcgccgtggatgatcaggggcttccgtgggctacgctgctggagggggcgccggggtttgtgtattcgcctgacccctacagcttgcgtatcgacagcctgcctgcggtggatgatcccgccggggcggggctgaagaagggtgcgcggtggggctgttgggcattgatctgaatacgcggcggcgcaaccgtatgaatggagttgtggtacggctggcgctgatggttttgcggtggacgtgggggtaccgagctcg

SEQ ID NO: 724651 - DNA, 732 bp, Homo sapiens
tctgatgaacattcgtgaggctcgcggtgcccagtataggctaaagatgatacttgggttaatagtctgatagcgcctaggaagaattccgtaggatgatgactagtgtgttggaattctcaccaatagaaaaacgcaccggaggcaaaaccgtgatgtactgataacctcccaattggagtctgacggtcgattcctggattatgattaaacaaggtacgctacttagcagagactcgagtaattcaatattacgtctctctctgacactgaaatacaaaaacaattataacatctcaccaaagaagatacacagatgccaaaaaatttgaaaagctgtttaatagtatatgttattaggtaattacaaattaaaacaacaatgagataccactacacatctactagaatagccaaaattcaaaatgctaacaacaccaaatgctggtaaggatgtggaacaacagaaactgtcattcattgttgatgggaatgcaaaatggtttggccactttgaaagacagttttgacagtttcttgcaaaacgaaacatacttttaccatatgattcaacaatcttactcctgggtaattacccaaatgagctgaaaacttatgtccacacaaaaccctgcacatggatgttaatagcaactttattcataattggccaaaagctggaagcaatcaagatgtccttcagtaggcaaatggataaaccgtgatatatcc

SEQ ID NO: 724652 - DNA, 625 bp, Homo sapiens
gtagcgtttatcatcgaatgaagaacctaaaaaccgccacagcagaggatagtcaaagcatatgcatattgtacactcctcagattttattttaaaacggagtttgcattttccctacggaaactcaggattttacaagcaatgctctcctcagtttcaccagtactgtgtccagtactatattgctatattcacagtataacggaacgttcaatctctgagtgatccggtctatgtattaagtttctgatgaaactaacatacaccttagtcaaaaaccacaacaatccctcaatctgtttgctgtgttattgttcttgtgtgtttttctgaggcttgggtaatgaaagtacttccccactccattgtaatctgcgtttgcatctcaagtaattcattaatgtacaggagtagatgaggcctggcacacatagcagaaggtaatggttctataggtgtatcttctgtaatgcactttgggctagagaaatagaaaaatcacacgtaacaaaaacaaataactttatagagcacacgggtgtcgcgtgagtaggaccggcatacatgtagctatcatccttccccatttaacatgctcagctgtgctgcatctggggattagctt

SEQ ID NO: 724653 - DNA, 352 bp, Homo sapiens
ctatattagatccccagaacttattactctgatacctgaaaatttgtacccttggtaccaacaccgtcgtccagttgtcccgtaacccccatccccgggcgaaccgatcatgtcatctctctggcttcaagtgagtgtaacttgtttaagattccatatgtaaatgagatgatatagtatttgtctttttgtggctgatatatttcacttagcataatgacctccaggtcccatctgtgttaccacaaatggcaggatttcctgcctctcatagagctgaataatatttcattgtagatatgggacacaatgtctttgtcaactcatgtattgatagacacagtttgtttcc

SEQ ID NO: 724654 - DNA, 866 bp, Homo sapiens
attgttcaaaaattcactgtccatttttttaaaaactttaaagaatgtagctattttctgaggactggtatggtacaagaaatgtaatcaccaaattatcagatactacatgttgaaaaagtgaggatggggaaaatatgtatcagcatgaccctgatgtagaaacaccatacaagtctgcaattgaaccttggcaaaatacattacataattatttctgataaggataaatattcagctgtcatttaactgtcgtgaagaatgaaccaagtgatacatttgggctttttagatcatttgtaactaaatttgtacagaaattctcctgtgaaattaagtaaaccattttccagatcttgacctgcattgctgagatttctgcagtttgaaaaactcctctcaaatcctctcaggatcttccgtcatatttatctccttctaacaaatatatttaactataaaattaccattcagtagttagactcttcataatgccgcaaatggatgcgccttgacttgtataagaaccacatgagtctctcagcttacaccattcttgaacctaatagtgtatgtccgcaatttcgtcattcattcgtcgccttcgacggcaactctctctgcacctatgtcacttgctgatgtcatcctgccttcgtggttcagacttcgctcatccgctctccactccactctctgcccgtccccgtccgctctgacgttgtgtaccgacaggcagcaggtacacgtcttgcgtgccacctctttggtcccggtttgctcactcctgcccacgcatcgcttcctttctccacatgcgctctccgctcacccgttttctcccccgattctacacgcccaccccg

SEQ ID NO: 724655 - DNA, 222 bp, Homo sapiens
gctttctattagctcttagtaagattacacatgcaagcattcccgtttccagtgagttcaccctcttaaataaccaggttcaaaaaggccaaaggaataaggaccggagccattccggttttaaacggtttggcctggcacaaccccacaggggaacaacagtgtttttaccctttgcgcaaataaagcgagtttttactctaaatctatatctacccccga

SEQ ID NO: 724656 - DNA, 356 bp, Homo sapiens
tagtactagatcgcgagcggcgcctattttttttttttgacaaaaccgacagctggtaaagggaaatttaggtggctctctagctaacgaggttgaaccagacagcaggcggacccggacggcaatgcccgagctaatgccacgactacacgatagggaccactagatcgacagaaaagctgccctacagcgtagagccacgactttcgacgggatacctctacgagcggccgcccgttcgcaggagagaaacccaccgcagcgtgggagcgcagggacacacgccaccaaaaacgagagcggcgacaccagacaacagggcaacaaaagacgaccacgcacaaacgcccagaaaa

SEQ ID NO: 724657 - DNA, 1535 bp, Homo sapiens
  misc_feature (1)..(1): n is a, c, g, or t
nggtggatacctcctctcttgtgtgcgtgcccccccctctgtgtgtagtgggggtgctcgcccgcccttcgtggggtgggcgtcctctctattatgagtctgtttgggagaaagggggttttcgtttttgaggagaagagccttgtggagagtgtggcagcacgccaccttgttgggcgggtgtccacggtcggtggttgtgtgaagagaatatgggtggctcaaccgtgggcataatcgttgtccggcttgtgggggggaaggcgccacatataatatgggcgtccccatctcttgtgagaacggcgcgtttctccatctctcgctgtatgaagaggaggggttgcatcacgtcgggggaagaccatcgttgggtgaagagggagaacccccccggctgttggttgtgttgttggggggcttgtggggagttgtgtggagtccccacccatcagcgccatcatggggattttttcttcttgggggggcgcccacccacgaggggtcgctcggccccaagcagatggttgggaggaggatggctccaacccggcgacaggaggatgggcccgcgggttttgtgtggatggacgacaagcgattctcctttggcgactacgagcgccgcagctacaaccgacacgacgaggggtgtaatgcgacaggcgtgtttgttcttgttggcggtggcgccgcctcgtgtgcaacgggcggcagcctgcaagagggggcggctctgtctctgcgccctactttgctgtgcgcagcacgcccccctgtgtggagctctctcactgtcgtcgctactgtggagagaggaccccctgctgggtgtgcccttcgggggcgtgtctttgtgtggggacacaccgctctgggtgagacacagagagcacacacgcgcaacagagtgtcggggagacacacacgcaacagagaagacacacactaggggcacggacacaaagaggcccctcgggggggcgcccacactatgcgtgcgcgcactgtctgggtgtcacacacacaggggggcgctggagaggtgtccacacgcgagaagtgggggccacacaaagggtagagagccacagatgtccccgctgtgtctctcgagacactctcacgcacggcacagcctctccacaacacaccagagggtctccacaagaacctaagggtcacatggaacgaagaatgggagaaggcccccagggagagaaagggaataaaccctaccacacccacgagctccccgggcgtggagacacatgcgtgagacgtggccttgtcccccccacgcctcttggcctctgggttttttaagcctattttaacctgcacagggtgagagccacacttttttccctctttccccacgcactcacactccccaaggagaagagagcccaatggtttccacacccactaaatcctctttctgccgacccctagttccctttggtcagacccaggcttgttatcagctttcagggccctgggtccaccttagaattaaaggtagtaaattagaa

SEQ ID NO: 724658 - DNA, 98 bp, Homo sapiens
tcaacaacctgtccagtgcccgcctgcagcagatgagcgaacgcttcctgcaccacacgtggaccctagtttaataaagattcaccaagtttcacgca

SEQ ID NO: 724659 - DNA, 381 bp, Homo sapiens
aattagccgacgcttggtcatggtgtatacagatgctatgaacattggggagcatgtatcttttccaattatggatttctctggatatatgactaggagtgggattgctagatcctatgatagttctgttcttacttttttgaggaccctccaatacatgttttccataagtggttataccataaatttctgttattttaacgccatcacagtctgtagctattttgttacacgtagctccaggaagctaacagagggtcccgagataagaaggggcttccacggaaaacgagggcgttgtggctttggtgccagggaccacctgtttcctggggtggacctctcactgcacagatcacgatctggccgtcgggtaatttt

SEQ ID NO: 724660 - DNA, 297 bp, Homo sapiens
  misc_feature (19)..(19): n is a, c, g, or t
  misc_feature (74)..(74): n is a, c, g, or t
  misc_feature (86)..(86): n is a, c, g, or t
  misc_feature (103)..(103): n is a, c, g, or t
  misc_feature (115)..(115): n is a, c, g, or t
  misc_feature (132)..(132): n is a, c, g, or t
  misc_feature (143)..(143): n is a, c, g, or t
  misc_feature (223)..(223): n is a, c, g, or t
ccatcaggggccctcatancgggagtagagtccctggtgctttcataagagggagaggtacttgcgttgtatcncgcaagcagagngttctctttggttttgnggttgaagtgcnttggcccatttgtaagnccccatccctnccctacacaaagtaaaagcagaagatagataaaaaatgatgtaattgcagctggtaggatgtctggtgccaatcccaggnagtgagagccatttcttttgtaccggatttaatgactttgaactgtgctgtaaataaataatacagctggcctt

SEQ ID NO: 724661 - DNA, 285 bp, Homo sapiens
  misc_feature (12)..(12): n is a, c, g, or t
  misc_feature (38)..(38): n is a, c, g, or t
ctatggcttcgncctgtaatcccagtactttgggaggncgaggtggcaggatcgcttgaagccaggactttgagatccagcctgtgcagcatggcgagaccccatgtctacaaaaagtagatttttaaaaagcccggtgtggcggtgcatgcctgtagtaccagctactggggaggctggggtgggaggatcacctgagcccaggaggtcaaggctgcagtgagttgtgttcacgccactctactccatcctgggtgacaaagcgagacactgtctcaaaaaaaa

SEQ ID NO: 724662 - DNA, 904 bp, Homo sapiens
atggtggttgcacgtgccggcgaggcgcatgcccagcgcctcgccatcgagagcgccgtaaccgccggtaactcactggaaccggggcttgcgaaggatctggtaaacgcgttgtgcggcctgtacctcctcgactacctgaacaaacacgcggcctggtatatgagcgaaggccttatggacagcacgcgctaccgtgcaatggaggaacacctcaaccaacacagcgacttcctggccacccacgtcgcgctgttgatcgacgccttcggccagggtgatgcgagccgcgccgcaatcgccagtgctgacgcttacccggacgctctggctgccaagctgcaatgggcgcaaggctgaacctcacaactcacctgaaccgtgagggccatggcgtacgaagaattggtgaacatttcccagacattcattttcacttgggccttatcaaacttccggatcctcgtcgggcacctaggcaatggacaacatatttccatccaggagccgccccatgtcccgcacgctagacaccctgtcgcgccccagcctgttagccgtggcatcgccctcagtgccccgctggccagccttttgctgatcgacgacgagcaagcgtacagcgtgcgcgcctacaacctggccagcgcgcctttgggccagcacccttgaaccagatcgccagcaaggcgggcctcgcgctgaccttcagccggcgctggcctcgggcaagacctcggacccgtgtccgggcccacgtcgactgcgcccgggctctgcgtgcggccctgcgccgaaccggcctaacttgcaccacggcggcccggactcaccgtcggtgccacccgacaggctacggccctgcgtgctacatatccgcgccgcaccgcccggaagtcctgcg

SEQ ID NO: 724663 - DNA, 389 bp, Homo sapiens
  misc_feature (213)..(213): n is a, c, g, or t
tttatgtaaataataaatgttttaaaattgttacaatatattattttgagttatttcatttatatttcatttacctagcaaaatataggtttttttttctttaaaaaaacattaaatattaaaataactatatttaaataaataatgttatgatgatgatatttaaaagcttagttattaggttgacgtcttcttttaatgtgcacggttttnggtctttggttggtatacttgggaagggctagcggtttttttcttgaggagctgggtgaggaggtgcagggacctccctctctcattccctcacccccgtcctgtcctcattttccgtagaggagtcagcctcaggattgggttcggttctgaaaggtcagggacatttcctacca

SEQ ID NO: 724664 - DNA, 880 bp, Homo sapiens
gcttaacaatgaacaagatattcgaaagagatcggaggactgactcaaaactccatacctctcatctttaagctccctcaccattggcagcctagcattacgacagtgatatacctttcctcacaggtttctactccctaatgaccacattcatcggaaatcccgaaaaggctatatcgattagcatcataatctgcctgaagccctagtctattactctcattcgcgtagcctcccttgacgaatgcgcctagtatgctacttctgaataattcatttctctaccgctaacaaggtcaaccatctgcgttcccctagcctataggatagctattcaaacgagctagtaagcacgccacctcctaattaaaaacctcactattcagaacctggccttgtagcgatgtcaccggaaagaccctatgtaccgcgagcggattgtactcaatgtaacatagaacaaggcatttttcctcgaccggcaatcgcacgcactgttgcctagagacacacgaatccctcccatctaccctaaaagagttcagaaggccctcgtctggtggcgttgtccttatgggaacttctaggcagacccctaggacctcaaagctaacctggaggcaacaaaatcgttacagaataaaaatcgcccgactatggcatcgagttttaattttgctcgcaactatatgtcgggattcctgaccgcttacacatgctacatcaccgggacaaattcccccttatctaagggcccttctttaacggagaccgaaaaagctgtcccctctactcccctccttatagccttgaaccttgaacttagcaagagagctaatctaacctcaacaacgaaatttttcaacaggctaatcccaaa

SEQ ID NO: 724665 - DNA, 537 bp, Homo sapiens
  misc_feature (7)..(7): n is a, c, g, or t
  misc_feature (9)..(9): n is a, c, g, or t
  misc_feature (11)..(11): n is a, c, g, or t
ccaattngncnttatggccgggctcacttaacattacaacactgaagctttctagcaaggtaagggagtacatttccttctacactttgccaacaccaattaatttgactctgtttactcttttccaacttgtcaaaaaatgacacctcacttttatttgtgcatttttgttgattagtgaggctgagacatatttcatatcacatgtttactagccctttgtatttctttctttgaactaatttaccaattcctttgtcaattttttgattagtctgtcttatcttcttgaggtctaaggatttttttacatatgctaaagttattatattctgccttctttttctaatttgtcattttaaaaatcttgtttggggtttatagagtttcctgaatatgcggcttgatatctcttgtcagttttggaaaattctctgccattatcttgtcaaatattgtttttgttccaatccctttttcttcctatcctgtgacaccaaattcacacacattagaccttttataccatgctgcctg

SEQ ID NO: 724666 - DNA, 870 bp, Homo sapiens
gggctctcgtcttcctaggtgccctgactcctcgtttcatgactggtgttcaacctagtctactacacgctaacactcttccgagctactacgcgtccattcccctgagtagatggtgcagtcgaggtctgctaagtaggttaagtctgtgggcagtcctcacagtaagcgagctccgggaaggtgtcactgctcgagtcttcactccttacagagagcagtccctctctctgctgcagcttggacgaccgctcgcgtgacggatgagaccaggctctcaggcttcttcagacatgatggtcgcggaggcggtctctcccggtgtctgctgcggctgggtccgatcaagcctacgcagacaagtgtgtgtgtggaccatcgcgcacctccagcccctcatccccacctctcttgtgtctcagcgtgttatggtgcatactgaccgtactttaaggtacaacccattccaactacagcatgttcagggttgatccaagcactgcctccctcctgctctgtccaggtggtctggacctataaactcaacttgagagggaaggcttaggggttgaggacttcgtgatcagagatatctcgaagatcggaagctatggggccggagctcattgagacatgagtcctcagctctgtgtcctgagcccgtgtcatttctccaacctacctgcccccacacagttatctcagacactgacagccatgtggtcatggaggtcccagcgcgccaccctaaaaagcttataccgtgagaagctccaccagacttgggagcaccaagtgcagtgcctggtgatgctcccatctgccgccccccttctctcctgcaatactctgtaggcactggactgtcgg

SEQ ID NO: 724667 - DNA, 308 bp, Homo sapiens
aagcattggcagattacatcagtgcaacaaaggaagtgaccccattcaagaaagttcgggacttagcagaaaatcaccactctgttgatcgcagcaaaagaaatatcattggatattctgagcagcaggactcggacaaactatagagttatagaccgagtagcgaatatttggcatgatgactgtgcctttctttctgcattcggggatgtctcaaaaccggaaagatatcgtggcgacaacataatctacaaaccaacagggcattctgctccggatatggtgtacttgggtactacgcttaggca

SEQ ID NO: 724668 - DNA, 258 bp, Homo sapiens
attgatagcacgcacagagtcttgtatatctgaatacagtctttatcaggttcatgattgtaagtatattctcccattccatggctgtcttctacttttcttaatgggccgggcgcggtggctcacagctgtaatcccagcacttagggaggccaaggcaggtggatcacctgaggtcaggagttcaggaccagcctggccaacctggcgaaaccctgtctctactaaaaatacagaaattagctgggtgtggtggcg

SEQ ID NO: 724669 - DNA, 132 bp, Homo sapiens
gatcccctcttgactctgagctcaggtatcgcctgcctcggcctccccaaggtgctggatttacagagtccactgtgtccacccacgtggtgcctctggttaatttaatgacccttgttatccattaacgtt

SEQ ID NO: 724670 - DNA, 1631 bp, Homo sapiens
  misc_feature (1)..(1): n is a, c, g, or t
ncctcgtactgcacgtattgagtacgtaatgaatacgcagtctgccgtgtgcgtcctccttcacggcttcgtagcctcgtctctggtgttgttcagctacttacgcttgtatatggttggattctctcctcctcgctgtgctggtgtggtttcttctctcttgtggttgccgcactaatatcatgctcgtgggtggtcttctcccacgctgtctcacacccgcggacgggcaatcactctttgtgtttgactaaaatgaagggagcggacggccagactccctcttcaatggagcgtacttactatttctggcgccccccaccacttggttggcccaccccccggggggaagcccccgtttggttgttgcgccgacccacaacgggccggtgtggctccacagaagtttgttcgcgcagccagtgactgccggaactgggtgcgaagacgaacacttgtgtgggcaccgccgcgacgcttgggtgttgttccccccgccgccccgatgagattaggccgactttgttggaaagaccctgttatagaatgcccccctttgttggtcacctctccgcgccgctgtgttatagtcccccatcccagcggcgcccgagccaagaccccacgtgggaccccctcttgatgttcacagggtgtacacccacggaaagggattttttggggaacaacaccatgtggcgaagtcaacccccagccccaagctttgatatacgggaccattgcccacaaggccccacccgaggggtcttaatgttattgctccacaaaaaggaagtgtttccccctttgtgcgccaacagaacacattggaccggggacatttttggggcaccaaagtgggaggagggatacccccccttttaaagagggagaatttacttatagttgagaattaatccccggggaaaaccatgtgttagacaccccccccatagggtttaccccttgtaaccccacacaacccatgggaatacattctcatggcccccccagaataaggcgatatgtatatgtgtccctcgtgcacccaaagagaaaagcgcctcgttggaaagaaacctcatgaaccaccctcgtgtgttttaatatctccccacaagcccacttatagcctttctccctctgccactacgaagggaaaccccgccccctcttttgtggttttgaaccacttggctgggctctgtggcgccacaaccactttcgccacttggaaccacacaagttctccacctaagcgcacatgctcgttggaccactcgaggtcctcgaccacacagaaagaaaaatgagaagctccacaaagtccacaaaattcttcgctgagaaaacgcgaagtttggccttctcacttctccacgtggatatatcccttccccacaaagggaacccacgggccaggcttattctttgtgtccaaaccggaagaagtcacaccccacctcgtgtggaaaaccagatagctctcgacagttgccagtacttacccctggctaagaactgccctgctttgtttataggactcgccagacccaggagcgagctttttctccgagcctgcttttcctttatttaaattactgatgccagaaaaaaaaggaaaaataaaa

SEQ ID NO: 724671 - DNA, 196 bp, Homo sapiens
  misc_feature (26)..(26): n is a, c, g, or t
  misc_feature (146)..(146): n is a, c, g, or t
  misc_feature (155)..(155): n is a, c, g, or t
ctcggcaccccttgtgattacttgcnaaataaggcttatgcttttgaaagatcaagacttatgaaatttggctccagtatgtatgtccaacttatcttggaccttgtggtaaatgtgaccgttacacttcacctcctccccattgnaccccactntacacactatgccagaagctctttgaagaagtcaattccaa

SEQ ID NO: 724672 - DNA, 250 bp, Homo sapiens
  misc_feature (4)..(4): n is a, c, g, or t
cgcnaggtcacttcaggctgagcgtgaatggcgatagcaacacgttgaccagcagcagcgcatacacgatcacgatggctgcggggatgaccacgggcggccgataaggcgggtaggcgcgtcgacggcgccagaggactccagccgtagttcctgtgatgaccagtgccagcaaggcgctggcccacgccagtgatgcaggtccggactcgtcggcattggtcgccgtgtccgaatcggtcagcgagat

SEQ ID NO: 724673 - DNA, 234 bp, Homo sapiens
ctaacctctaactcctcctaccatggcagaccacaggcctacagcattctcctcagtgggaaagacatcagcttggacaaccactatggaaaagccaacgttatcctagaaaagcttattaaatgacccagcaggacaagtctccggatggccttggcaaaaccggatgcttccctcttttcttggttgtagttctcagacataactagagaatgtactgggagtgttgtccgg

SEQ ID NO: 724674 - DNA, 248 bp, Homo sapiens
acagaaatagtatacaagtcagtgtgatgaaaactatattaacaacaggaaatgaaatacaataaactatacacaaaatactcactgctacatatcactaaataaaataaatagaatggtcaagatactaacacatacccaaaataccagagatccaatatgtgcctatccataatgaagagtacttaaattgttatagatacataccttccactaggcacaaaatatcacaggtcattccgcaaaag

SEQ ID NO: 724675 - DNA, 250 bp, Homo sapiens
atttgtctctcctgaacagctcctttttaaagccttttatcttgttgatggtctgcaaacaacaccagaacgtgcgtagcacctccatgtacatgacattcctggctctgattaggcctcagcggccccacccccagggaacctgcagagacttcggccgctcactccgctggcatgggggaggcagtgtgtgctgctccaccctgcgtttcagtttaggagactgaacatccaacgctgttgacaatca

SEQ ID NO: 724676 - DNA, 782 bp, Homo sapiens
tcaacttctctgacaagctagggcggcaggtcatcaggcaccagaaggatttgccagcagtagggctcctggatcagcgatatgcccgggcccctgtcctgggcaagcgtgccggcctggatccgagcccgtgtggaggtcaaagctaccttggggcccgccattgctgctgtgcggaagtttcaccggggagagagtcgggctcttgctgatgggcaaccacagcactgtcctggcgccgtgcccttcctttgtcgctgcccgctggagacagtgttcgtcgtgggcgtggtctgctggggatcctgttacggaacggtgaacagccaggaggagagtgtggagtccagcagtcgctggcaggtacccagggcacaggcgttacgctccgcgtaggagaaaatgggggaatccgtgatagtgaacagtgggtcctgtgctgtccttggggcgttccagggctagatcccctcctggaatagaatctttactttccactgctgctatggctgagagccaggttccttcctggtctccgtgggagggtgtgggcgctgtggtgtccacctgtggcatctacgctcctgaccagcttcttaagaggcgagatggtgcgggcccatcttggctctgccgttttaagccgaggttttaggtgccctggaatggttcatcccgggtgcaatttaaatggtccttgggcccgggtcctggcggggttgtccttcctacatctcgggtcaccctcgaagggcgggccattcgccaagcgcggttgtcgg

SEQ ID NO: 724677 - DNA, 350 bp, Homo sapiens
gctattgagattgccagagggtcaagagagaattggggaggaggcggtcaagctgctgtaggaaacaccacaggctgaacgggggaggaatgtcacattccacgctgtggtgtcccggtctcggggaggcagctcagctcttatgagcaagttgtgggggcttttcaagaggggccaggcttcctggagggtgactgatgtggctgaagcaggtgtcccggcaggtatgctgcagccaggagctccctgtggaccgcaggagctctgtggtactcttgccttagattttacacacactccacaggcaagcactgtcacggtcctccaggagctgggaagcaaaggcgcag

SEQ ID NO: 724678 - DNA, 144 bp, Homo sapiens
  misc_feature (43)..(43): n is a, c, g, or t
  misc_feature (54)..(54): n is a, c, g, or t
  misc_feature (82)..(82): n is a, c, g, or t
gaggatcccagtggcagatgtgctacacacaggatctagaagnatatgtcaaantataaacggctgtgatgtgaatgacttngttcttggcttgtgtttttcaatttcctataatgcacattcttccaatacacattctccaat

SEQ ID NO: 724679 - DNA, 1900 bp, Homo sapiens
tttcctaagcattgaaatggcaagtgcaaccaaaagtaggtatattcgtgacttcttgtttaggtctctgggccaggaaattcatactgttacatggataaggttgggattggggagagggaacagttgggactagaagcaaaagtgattctgggactaaaataggaagcagatgtcctttcccaatgtgtgttgctgtcttcacctgaatgcatttgtgtaaaaatagcggagggacaatgtgaacatttgtatttggaagctatgaatttactctgaagtttgcagttgtttccaatttgtgagctctaagagtttctgcctgtaagaactactctccttttattttgatttttaaaaacctgtctgaatttcacactcttagagcctggaagagccctgaaaagacacaagtcttgcctggctactgctttttaactttgagggctctatgttgacagactgttatctcctctgggtgacctcaaacatctgaaaagaaagatgttgcctgtgccaattccactttttccagctgccccttgatgaacactcccttataccagaccactctaggacttctgactggtgtcatcaagtcctcagaaaatattttaagttattttaagttattaaggaagggatgatttggagacaaggagtaatgaaagatgggtaaaaactggaaaagattctggtgctaagtactaccccttcatcttccatggatggtcattacctttcctgtcctcctgttctatgaacacacacacacacacacacaccccacatttcaataagtcttcattgttctgggtccttacctttcctgtcctcctgttatatgaacacacacacacacacacacacacacacacacgcacacacataccacatttcaataagtcttcattgttctgggtccttacctttcctgtcctcctgttatatgaacacacacacacacacacacacacacgcacaccacatttcaatgtctgcatggttctgggggtaacaaaggcaagaagttaaagtaagaccacatttgagtattacttactctgtagaatcaaaacagagtagttaacaccaattatgcaaactacttttttttccagcagaaagggagctgacatgatcaaatccatgttttcaaatgaactgaaaaaggcatccagcaccacttataacacatttatttcagttccaggctgacagccctggggcatctagcaggatgcataattgtcatctggtgagagttgggactttgctcaattttaataccaatctctcctgattgtaattacctccactactttcatgatccccctacaatatttttttaaatgatatatttattcactgaatcaaatgtcattaatgagttatcttctgtggaggatgactgttctctttgttaatgttcacaatcaagatcttgggctgagaagaggcccttcacccaaggagtttgaagtatcacagcgtgtgggaaggtgggaaccaggatacccattcatttccaaccgagacacagagaagtgagtcacagaatttgagcctgctctcttgactgcccagccagagacactgatttctgtaacctcttcacttgatcctgcctcttaagcattaaaacattctcctaaacctctgagtgttttgtgggttctgggtgttttgtacattttagccaagctaaccacttgtctgcaagtactgactttcctatgaattctttgaagattattgagtcagaaaggaaaaatatagccccaaattcccaggcttttaatgcattacattaactgcctattgaaatgagaagttcttcacaaacttgtatacccactaacaagattgcacataaacatgcattaaagtatatactaag

SEQ ID NO: 724680 - DNA, 394 bp, Homo sapiens
atggcagaaagactgaaaaataacagtaattaattgtgtaattcagaatacataccaaccagtgtagaaactcaaacatagcaaagtgggtggcatattccggggttaacactttttttagcgttggtacatctgagaaatgagtgctcaggtggatattatcctcgcaagcatgtagttataagaattgtgggtgtgcctatcataacaattgttttctgtatcttgaaaaagtattctccacattttaaatgttttatattagagaattctttaatgcacactcgtcaaatatatatatatagtaccaatgttacctttttatttttgggtatagatgtaaggagcatgctcatatgttaggtacttacataaattggtacatattacgggt

SEQ ID NO: 724681 - DNA, 250 bp, Homo sapiens
agaatgataccctagacactagtaaagacatattcttgcatatactgtctactccagagtataaaagatatgtacaactctatcactatgtaaggcgcagtctatttattggatgagcataagagaaagatatacctgtagcaaccggaaagttttacggtctttcaagttgtataaaatggacctgcagaaatgtttaagtgttctcaggatacagagttgaagctagaaatgtgacaatcaaaccagt

SEQ ID NO: 724682 - DNA, 533 bp, Homo sapiens
  misc_feature (303)..(303): n is a, c, g, or t
  misc_feature (313)..(313): n is a, c, g, or t
  misc_feature (329)..(329): n is a, c, g, or t
  misc_feature (334)..(334): n is a, c, g, or t
  misc_feature (449)..(449): n is a, c, g, or t
ctggggcactttgatcacctcggtgagcggacactgggacactatgatgaggccaggtgagtgcacactgcggtactatgatgagtccaggtgagcgcacactgggacactatgatgaggctaggtgagcgcacactgggacagtatgttgaggccaggtgagcgcacactggggcactatgatgaggctaggtgattgcacactgggacactatgatgaggctaggtgagtgcacactgcgacactatgatgaggctggatgagcgcaccctgggacactatgatgaggctaggtgagtgcncactgggacnctatgatgaggctagntgagngcacactgggacactatgatgaggctaggtgagcgcacactgggacactatgatgaggctaggtgagcgcacactgggacactatgatgaggccaggtgagtgcacactggtcantataatgaggccaggtgagtgtacactggggcactatgatgaagctgggtgagcacacactgggacactatcatgaggctaggt

SEQ ID NO: 724683 - DNA, 126 bp, Homo sapiens
gcatgcccataactcacatactggcctcaataggaccacagtcacgacgatcacagtctatgcagtagccacccaaacccttcagtcagcagcatacaactccaaccccgtggagagatgaggatg

SEQ ID NO: 724684 - DNA, 230 bp, Homo sapiens
cgaatgtatcctgttgggttggttcacctctatagaacatactgttgtaatgtatcctgtcgggatggttcacctcgggagaacatactgaagtactgtatcctgcagcagagtgcacctctacagaacatactcgagtactgcatccagttagtatgtctcgcctgtatagctcattcggctgcactcgagcaatggatcatgcggttctgcaacacccctatagacca

SEQ ID NO: 724685 - DNA, 777 bp, Homo sapiens
gccaagagtgatgcatgttctgaatgctgataccattgtagtgaaactgaactcgaagctcattgacaatgaccgattcacctgtccagtcgatccgaccaccgaggactgtgcaatgtgggacgaacacccaggtataacgaacaaaaaagctgcttaccctgtatgacattcgttacatgttggaggcccgggaattttctatcataataaagagcttatgggggaacgaaggtcgaactgtgaacggctgcgactaccatatagacctacgcccaggccctagccacacgagaccaagtgccttgttctttatcagagctgtagcttggtgtcacatgtcatcaattgcgaggactaaacgattgcatgaggctcctctgtctggcgaaaggctcttagcacatccggtgaatccatatactcgggctaggattgatgaccagagatcatcatactacggatgaacttgctttgtgtggctcgagtgccaatagctgcttatcgaatggacaatcggagttgccctagcaggatacggcagtggcatatccaccgctcgatagcggggatatatctgggcgagtaccctatagcaaggcccaagcagatcctggctcttctatcaggggcccaggtcggccactgaaagctagtgggttggaatcatcgtctgcaggtggttctcgactggcctctattttgccggaatcgacaggttgccgttatcaaacctacttgcgttgggggcatttgattggcccaaagagccggaga

SEQ ID NO: 724686 - DNA, 164 bp, Homo sapiens
tgcacgagggcaatgtgtgtggagggaaacatgggaagcctttgaacctgtatctatacatttgctaacttgggaccaggatgtgagttcaaatcatttcactgacatataacgcatatcttttgtgtaatgaattaggcccaaagagctttcggttctcttcg

SEQ ID NO: 724687 - DNA, 364 bp, Homo sapiens
ccgcactctcggaattaagatggtctgtggttcgtgctccacaggcacacattcacctcggtcagccatggtaaatatggagtcctcaggaatgcccacactgtgggcaaccactctgaagtcccacagaagagtttccctcagttgcggcgcccgcctgtagagcttgccagtaatggtgggtccataatggcggctgaatttcttggtcaggaaaatggcatactcatcatagttggtgtggcccacataggactccatgctcataagctacagagtgtctcctcacagacacctttccgacaaagagtgctggtcacgctgatctccgcctgtgtagcgccctctcacagcaacagcgtgc

SEQ ID NO: 724688 - DNA, 276 bp, Homo sapiens
ctggacttcccctggttcccggcccgcgtggtgtgccacgacattcttggccagaccgcactggtggacctggccggcctgcgtgacgccatcgccgaccagggcggtgacccggcgctggtcaacccggtagtgccgacccagttgatcgtcgaccactccctggccgtggagtgcggcggtttcgacccggacgccttcgacaagaaccgcgccatcgaagatcggcgcaacgaagaccgcttccacttcatcaactggaccaagaaggccttc

SEQ ID NO: 724689 - DNA, 315 bp, Homo sapiens
ctagctaggttctgatctaacttaagttggatgtcccacatagtatttgcgctacgaagcttctaagcccttgggcaattatagtagggtttaacctatttgccttcccaagtctaaatgttaaacaaacttgaaagtccaaagtcttgtttgaaaatgcacccatgaaagctttgaagtgaaagctctttcctggggaacaatgtgggccttcaatgtaaagaacgtgtcggtcaaagatgttagacgaggcaatgttgctggtgacacaaaaacgacccaccaatggaaagcagctggcttcactttctcagg

SEQ ID NO: 724690 - DNA, 689 bp, Homo sapiens
ctcttgaggagtgagactgcaggagatgtgggccgtgccaaagagatggatgagactgttgctgagttcatcaagaggaccatcttgaaaatccccatgaatgaactgacaacaatcctgaaggcctgggattttttgtctgaaaatcaactgcagactgtaaatttccgacagagaaaggaatctgtagttcagcacttgatccatctgtgtgaggaaaagcgtgcaagtatcagtgatgctgccctgttagacatcatttatatgcaatttcatcagcaccagaaagttgggatgtttttcagatgagtaaaggaccaggtgaagatgttgaacattctatgatctgaaacatcttaacacataaatacacccacaatatctatacgaaccgacataaacaaatgtgacagtcagcttcagagaaactgaggagaatgcagtctggattcgaattgcctggggaacacagtacacaaagccaaaccagtacaaacctacctacgtggtgtactactcccagactccgtacgccttcacgtcctcctccatgctgaggcgcaatacaccgcttctgggtcaggagttagaagctactggggaaaatctacctccgacaagaggagatcattttagatattaccgaaatgaagaaagctgcaattagtgacatgaatggaaataaattc

SEQ ID NO: 724691 - DNA, 385 bp, Homo sapiens
tgtgatctagaggatcccgaggctgggcgagtggctgtgttgctgttgcaggcagtgcattgctagcgacagcccccaggtaaataaaggctggtacggaggagagctctgactggtcaactggtatctgcatggcggaaaagtgaggatgaacctggcagttggggagagcacacaggctcctatgagggagctgcctccaggaggactgtggggatgaggggacaggcagtgtgtaactgacagatgtcacgactccaagaagtccacaacaattcagtgacgaccggtactcacagttaaacgaaacctacgtcataataaccatgaggtgctgtgtcacaacaggatgaaacgatgtgctttctgtcctgttttgtctcct

SEQ ID NO: 724692 - DNA, 102 bp, Homo sapiens
caaactataatatatccctatcttgggggtgtctcagctctgcaagaaaggaaatagatttactgttagaggaactgataaccaactttaccagattgcgaa

SEQ ID NO: 724693 - DNA, 1538 bp, Homo sapiens
tcgccgccataatggcgtcgcatgacatgtctcccgggaagggcctgtgccagtcggacttaaccctatacgagctcagcgtccccacttggttgacgcttgacatctgacgagcagtgaagtgacgacagatctcacagagactggtcctaaggaaagggcctgtatgtcctatcacagcatcgtggagtaaatccctgtagcagattacaacagtaggtgcttagcgacagcagtacgctcaagctgacatggacaactcacccagtctcctaacgcaacgtatcgtaaccgctcctatgagcggcacctctgtgctcgcatggatgcgtctaccctgaaggcactcatcatacgcattcactacactctaacgcatcagccacgctatgcatgatgtcggcagcacgcccactcctgtgcagacgcgagagcacgcagaacgggaatacacgagcacgtgcctacacagcttgcacggcctcgggaaagtacctaaactcaccacggacgtcgcccgcgcacgttccacgccgtcacccgggagccgccggactactccactacacgcatcccacagctcgcaaggcaagcgctccgcgtccccaaagtccgggcaaccactacttgcaaagtatcgactccattaaccaaggcacgcatctatggcgccccccgtgacgctgcagccacgttaacaccctttctggctccatgcttgggttaccttcgacaactcggatacttacctacactcgcaatcctggcctccaactacacctgaccatctttgccacacgaacctgcactgcacccgaggcccgcctccccgccccccccaacgcgaaaccatgcccccccgacagcacgggccgaccccccgaaccacccacacctgccgagtcccacgcaacacccctgccccacgctacccagcccgcggcaggccccccataacaaaccgggcagcgccgcgcacccactaaccccacaacgcgccctttggcccacctaggccctgaaccaaccacccggccccccccgccacacaaaccggcccacccggggcgacccccccgccgcaccgcacccccctacctcgccgcccccgcaccacccccccaccgcgcaccccagccaacgcgccccccacaccaagccccccaccccgcccacacccaacgcccccccacgcccacaccccggcccccccccaccagcgcccctcccacaccaccgaccaacacccgccccccgccacacacaccgacacccaacatcgaccacccaaaactaacatagaaaccgacccgcgcgcgacgcacacacccaaactccacccggacctccctcactagacggccgccgcaccctgaaacaccctcgcgcccacacgacccgacatcccgcactacgacgccgtcccccgactccgaccgctccacccgccgcagcaccgtgcgactgcgtgtgaatcatcttagtgagtagagaggggcagaaggagaggaggagaaagaagtaggaagacgatgtgt

SEQ ID NO: 724694 - DNA, 229 bp, Homo sapiens
gtgcttctgcattcctatttagactggccagccgtggctttggcgtcttgtggcgttgtctgtgtgggtttttggttactacttacgtgctgtgaccgaagagcgtcatctgtccgggactgaccctgattacttgacatatatgcaatctgtgccttaccgttttattcctcgcatcttttgaagattattcatttggaactggctgaatgttttaatcgattcagag

SEQ ID NO: 724695 - DNA, 123 bp, Homo sapiens
atccctcgtctgcgtccggacccatctacgctgaggacggagaccgcggatcaaccagcccatcatctacagcatctttaggggaaacgtgaatggtacattcatcatccacccagactcggg

SEQ ID NO: 724696 - DNA, 270 bp, Homo sapiens
actacccaacaaacaaaccccctaaaccaaaaccaccctgtgaccaaaatacccccgagtccaggaattgctgtaaacaaacccatatgcaggatcaacccttctcagcggaagtcggatctgacggcagtttactgcagtatcagttctctaagcaggggcttgcgggagtgggcaccaagagggccaggctgccaatgcttgtctcgtgatatttacctggagctgcagacctgggggttgcccatcctcaagaaggctgaccttttt

SEQ ID NO: 724697 - DNA, 1512 bp, Homo sapiens
  misc_feature (245)..(245): n is a, c, g, or t
  misc_feature (1003)..(1003): n is a, c, g, or t
  misc_feature (1283)..(1283): n is a, c, g, or t
ccggcgattatcactctttttacccgccgggctccgttgtgtgcatcccctgggcctttttctggtgtgcgcactctatgggcggacagagtggtgtgtgccacccgaaacagaaggccgctgggttgtgatccctccgtccgcgatatttttccccggcgggactttttctgcgtcgacacccctcaagcggttgtctcctgcccccttctttccccccgcggcggggctcgcttttccccggncgttacacgcccgccccttctccgttcttccgcgaatttttttcacgaggccttcctggtgttcctacagacaccattggccgcgcccgtttcggtagttgtgttgtctcccgccttctcgatggtcgcccattccatgtgagtttatttttaccccgggggacccttcctattccaagccccccgggattggaagagaatggtttctttcccgaaaccatgtcgtaccacagaattccccgggggagaattcccccccggaaccggggtttgtgtcccccttgtggaggttggaagaggggaaaaagattggggtccaaacttaggggaccaacagaaaggagtaaaaacccattggatgaacctcgcctgtcaacttgcgttgggaaaaatggccctccccgctctgaaagggcccccccccgaagggggtcgcacaaagtgttatccccgcaaaaggcacacccgctaaaatacacactcgggtgttcagagataattgtgctccacatggagaacccacttgcacacgctcgccacaggggaaacaccccagtgtgtccacacacacaaaggaggaaggcgctcactcacacagagagagtgaacactctcacacagagagtttaaacactcgagagagtctcacagttgtcaaaaggggggagaaaactctgagaaagagacacacagaggagccccacgagaagagagagtgataaaacaccccgttttatatgaccaacgcgggggctcgncacgaggacacacacaattcacaagcacacacatcccctctgggctataatgtctgcacacaaaaaatctatccccacgctttttcttatattgtggtgtagaaacacacatgagaattccacgagatggcacatcgggttggcttctatattggagactacccgctgagggagatgcgtgttgagcccccacataataatgagattttcttttataaggagtgtgtttatgagaaatggagaaaaatggttaaccacaaatgtggcacaattatatttntggagatctattcaccccgtcaatcactaaactgggtttctggcttgtcaatccaccaccacacacccacggagacttatagaccacaaatgggagctgaatgttacttcttgaggctcttcactttatttttgagctgtgagatttatatttggagagtggaggccttgtttttaagaaaaacctgtcatgtaggttgtttataaaatataaaagcattttaactcca

SEQ ID NO: 724698 - DNA, 504 bp, Homo sapiens
  misc_feature (351)..(351): n is a, c, g, or t
  misc_feature (367)..(367): n is a, c, g, or t
  misc_feature (399)..(399): n is a, c, g, or t
  misc_feature (457)..(458): n is a, c, g, or t
  misc_feature (465)..(466): n is a, c, g, or t
  misc_feature (471)..(473): n is a, c, g, or t
  misc_feature (489)..(489): n is a, c, g, or t
agcagaatagcccttagcagaaagaaaagagctaagagaccctgtatctgtccctcacccttcagagctggtgcccaaacccaaagccatcatcacattggatggagcccctgcctcaggtttagtcacttgatcctatttgaggggaagcaaagatacctgtgactcatgaagagcatgagtcacatggtggagggacttgagaattaggaaatcaaaatgggcaagaacgatgtgtgccttcaaatggaacatgaatttgaagcaaatttcggttcaatttgctgtcacacataatgatcaggttcagtaataaagaattgtacttaaattttgattcattaaactttntggagagtcctaaacnatttatattactaacacatagagacttctttntggagaaaaatgaagtaccaggtgccaagtaacagatttacatgagaattttttaggnncaacacnntgccnnntgtagcacagtcatancccatttgaacccaa

SEQ ID NO: 724699 - DNA, 490 bp, Homo sapiens
  misc_feature (115)..(115): n is a, c, g, or t
  misc_feature (126)..(126): n is a, c, g, or t
  misc_feature (152)..(152): n is a, c, g, or t
  misc_feature (156)..(156): n is a, c, g, or t
  misc_feature (179)..(179): n is a, c, g, or t
  misc_feature (194)..(194): n is a, c, g, or t
  misc_feature (198)..(198): n is a, c, g, or t
  misc_feature (268)..(268): n is a, c, g, or t
  misc_feature (275)..(275): n is a, c, g, or t
  misc_feature (277)..(277): n is a, c, g, or t
  misc_feature (284)..(284): n is a, c, g, or t
  misc_feature (286)..(286): n is a, c, g, or t
  misc_feature (375)..(375): n is a, c, g, or t
  misc_feature (379)..(379): n is a, c, g, or t
  misc_feature (405)..(405): n is a, c, g, or t
  misc_feature (410)..(410): n is a, c, g, or t
  misc_feature (419)..(419): n is a, c, g, or t
  misc_feature (421)..(421): n is a, c, g, or t
  misc_feature (426)..(426): n is a, c, g, or t
  misc_feature (441)..(441): n is a, c, g, or t
  misc_feature (446)..(446): n is a, c, g, or t
  misc_feature (451)..(452): n is a, c, g, or t
  misc_feature (456)..(456): n is a, c, g, or t
  misc_feature (473)..(473): n is a, c, g, or t
  misc_feature (481)..(481): n is a, c, g, or t
  misc_feature (484)..(484): n is a, c, g, or t
atggatgcttcactttgtcaagcacctcagttacacattcgccttttctaggattgcatttcccaagtgctattgcaataacagttgatactcattttaggtaccaaaccttttngagttccaacncgatccaaaccaaaggaaaagtgttngctnagagaaaatttggggaaaaggtngaaaaagaaaaaatnggtnagtaattgagcagaaaaaaattcaatttcatatatgctactcgattggcaaccagatttcatctcaagtnagaactngnattcggntnaggaaaaaagaaaactgcaatgttaatcattttcctaagctgtccttttgaggcttagtcagtttattgggaaaatgtttaggattatncctngctattagtactcattttatgtatgnacctncagtaagtncncccantttagttttctaggnctganggttnntttntacattatacatgtgtnttgtcatnttnggcttt

SEQ ID NO: 724700 - DNA, 161 bp, Homo sapiens
tgaaaccacattttttgtaggtgataactcaatgaaaattggtgcttattttttacacttctctcttgtggctctcttgctggtgctatcttgttttaatgtgcctccttgaagtgcgcactggtggtccctgtgccatgcctctgttctccctgcctggt

SEQ ID NO: 724701 - DNA, 760 bp, Homo sapiens
gtctgtagtgcacgccgcgggcccagctgctgaccccggtcctgcccccgggatcccggccttggacgatctgttccctcctccgatcttcccggcagagccagcccaggcctctggcccctatgtggagatcattgagcagcccaagcagcggggctatgcgctttccgcttacaagatgcgaggggcgctccgcgggcagcattcccaggcgatgaggagcacagatatccaccaaagacccatacccaccatcaagatcaatggctacacaggaccagggacagtgcgcatctcccttggtcaccaaagggaccccttccttcaccgggccttaaccccacacaagcttgtagcgaaaggatcgtgcgcaggagatggcttctatgaggctgagctctgcccggaccgctgcatccacagtattccagaacctgggaatccagtgtgtgacagaagcgggacctggagacaggctatcagtcagacgcaatccagaccaacaacaaacgcccttccgaagttccctatagaagagcagcgtggggactacgacctgaatgctgtgcggtctgacttccaggtgacagtgcgggacccatcaggcaggccctccgacctgccgcgctgacctatacgacataccatctttgacaatcgtgcccccaacactgccgagctcaaagatctgccggagtgaagcgagaactcgtggcagagtgcctcgagtgggggatgagatcttccatactgtgtgaac

SEQ ID NO: 724702 - DNA, 974 bp, Homo sapiens
cgctgttatcctgggagtccccacccaaaggagccagtatcccctacgcatccgagcctctccctaggtactgttcttctctctgccaaccatggacttctctgatccaggctcagtatggggttgtgatcccagctgatgtcaccaagttccatcagctctcaatgaccatgcgaatccccatttgcccatcaccctagcgatgtgttgccgatggaacttggtatcccggcattcgatcagtaccagactcgactaggagttctttgggtttcccaacagatttgattggcatgtgtgatcgagcgctcaggtccacgcaagatcagcggagatccggcagatgttacgggcgcatatcaaaaatcgggaaaccaatcagagggcgctggggaacggcgatgtcacctatcactggctctccgggtctccatcgccctggcgccagtgacctcatcaactgacgtgtctagatggacgggcaagctctacgctctggtgaggacgcccgagcttcggctgcccgaagacttgcttggtcaccgttgtagttggctctggaggctgctgctgtgtgtgcgaaatgccctgtcggcctctgtatgagtgtccgtctacctgttcatccggcttgtgctgtgaccttctacgacttagcaacttgtgttactctgtcgacgactgctgggattggtgagtctacacctgccaagatgctcccttgttctgggacatccaacggtgattcgctgttgttttcaccctactgggaccctttggtgcaggaagcggctcgcgaacaccccgggggttttgtctggccaaacgctcgggattcgtcctcggtccacactcggtctgcgccaactggtgcctcttctcttctctcctctgcgtcttctccaccggccaccggctcatgggcccaggggcaccccccactgaatagggcaccaccctcggctggacgccca

SEQ ID NO: 724703 - DNA, 471 bp, Homo sapiens
cccagaggtcatcccagctccagacgtgacacatttgcttccaatgatgtctacggatgaggaaactgaggcctggagaggttaaagagacccgttcagagatcctacagtggccgactggtcttctgaggagctctgccctctacaacagggctctttcaggtgcacgggaggaacatggaagctgcgttctatgctggttccaaccccaatggcatctgtgttgcttcgaggatgtaggcttatggatttcacacaatggaggagttgggaacagctggacctggcccagaggacactgtacctgagaggtgaaccctggagacctgggagcatcattgtctccctggctggagcaatcaagagggacctgttgcagggcatagcaggaggccccccggagactggaagctaccttgagggcgactaggttgaatctggagagaggtcgagctagggaaaactttcccc

SEQ ID NO: 724704 - DNA, 136 bp, Homo sapiens
  misc_feature (5)..(5): n is a, c, g, or t
  misc_feature (41)..(41): n is a, c, g, or t
cagtnatctagaggatccctcaagtgatcctcccaccttgngctcccatagtactgggattgcaggcatgagccaccatgcatggctagacgggtacaacttttatctttaagagaaagatttaagtaaaaaatgt

SEQ ID NO: 724705 - DNA, 139 bp, Homo sapiens
atcatgtctcatattatgtccccctgtgttatcacattaaatcatgactccctcgccacctcgctcgcagcactcgtgttcacccacccacacatatatacagattagatacaagacacatatcaccacacagaaccac

SEQ ID NO: 724706 - DNA, 733 bp, Homo sapiens
  misc_feature (39)..(40): n is a, c, g, or t
caccagggacggtgactgtgttaagcaggtcaccgaggnngagcccagctccaaccacacggtcatgatccaggagacggtccagcaagcgtccgtggagcttgccgagcagcaccacctggtggtgtcctccgacgacgtggagggcattgagacggtgactgtctacacgcagggcggggaggcctcggagttcatcgtctacgtgcaggaggccatgcagcctgtggaggagcaggctgtggagcagccggcccaggaactctagaggacatgtggcatcggatggccacagggcggggctgccaggctctgcaggcacccagggtggggaggccacccttcctgccctacccgcagaatggtgctctcctttgccctccctgcccagcagcctgataggactctcctagtccaacttggggtgggcaaggcagtcagcatcaccagcaacaccacaggaccctcaccccagcatagacacacaccccctgacccttaccatctgcttcctgaaagacttcagtgtcagctcccctacacacaccccacaccttcaccccttgcttcaagattcaaacagagactcccagtccccctcagcatcttccctgaatcacagccccagctccttgacccccacttatccctctccataaccccaccttgcccaccccacccccatccccaccaggcgcatgatacggtctaagcctgcgctatcttctacttt

SEQ ID NO: 724707 - DNA, 260 bp, Homo sapiens
  misc_feature (1)..(1): n is a, c, g, or t
  misc_feature (32)..(32): n is a, c, g, or t
  misc_feature (36)..(36): n is a, c, g, or t
nttttgtgtgtgttaccgtggccgaacatttnaatngagggggagcagtgtaggtagagatcaaaaagtgtaacacatacttgagggctggtgaatagctggaccagcaggcgtaggaaggtggtgaaccaagactgaaaggtaggtggggccgaattacacagagacgctgagttgttgggacttaactggcgacgcgtaacacccacatgtacgcgggtaccgcagcctcgaacttcgctaactcatggctcactagc

SEQ ID NO: 724708 - DNA, 148 bp, Homo sapiens
acctcaccatgttcattttacatttttaacatttttcttcatatttcctttgaaaagtagactgtgagttatttctcactaaagaagattaaagaagactaagatttttattataaggataaaaatcttagtcttctttgatcttctg

SEQ ID NO: 724709 - DNA, 958 bp, Homo sapiens
  misc_feature (39)..(40): n is a, c, g, or t
caccagggacggtgactgtgttaagcaggtcaccgaggnngagcccagctccaaccacacggtcatgatccaggagacggtccagcaagcgtccgtggagcttgccgagcagcaccacctggtggtgtcctccgacgacgtggagggcattgagacggtgactgtctacacgcagggcggggaggcctcggagttcatcgtctacgtgcaggaggccatgcagcctgtggaggagcaggctgtggagcagccggcccaggaactctagaggacatgtggcatcggatggccacagggcggggctgccaggctctgcaggcacccagggtggggaggccacccttcctgccctacccgcagaatggtgctctcctttgccctccctgcccagcagcctgataggactctcctagtccaacttggggtgggcaaggcagtcagcatcaccagcaacaccacaggaccctcaccccagcatagacacacaccccctgacccttaccatctgcttcctgaaagacttcagtgtcagctcccctacacacaccccacaccttcaccccttgcttcaagattcaaacagagactcccagtccccctcagcatcttccctgaatcacagccccagctccttgacccccatctaggtgccaaatgttcatctgcaaccgctatgcagtctggtgagagggagacagccatcacatagaaagtgaccgtacgggtttttaatcactgctgggtggggtgggggtagggggattgtcctggctttgtcgacaaagtcccacttccccgagtattaagggcccttggtatcaagtgaggtaaattcacccatcacagggtctcgccctaccatcctggaattatttcacttttaagataaatgcactatttcactgttcgcctcccattctaaggaggtgaggtggttggaataaaaacagttcctgtc

SEQ ID NO: 724710 - DNA, 1192 bp, Homo sapiens
  misc_feature (39)..(40): n is a, c, g, or t
caccagggacggtgactgtgttaagcaggtcaccgaggnngagcccagctccaaccacacggtcatgatccaggagacggtccagcaagcgtccgtggagcttgccgagcagcaccacctggtggtgtcctccgacgacgtggagggcattgagacggtgactgtctacacgcagggcggggaggcctcggagttcatcgtctacgtgcaggaggccatgcagcctgtggaggagcaggctgtggagcagccggcccaggaactctagaggacatgtggcatcggatggccacagggcggggctgccaggctctgcaggcacccagggtggggaggccacccttcctgccctacccgcagaatggtgctctcctttgccctccctgcccagcagcctgataggactctcctagtccaacttggggtgggcaaggcagtcagcatcaccagcaacaccacaggaccctcaccccagcatagacacacaccccctgacccttaccatctgcttcctgaaagacttcagtgtcagctcccctacacacaccccacaccttcaccccttgcttcaagattcaaacagagactcccagtccccctcagcatcttccctgaatcacagccccagctccttgacccccatctaggtgccaaatgttcatctgcaaccgctatgcagtctggtgagagggagacagccatcacatagaaagtgaccgtacgggtttttaatcactgctgggtggggtgggggtagggggattgtcctggctttgtcgacaaagtcccacttccccgagtattaagggcccttggtatcaagtgaggtaaattcacccatcacagggtctcgccctaccatcctggaattatttcacttttaagataaatgcactatttcactgttcgcctcccattctaaggaggtgaggtggttggaataaaaacagttcctgtcaaaagaaaaatcctatgagaaaatgaccacaagccaattatacactcaaaactgctgatcctgggctctgggagaagctgtttggagaccacatatttcatattaactttaacatgatgggattatcttactgtctggggtcatccaaacttgattttttcaagaaaaaccctgctggtgaggggaacaacaaaatacttatccattcaacagtagagcaaaggaactgaccaa

SEQ ID NO: 724711 - DNA, 152 bp, Homo sapiens
  misc_feature (4)..(4): n is a, c, g, or t
  misc_feature (136)..(136): n is a, c, g, or t
cgcntttaagctctctttcgagggtgtgtgaggggtacatacttttcctcgatggtcgagctatcctctgttccatctctcgtaatcacccataaacaaccacctctttcttcaaagttgtatttatgttatcttngtacggcggaacattt

SEQ ID NO: 724712 - DNA, 700 bp, Homo sapiens
gggccccccagccccccccccttttccccgggttaataaatacctctaaagtggaggcaaattgtccgtcctgccctataaaaagacttttttcttccccgggtttttggcccccaagcgttttttggatttggtccattttgcgggggcaacccacaggaaaaattctttgtggtaaatagattcaaaaaacctcaaaaattgggccgtgcctttccccttttcccccggttaaaaatatattttccccgccctttttggggcccccccccttttgggggttttttttttaaaaaaaagaaaaatttttttaaaaaaacgccaaaaccgggtgggtttttttttttaaaaatcccccccctgggggtgggggccaaaaagggttttttttcttttggccccttccccccaagggcggaaaagggtggtaaaaattttttcccccccccaaaggaaacccccttttttttgtggcttttttaggggggaaaaaaaaaaaaagaaaccccttttttttcccggggccccctccaaaccctccccccccccaatttggggtttggggtccccgggtgggggttttcccagtttttggtaacccaaccgggccccccccccttaaaagaaggggtttttttttcccccttggggggccccccccccccctttttttttccttttttggggggggtttttttta

SEQ ID NO: 724713 - DNA, 215 bp, Homo sapiens
gagtcggtccctctactcccagaaaaggggaagggggtggaggaggttgggcactccaaaggagaacaaggatagcaggaagggcccaaggttacctcctgaggttcttctgggactgtatcaacaatgtgtcaaagtcaagagaatcaaatatgctctttacaggtgctgggtcaaagtcttcccggttggagtcaagatcagaatagctcctc

SEQ ID NO: 724714 - DNA, 225 bp, Homo sapiens
cttggatctcagtggcccacggtgtagccgatgcccagctggatgcacccttcagggtggaggaggtggtctcgatggcccaacttcttcccatggccaggcccggctgtgccgtcatggacagaacctctgttggggccgccttcttcttccccagcgaaggcagcaacctcacccccgcccaccacttccaggacttccgcttcaagacctgagcaagccagg

SEQ ID NO: 724715 - DNA, 840 bp, Homo sapiens
gatgtgcagcatttcacttatttagattcacttaacaaacaaatttttctgctttaaaaatgtcttatgtcccaagtgtactatagcggcatatagagctagctaatctctacaaaccctctgtaggccagtagttctcaaagtgtggtctctggaagagcagtatcagcatcatctgggaacttgtcacagatgcagattctagggaccactccagacctacagaatcagaaactcttgggggagggcccgaaatatctatgttttaccaagcccaccacatgattctgatgtactctaaatactgagaaaacctgttctagacaaatacccaagcaacaactccgcaggcagttacccagtacggctggctacaactgctccatccgtgcctctttttaaagttcaaactcacaggtgactctaaggttatctacttttactcataagtaaaagccctagactggtgctaatgtcaaaccactggcctccactcaggcctccatcttctcatgccctcttaccagtatttaacttctgaggaagacaagtgatgctaaaaacctgaaattccaatgaagccatatgaacagtgttcagttgcacttctaagactttacttagcagtaaaattatagctcatgtgcatattttccagataattagcttatgagtagttatacaatttatgaagatttatattacagatcaaatggtaagtgttctttaaaatggggttcaattggaattcacagggctaaataaagattctcaaagtcttcgcaggatacttattagtaattttctgaaggttaatgttcattgatgatgtacttaagc

SEQ ID NO: 724716 - DNA, 242 bp, Homo sapiens
agctgattttagagtatcccgcaccatgcaccacaggaggagccgcgtcaggacactctaggaccctaaatcctgacgcaacaggccctgacaggccatgtcacaggtcacgacatcctggttgttactgctacccttccacagcacctcctggttggtatgcttgatggactgaactggtttcttgcaaatacttctgtatcttcttgcgcaatctgctcccaccgctgcttactctcaat

SEQ ID NO: 724717 - DNA, 369 bp, Homo sapiens
gtaaacaaattttacaatttccttggtatttccaagtcacatggtaaaactatgggataaacagttcaatagaaaatccctcaggccgggcacagtggccaatgcctgtaatctcagcactttgggaggccgaggtgggcgggatcacctgaggtcaggagttcaagaccagcctggctaacatggcagaaccctggtctctactaaaaatacaaaaattagccgggcatggtggtgcatgcctgtggtcctagctacttgggaggctgaggcaggagaactgcttgaacctgggaggtgaaggttgcagtgagctgagattgcaccactgcactccagcctgggcaacagaataagactccatctcaa

SEQ ID NO: 724718 - DNA, 150 bp, Homo sapiens
ccgatcctagtcaccgcgtatgcggcgaacaccataatattcaccggcagcccagaagttgcctgacctggatagtcctgcggcaggtgaggaacgggcgaagttcgcaacaagttgaggatcaaggtgccgtagatggccagcaacagt

SEQ ID NO: 724719 - DNA, 240 bp, Homo sapiens
cttttcccaggtttttattttttcccccgggcccagaaaaagcagaaccccaatgggagccccccgggtaaaagtttggggggggggggccccccctgttaacccccccccctccacccggggggctaaaaagggggggggggccaaaaacccgccccccaaagggtttttttcccccggttttttggctttgggggcccttcccccccctggggaaaactttaggggattttgtgttta

SEQ ID NO: 724720 - DNA, 296 bp, Homo sapiens
cgtcgacgggaaaactgaggtccaagggagaaatgtgacttgccttgctgttctttggacagataggagaggccgagtggggttggcattttgtgtgcctacttccaggccactctgtgctctgtgtgttgatatcatgtctgccagtttattctagcttagaaaatttctaatgcttcaagttcataaccattttttagctgagaaggtatactcagatgctcaaagggccagcctttagagcttactggtgtgtttgaaaacagctgtccttttgtgatattacaggtaaacgc

SEQ ID NO: 724721 - DNA, 380 bp, Homo sapiens
  misc_feature (29)..(29): n is a, c, g, or t
  misc_feature (34)..(34): n is a, c, g, or t
  misc_feature (273)..(273): n is a, c, g, or t
  misc_feature (289)..(289): n is a, c, g, or t
  misc_feature (311)..(311): n is a, c, g, or t
  misc_feature (316)..(316): n is a, c, g, or t
  misc_feature (333)..(333): n is a, c, g, or t
  misc_feature (339)..(339): n is a, c, g, or t
ccaccatccaattgctggccccatttaancttangctttttaaaaagatttataccattaaaatgcccatccttcttccttaaaagttttgtgcctaggatgccagccatttccatttatcgctcttacagaagaggaccgtctgggcaggtgatcatacttaaatagacggcagctaaaggagaatgaactttgactcatttaaattaactccaatatttattgttacaagcttgacaatgctcttggaaacgattaggtatgacctctagnataaatgagtttaatnaaagagactaaaaaggagtacnatatnctagttaagggagtcanttttcntcagaaagcagaagggcttgggacgactacttgacacgtag

SEQ ID NO: 724722 - DNA, 101 bp, Homo sapiens
tgaagtgaactaatacattttcatttaccacatctgggtgtcgttgaaaaaatactttatggcacagaagcggttttgtctctccttatgtctccacttcc

SEQ ID NO: 724723 - DNA, 142 bp, Homo sapiens
actctagacgatgctttcctttaacaactgtacaatcaccgatgctctgggcacaaagggacccagcctcagcatgcgtctccttgggcagctacggaggaataccacagcctactcaccaccactatcacccatgtggacg

SEQ ID NO: 724724 - DNA, 475 bp, Homo sapiens
tacttttccacaggcgactcgcaggtacattgtcgcagttagtcctctatcacagtcacatggggtgggagattatcctcacttaacagagttgcgaaagtgaggtatacactagaatcattatctcgcctaggtcaatcacgttggtggattatttattgctgtaaatagtcaccaggaaaacatccttggatcttaagttcatccttttactcatcaactggctcagtgtcccttgatgaaaggatacatgctataaattagtagaagagttcgtctcctggggccaacatgcttgcttcccataattggatgattaaaattataaatcctgatgtgtttctctttttaccaatggctgtcaggaaactcaagagtaaaacttaattgcatgattatgggaattacaccagttagatttacagaataatttctctagcttttttacttcttatttttattttaccgaagccct

SEQ ID NO: 724725 - DNA, 114 bp, Homo sapiens
gtcttgtcgggaagtacggtggaaactaagtctcattactgattcgtttatgggtagtactgggatgaacccaccaccacagaagcaaattagacaacttaatgtgaaatcata

SEQ ID NO: 724726 - DNA, 314 bp, Homo sapiens
  misc_feature (97)..(97): n is a, c, g, or t
  misc_feature (297)..(297): n is a, c, g, or t
cttccagagcattccactgggaaggcacgtgaggggcctgtgccgccctccaccttgagtcccagcactgacatccttcctgcaggctctgcattgntgcgggagcctgggagctaggaagccactctcagatgcaaacaaggaaattatgtctgtggaaaaaaaaagtttcattgtgggcaattgcctgagtctccccgggactggcttcgtcaccatggcaacccatgtttgtattgatggatttggaaagtgttattctgtttgacttctccctgctctgctcaggcacatgcntttgagcccctgcggtg

SEQ ID NO: 724727 - DNA, 419 bp, Homo sapiens
agctgtcgatctggtagagggtctcgtggaaaaggatcacaccggtgatgctctggttgatgaaagtgtcccagaagaagaggatttctcggaactgccggcggttctctgcagtgtttgccgccttgatcctcggcagccggttcgccatggtaccgacagattcatgtgcagccaggatcgcctttccattggcaacaatgctctgggcaatttgtgagagctccttgttgtgctcctgggtgagggctgaatatcggtgggccatggtgacaggtagtttgggagacaagagtcctcctatttatcaagagctgtgggtgaggcagcagctctctctctctctctctctctctctctctctctcactctctctctatctctctctctctctctctctctctctctctctctctctc

SEQ ID NO: 724728 - DNA, 542 bp, Homo sapiens
gcagcgcaccacatcaatggcactgaaaaggtgagcttcagaaacaagtcgaaattaagaaactcctttaaattcttggttggagtagcggatcttttcctggttcccgggaagaacacggcttttgacggttgtgaaagacactcaggctttgttctgacacatcccaggactattttctattgggttgtattccttgtgttttttgtacaccaggagggagatcacagtgacaaatatggccaagcagccaacggagatcagggcactgtttgccatccttaaaggcgaggctgggtctctgtcaggaacaggaatcagggtgctcgtgaaagccaggcttgtgtcatcccccagggtgaggttcacacagtacgtcccagacccattgaaggttcgtctcacagtcagcagacacatctcatccacatccacagggctgcagactgtgttctgggtgatctcgcaggtggggtcagaaatgatggtacagacctccgtgtgaatgctcccttggcaggtcacgacaaagtctattaggg

SEQ ID NO: 724729 - DNA, 1159 bp, Homo sapiens
ccaaagtggtggtgcgtgatgtcgaagggccgagtgaagcggcatctgccctgaccggtgagtggcgtgtacctggctcctcctgtcagtgcaaataaagagcccaccgaaaccgaggactatctgagcggagactgtggaatcgagagagtcattcagttgacgtcataggtgtcggatactggtctggggaggtggcgcgcatgacaagagcatgccgggatcttgaaagcagtgaatgaaatcggcgcaaaggactaacattacctacgctcctaagcatgccctacggtaccaacccaaggcttccagttgtcgcgagggcacactacgaatgcctcgatgtcgtggcatgcatgagtgcacttccagcggttgtacatgcgtgtattgtaggaaaatgcttgcaccagatacatttgtggctatgcgtgtgagcaaagagttcgcgatccttggcatacaggtggataagcagcaatgtatcgttccactttgaatgtcgtcagttcttgtgcggattgtgggtgcccttgagtggcggctttacgagctcggagtagcccgagatgagatgggccgactgtccttcgcgtcatggtatgtggggcgatggagtgcaactactggcgtgtgtcgggcagacagacgatgttgcactgagtgtttggcttgttacatagacctcgcttcggaactatgggtgccctgtctgggtatcctgcccctggtcttgggtgatagatgcgtcgtgtagtgcattgtgcgtacctggcggaaatggggtgggtggttaaggcgtgacgagaggaacgggcagcctctagtcaggcatttgagcaccgatagtatagaatgctatctcttgagtggagcattctgaggtcagtaaacttcacgtattcaccattttgttcctcagtctccttttatgctttggaactttaagggcgtaaggccctcgattacaggtggactcgattggaaaacgatgaatgccttgtgtgagtgaggggaccactatggttattaaataaccgtggggaaccaaaattcttgggcactacataaattttgtgtgcacacactgggggatttctccaccaacaaggggcaaccgtgggaaacagcggcgggctgtaacaaaaaaagaaccaca

SEQ ID NO: 724730 - DNA, 201 bp, Homo sapiens
tagaggagctcggtgagaagctggcagggggaaggggggaaggaggtcgagctgggcttgcgtgggggcaggtggggaaggggatgaggcttggtcaggggtaggggaccaggcagggtctgctccaggatccttccttcttccttctcccgcagccggtgagggttgggaaacaaggattggggtctgcccaccaccctg

SEQ ID NO: 724731 - DNA, 791 bp, Homo sapiens
ctagaccattcgttaggtgcgcgggacccaatacggtaagtgaacagttgcgttccatagcatagtttgcactaaggagatcctcggtacataggactaagttgcttggtattctcacctatattacaataaaggactgtcctcgtggctggctagatgcgaggcgttgctgaagcgaaatacgccatgtagtttggagtctacttgggaagtgttgcattactcggaatcatattaatactatgagatgttggctaaaacgcaagattggcggtcgaggacttatgtcgagatatattaatctgagcctctctcgaggcggctttggaaaaattggggattgggtttttggttaattcttaagatttaagtttaaaaaccaaatttttaaaagtttttttttaatttaacttttaaattttttttaattgggttaaaagtttttagcacaggcttaatgtattgttggattgagattgtattaaaacgttctaaagattatcttagaaagaacgtttttgttgtagttaaacttaacatttttccccattgggcattgggaccagttgggtagttaatatttaaagccagttatttgataattatagataggagtaaagttattagatctcggtataacaagaaaaagttataagaacgcacggatttgagcgtttaaattttcgcatttgttcccgctttattgcatgataagttaaaagggaccgtttttgtgggggaccagagttttagaacaggaggtttaaaatgtggggttataggtaaacttg

SEQ ID NO: 724732 - DNA, 226 bp, Homo sapiens
tgctgagaatatgaggagggggaagctgaaggcgtggagcccaggtagtggagggcacgctgccaatgtgcgggagcaaagtgccaccagctccgggaccacttgccagtggatgctgagtatgctggtgaagagtgccgcagtcccagtgagatgtgtatgctgctgaccacatagcccaggtgcactgcagccagaatgcaggcccatggaggagcacttagct

SEQ ID NO: 724733 - DNA, 267 bp, Homo sapiens
tggagccggccctgttcatcatagcgcttccgccaatttcagcatgacgttgccgacgaacccgtcacacaccaccacatcgcagactccgtgcatgatgtcgcgggcttccacatttccgacaaacgcaaacatttgtcgcgagaacagggaataggcttccttcgtcagcgcattgcccttgccaggctcggtgccgacattgagcagcccgatgcgcggtttgtcgacagcgagcacatatttggcgtacagattgcccatcac

SEQ ID NO: 724734 - DNA, 363 bp, Homo sapiens
cgacgaggaaacatattcagctaatactctcttagatcgcactttgaagactagccttttggagacaatctgaccggttaacacaagaactgttggaattattctagctgtaactacctattggctatatgtagaatgatcctagaaagccacaataatttttcattttagatcttgattgaatttaagatgtatttatatgcctaccaaaggtctgtcttgtaactgttgtataaaataaacctaatctatggtttcatatctaatctaacacaagttgtgccttaacaatagggcctcgtatgttaataagggacaacaacccatttagtcgatgggggcacataggaaccttatgccatt

SEQ ID NO: 724735 - DNA, 328 bp, Homo sapiens
ttatgaagatggatcgtatccccagaaactatcagcagaacaagcttgctgtgtttcaatgttctatgatgggactgtgaagatccgaacaggcgtctccaaggccaaagagtctggaagtcattatcatgattcactgaagagaatacaggctagtctgattaatgtgcaacctcagaagcagaaggccagctgccagagagaagcgcattctggatcatttcaactaaggtcgtgtcctcgagggaatggattagggcatcttttaataggacgctggtaccatttatcttgggaagtccagttagacgttgcgttgactgaatga

SEQ ID NO: 724736 - DNA, 103 bp, Homo sapiens
acctggggcctctctgatcaaccgaacaccatcatcaccaccatcacatcacaaccatcaccatcgcctattttacaccaacccctgttcggttgagcggaga

SEQ ID NO: 724737 - DNA, 405 bp, Homo sapiens
ataacatccagtcaaaacaaaatgaatacacggatacataggagcaaacattaggcatgagccacagtatgatacagcacacgagtcaacatccgtcttttcaatcaagtagttcagcggcacatcaaaaaccacagctaaggcctttgaagtcaaccataataacttcttcagctgtccctatcagtttttgcggcacattgctctcacaagattccactgggtttcttcatcaaagggccaacattccagtcaaagcatccattctcatcagccacatggttctccaacccagcaggtcaccatccactccaagggaggtcagctggccaatcatctcggcagcaccattctcataggtatgtccgcgggcatccctctcagcagtctgcacctgccaggcta

SEQ ID NO: 724738 - DNA, 196 bp, Homo sapiens
ccatcctggccaacacagtcaaaccccatctctaaaaaaaaaaaaaaaaaaaattagctgggccgggtgcgggcgcctgtagtccaagatactcgagaggctgaggcaggagaatggcgtgagccccggaggtggtctttccgtggaccaactccgctccgtcacgcctgggccaacagcgcaagactccgtctca

SEQ ID NO: 724739 - DNA, 114 bp, Homo sapiens
  misc_feature (6)..(6): n is a, c, g, or t
gagtangcttgcacttgccacgtacgtcctggaagatcgatgatatctgctcacaccactaatgccgcccgacgttttttcaatgaaggaaaataacgatctgaatctaaatta

SEQ ID NO: 724740 - DNA, 513 bp, Homo sapiens
agcctgtccgcatcacataaattatcgaccattaatgaggtgtaaaatcaatgatgcatgtattgtgactagaaattattttaacaatgtcagaaataatacaatcatggcgcaacttgaaatttcctaattagctatctgagctatttaagtctgtacttacagtgtcttcatttttataaatgagagaactggactagattttatataagtacctactaaagcctagtgtttagcagttacttccttccctgtcaaaattttgcctcctttgattttcaatatatatatatttttttgtcttactctgttgcccaggctagagtgcagtgacgtgaccttggctcactgcaagctctgcctcctgggctcaagcaatcctcccacctcagcctcctcagtagctgggaccacaggcatatgctacaaagcccagattattttttatagaaacaggattcaccatgttgcccaggctggtcttgaattcctggggctcaagtaatctaccca

SEQ ID NO: 724741 - DNA, 716 bp, Homo sapiens
  misc_feature (458)..(458): n is a, c, g, or t
ttcatccggtgaccgcgctccattctcctgcctgtatccatgttgctatttgatttagctcgattctgcctagacacgaccatggataaccgtccttcaattggttgcaagtcgtgctaggcgtcgcagtgtatgaacttccagggggcctccgcacaattgcggcctcagcagctgagaagagaccctcgagaggagaataggcgaagtcgatagcatctttggaggcacatctatacagcacctctacttatttcccgttctgcgaggtgtgagcggagaaccagcgcatcgcgttctcgttgtcttgccaggtaatattgtatctgagatcatcgttctggcgactccatttttagctcatccatcttatctggacaggatcgctgatttcgctcgacacagtcttagcggcatctggcctcatttttcgttgctggatccaccatagcctcttngtggaatccgagccagcccaccccatgtggatatatcagggacaacccctcgtgcaccgcgctctggccggtgctccgagtgtagctctaccgatttgatcgtggttcgcaccaagagcgtccgagtccgagtgtcgtaacttgggccactcggcaccgtggttcgttggccctgccattagctcctggtcgtccaagcgccccaggatggccagtcctcgtgtcatagcccttgctttgttgtttctcaccatcatg

SEQ ID NO: 724742 - DNA, 378 bp, Homo sapiens
aaagtttggtcagatatatgcaaatgcagtgttagtgaagatcatctgaataatgatcactttcacatgccatattagttatattttagtatcactgctcattgtgcttcctctctttaataaagtataaatcaagcaattaaaagctgtgtaggccagtcgcggtggctcacgccggtaatcccaacactttgggaggccgaggcaggcagatcacctgaggtcacgagtttgagaccagcctgacgaacatagagaaatcccatctctactaaaaatacaaaattagccaggcatggtggtgggcgcctgtaatcccagctactcgggaggctgaggctggaggatcgcttgagtccaggagttctgggctgtagt

SEQ ID NO: 724743 - DNA, 299 bp, Homo sapiens
gaaacccagagagtgggagataatctttgcaaataaagtgaccgaaaatggattaatcgtccaaaatttataaacaccttccgctgctccataccaaaagaacaaccccttcaaaaaatgggcagaagatctaaacagacagttctccaaagaagacatgcagatgtgccgagaaacacatgaaaagatgttcagcgtcactcatggttagagaaatgcaaatcaaaaccactctgttttaccaccgttacaccagccaggatggccatcacataaaaggagttcccactcgtggcacg

SEQ ID NO: 724744 - DNA, 86 bp, Homo sapiens
tcgtacccgagctttctccttcaaaggccaataataaagacatttcctacctgtttaaaaaaagaaaaaaggaaaacaaaaagggg

SEQ ID NO: 724745 - DNA, 959 bp, Homo sapiens
  misc_feature (410)..(410): n is a, c, g, or t
  misc_feature (628)..(628): n is a, c, g, or t
  misc_feature (633)..(633): n is a, c, g, or t
  misc_feature (688)..(688): n is a, c, g, or t
  misc_feature (721)..(721): n is a, c, g, or t
  misc_feature (825)..(825): n is a, c, g, or t
  misc_feature (834)..(834): n is a, c, g, or t
  misc_feature (843)..(843): n is a, c, g, or t
  misc_feature (862)..(862): n is a, c, g, or t
  misc_feature (876)..(876): n is a, c, g, or t
gggtcactcaggcagcagccccttctttcttgccccagtctccagttctccagtgttcacaggtgagcctaccaacagccactgctcatgatggaggccatcaagaaaaagatgcagatgctgaagttagacaaggagaatgctctggatcgggcagagcaagctgaagctgagcagaagcaggcagaagaaagaagtaaacagctggaggatgagctggcagccatgcagaagaagctgaaaggggacagaggatgagctggacaagtattctgaagctttgaaggatgcccaggagaagctgggaactgggagagaagaaggctgctgatgctgaggctgaggtgggctccttgaaccgtaggatccagctggttgaagaaagagctggatcgtgctcaggagcgccntggccaactgccctgcaaaatgctggaagaaggctgaaaaaagctgctgatgagagtgagagaggtatgaaggttatgtgaaaaccgggccttaaaagatgaagaaacagatggaactccaggaaatccaactcaaagaagctaagcacattgcagaagaggcagataggaagtatgaagaggtggtcgtaagttgggtgatcattgaaggagactgnggaangcacagaggaacgagctgagctggagagtctaagtgtctgagctggaggaggagntgaagaatgtcacaaaacctcaagtctcttganggtcaggcggagaagtactctcatacagaagataagtttgaggaagaatcaggattcttactgataaacttcagaggcagagaccgtgctgagttgtgaagatnggtagccangtggaaganatgtgactggaaatgagtnatgccgaatgagtnaggcttgaggggtggaagcccagagacaaaataacggtgcgggaaggctattgggaaaggcttgggttttggggggccaaagg

SEQ ID NO: 724746 - DNA, 816 bp, Homo sapiens
  misc_feature (485)..(485): n is a, c, g, or t
  misc_feature (490)..(490): n is a, c, g, or t
  misc_feature (545)..(545): n is a, c, g, or t
  misc_feature (578)..(578): n is a, c, g, or t
  misc_feature (682)..(682): n is a, c, g, or t
  misc_feature (691)..(691): n is a, c, g, or t
  misc_feature (700)..(700): n is a, c, g, or t
  misc_feature (719)..(719): n is a, c, g, or t
  misc_feature (733)..(733): n is a, c, g, or t
gggtcactcaggcagcagccccttctttcttgccccagtctccagttctccagtgttcacaggtgagcctaccaacagccactgctcatgatggaggccatcaagaaaaagatgcagatgctgaagttagacaaggagaatgctctggatcgggcagagcaagctgaagctgagcagaagcaggcagaagaaagaagtaaacagctggaggatgagctggcagccatgcagaagaagctgaaaggggacagaggatgagctggacaagtattctgaagctttgaaggatgcccaggagaagctgaaaaagctgctgatgagagtgagagaggtatgaaggttatgtgaaaaccgggccttaaaagatgaagaaacagatggaactccaggaaatccaactcaaagaagctaagcacattgcagaagaggcagataggaagtatgaagaggtggtcgtaagttgggtgatcattgaaggagactgnggaangcacagaggaacgagctgagctggagagtctaagtgtctgagctggaggaggagntgaagaatgtcacaaaacctcaagtctcttganggtcaggcggagaagtactctcatacagaagataagtttgaggaagaatcaggattcttactgataaacttcagaggcagagaccgtgctgagttgtgaagatnggtagccangtggaaganatgtgactggaaatgagtnatgccgaatgagtnaggcttgaggggtggaagcccagagacaaaataacggtgcgggaaggctattgggaaaggcttgggttttggggggccaaagg

SEQ ID NO: 724747 - DNA, 374 bp, Homo sapiens
cgagaaccctttcgtccttccggagggagggccgaataggttgagggtttaacatttgatgagggggcggggcccttggcccattttttaaagggggaataccgaaacttttttataaaaaaccccctcccccttccatttttcctgggaacaacatagggggcattttcccttgaattttacaaaaaatatttggtccccaaacccctatttttacccccccggtttttaggatttggaacggcaacccccggattcggttaggcccaattcatacccttcttatgaaaaaatttcctccccttcccccgggcattatttatatgataggtttccaaccccattacattttccggctttccccctcaacccta

SEQ ID NO: 724748 - DNA, 198 bp, Homo sapiens
gtttttattctttatagacaaggcaggccgggcgcggcttgctcacacctgtaatccagcactttgggaggccacggtgggtggatcagttgaagccagtgagttcaataaccatctttgagttcagcccatttctcattctgaagtttccttttttcacacttctcagattatactgatggattttcactttgggct

SEQ ID NO: 724749 - DNA, 126 bp, Homo sapiens
tgtgcacacgccgaatgtcacaccactctgacttgcaacaacttcgtccatcacgacctgcaacaacttcgtccacccggatctggtccatactgagcagaccggtatggtcgttcggcgtgtgca

SEQ ID NO: 724750 - DNA, 561 bp, Homo sapiens
  misc_feature (545)..(545): n is a, c, g, or t
  misc_feature (547)..(547): n is a, c, g, or t
tcaataatgaaacagattcaatttccatcacccagtgagacaccatgggattagaataaatttttaaaaaaacaaattgaaaaaaatgcatttttaaaacaacaaaatcagaaaggatgaaaggtgatatttctagcatatcagtttgtggtggtaaattaattaccttatacaaaggcctcagtgactttctgctccttacctaacgaatcatctttaaaataagtaaaataaagaaacaagagcagcagcagatgcttcctaaaaagaagttaccaaatctgttcaccacaaacctgagaattcaactgtggacatttggacaccagcaatgaacatgaaactcagcttatgaggcatatttggctaaaggtcaaggtgacttaaaattcatcataggacatctacaatttgcaaagcaggtgactggatatggactccttccaagtctcatttaattggataatgcctacgttttaagtatcagaagtgagtctttctctattaaatgaagtcagttccactaaaacctaaatcttgtttgncnggcaaaaaaaaaaa

SEQ ID NO: 724751 - DNA, 126 bp, Homo sapiens
tgtttgcatcccaggtgtcagatccctgaggtcggacgtcgagacctgtctggcaacatgttgaaatcccatctcaggccgggcgcgtggctcacgcctgtaatcccagcacctgggaggccagca

SEQ ID NO: 724752 - DNA, 302 bp, Homo sapiens
  misc_feature (126)..(126): n is a, c, g, or t
tggcggacagaactctctccacagcacaggagtccccaccccacccagacatggagactatctttcaataaagggaagctccaggtctcagcttcagagctttctctgagatcaatgtgaacgcanggccttgccccaaactagtgtttcagggttgcaaacctctgtccaactccccttctccagcgtcctggggaagggtctttgattctttgaaatgagaagtctaaggatcaagaaccccgtttggctctcagctctgatctgacctggaagaggagaaacattgaagaggttccagc

SEQ ID NO: 724753 - DNA, 233 bp, Homo sapiens
  misc_feature (18)..(18): n is a, c, g, or t
aagatgccccagactatntacttctttcaaaaattagctgtgttccatcaaggagcatgttccagagcatttcccagtagatgtcccaaaggacactgtccggtgctgtggcgtacagtggcaacagcattgagactaagtggaacatcccagtcaggctgctttagaaatccagcgtcactttgactagaatacgcaatgtaattggcgtgtctttacaaaaacgcgcacac

SEQ ID NO: 724754 - DNA, 158 bp, Homo sapiens
ctctccaaacacagaccccatgacctgggacttcccagcctccagaaccataagaggtaactctctgttttttgtaaatgatccaactcaggtgttctgtgatagcagcacaaaacagactaagacatgctctgaaacctcacttcctgggtttgcaa

SEQ ID NO: 724755 - DNA, 287 bp, Homo sapiens
gggggtatgctgctcgaattcataagaacagggagtttagaagtagggtcttggtgacaaaatatgttgtgtagagtgcaggggactgagtcctgtgcagacactgctgaggctggggacaggagagggtgctgaagactggataggagatgtgacagggctgctgctcatttgagtgttggcctgcgggctgctgtcaggactgtacagatctccaggcttctgcccccgctggaccatgctagagtatttacaatgactccactggaccatggatgggttctgag

SEQ ID NO: 724756 - DNA, 536 bp, Homo sapiens
tcgggacgccgcacatcttgtcaaccaggacgaccctaatgtgactggatgatctggaaccttgtgttcatccagtataacagggaacgctgatggcattctgaaacctcttcccaatgaaaagcattgacacagggatgggcctggaacgactggtatcatgtgctgcagaataagatgtccaactcatgacaactgacccatttatatgtcccatttactattgaaagcccaatttcccagaaaagaggcaacaagtggttggccccgaaacacaattaacaacttgggggaaaaaggttatgggattgccattggaagtggattgccccagagaatttgggaggcacttattgaaacaaaatttgggtacaccatttaaaaaccgggggagttgattgggtccatttatcatgcagtttggaaaccaccaaaataagtacacatacagacgggaaaacacccaaaattcaaaaacatgtatatgagaagaacaaaacaatttgtggttgtaaatgtgagaacataatggagaa

SEQ ID NO: 724757 - DNA, 900 bp, Homo sapiens
gggccgggcgcagtggctcacgcctgtaatcccagcactttgggaggccgaggcgggcggatcacagggtcaggagatcgagaccatcctggctaacacggtgaaaccccgtctctactaaaaatacaaaaaattagccgggcatggtggtgagcacctgtaatcccagctattcaggaggctgaggcaggagaatcacttgaacccgggaggccggaggttgcagtgagccgagatcgcaccattgcactccagtctgggcaacagagtgagattccgtctcaaaaaacaaaaggaaccgggaaacaagaattagcattatacctcttcctggtttcaacggccaggaacatttttgacagatttccaaatcaggtgtgaatatttccaaaacaaaattttatacagtttaaaatatttttacttcttatagtaatagtattacttttaaaaagggcctcagggtaatactatcttttctaaacaggctaccaattcagtggcagttacattaacccaattagtgtccctctagtggagaccaacttaggcctatttcacttgtgtgtagcctcaagtgctaacatgtgtgccaaataaatattccggaagaattacacttggagtttgtaaaaaccattccgtctgcgttaccagttgccaaacaatttccaaaagggtctgtattatggtaatctgtgacgatcatatctcaatgggatacccgtcatggacggtggggtgcttagtcatacgtctcatattttaaacgtaataatgctggttacaacactcttcctgtctacaagtaactgttacaaacatggtaccccaaaaggaattttggctcgacaggcacaattgcttcggacatggttgttccacattttacgaactcgg

SEQ ID NO: 724758 - DNA, 888 bp, Homo sapiens
gatccgcatttctcttctttcttaactacaagctcccttcgccactgtttgtccaaccagaaatggacctgaaaatcgacttagatttcacggtacctgttcagcagcactctgctcccagtctaagccagactgggaatcccaattgaaactgggaccagaatttatcagcgtcccttcccagagcgcctcaactcatgacctctgagccacaaggaccactaacagtttcccacagacccaccagtggattctggactgttcctcctccgaaatgaagttcttgaaactagatactgagatgaggctggggaggaccacagatccaggactcctggcaccctcaagcctggcctgaaccagtagcaggacagataatgactagtctgtgttcccctaagtgtgtaaaggaggaaggagggatggcaggatacccttctacaggtcagatgtggtactggtgggctggatctttaatgacacctgccaccggcgcctccttcttgcacccaggccccagccgaaggtcgcgtccctcccccatgccccagggacgtcgaggcgggtaaggggctgtttagagacccgagccggcctgaaatggcagcgcggggttactgaccacagatcagcgccccggtcgagctgcgacccagcttcagcctctgaaccccgagcccgccaccacctctcccacgaagttgccctcgctggccgccagtcctctcccaggtgggaggctggccacaggcatagcgtaacggccctgccggcatcagtgggctggcacgctgcggggcactaggggtagggactggcacggcccgtgaccttgaacaggccgccgcggccgcgcgttgcggcctccccgctgcggccaagccagcc

SEQ ID NO: 724759 - DNA, 330 bp, Homo sapiens
  misc_feature (144)..(144): n is a, c, g, or t
atggctatgacactgtgaagcctgtacggccggaatcgggattggatctatatcatcttccacagcattattcccactggtctcagcctgcaccacctactttgggacagtgtcaacagtagccaagccccccccttggttggntttttggacagccaacccttaagttcagtctgcatttgggctctggaacaactcctaattctagttcggctttccagtttgggcagcagcactacaaatttcaacttcacaaacaacagtccatcaggagtgttcacatttggtgcaaattctagcacacctgcagcctcagcccagccttcaggc

SEQ ID NO: 724760 - DNA, 436 bp, Homo sapiens
cggaccgcctcctctgattgacgttttttatggacgctagaccctcgtgtctttgcgctgtctctccatctatgcaggtttctgccaccctcccatcccctcctcaccatacccggcttctccctccagggcatctgacctctgtgtgtacctgtgtaccacaggaggcccttacttctggtttctcctcttgggctgttgttatacagagcatgcctgggtgtcctcagaagatctgtggggtgctgtgcagtcccgccctgggggtaaccacagtggacccacaacacttttcctgcctgctgctaccccttgtagctgcgagcaaacttaaccagctggttatgttcttgcaaccctttcccttcctggcttagttttgaagcaaacttcttttccccaaattgtaaaggctacttatttctcaaattaggat

SEQ ID NO: 724761 - DNA, 325 bp, Homo sapiens
  misc_feature (287)..(287): n is a, c, g, or t
cagaagaggtcagaatggatcgccaaaatcccaaattttggggtaacaacattggtcaaccatccacaagtgtctgcacggctgggggaggaagatgaagaggcacggcattattggaccagagtggaagtgacagaattggaagatattaaatcaggttacataatagatttttatttggatgaaaatccttacttggaaaataaggttctctccaaagaatttcatcggagtgagagtggggatccatcttcgaagtccagcgaaatcaatgggaaatctggaanggatgtgacgaaacgttcgagtcaaacgcagaataaag

SEQ ID NO: 724762 - DNA, 135 bp, Homo sapiens
gcagcctcgggggtgtggagaaggagctgacgctgcgcagcaagccctggagctcaacaagcggaaggctgtagaagccgccagctggcgaggacccaaggtgcacctggcaccgtgcacacccgccccggcaac

SEQ ID NO: 724763 - DNA, 1447 bp, Homo sapiens
  misc_feature (151)..(151): n is a, c, g, or t
ggactgatgatgcacatgtactgtgttcattctgggttgactgggagtctgcccgactatgaatgggcgtcctatctctgtcgcgagtcctcgaagcctggattcacgctacacgatactccagcggaagaatctcctctctgaacctgtntctgcgcataatcagctagctccgaagggcaagtagagagtgatctgggttacagatgcgagttccaagcacgcgcgtggccctatcacgcgtcacgagccactcgacatcgagatactggtgacttgcccacagcaagcactctgtcttgcattgcgagcgctcaaggcctctcgcacgcctgaacgtcaccgaggaattggatatctatactcatgtacaatatcatctctaggagtgagttgcatgattcccctatgagctggcacccaccatgcgcgtgctaggttgcgcatcttctagtcaacggggtcgcgcgttggctactagtcttgctccctcgccttgtcattcgacgcgtgaaatggttcggtctagcttcctgacacccacttgtcgttaaccttacattcgtcttggctcccttatctcgggatagacccactttacatcccctgcgaacccaaatatggggggacttcctctaaagttcccgggacctggcgccggcaagcacaactaaggggtggtctggtgcgtttggcatgaacccggtcgttgccttctgagccgattgggtggtggtccctatttctttgcactcatggtcgctaggtcttgatcttcctgattcttgtcgggttccaatcccgggtcataccctggaggcgtggtggccgagttaccccctgtttggttgccctttttgacattatttgaatggggttggcccttggttcattttgccttgattactacgggataggattccttctgcaccattttgtcgccttttggatcgaaaagctttggagcaaccaaatcacgcgagggaaaccccggatgggactccattgggtaggcccccgaaaggcaatattggtagttgagttgaacttgttgtgcacgagaaaagtcatggggcactcacattaacccggttagtgagatccactaatgggcaaacacaaacagacacaaccccataaccaggtggtgaaaacggaggttgatcccaagaaatattctagaacaaagtagcgtgaccacggacagaaagcaagagggagggaaaaaactagggcaattaaaaaaagattagtaccccaaaaagaaaaacaatgcggcgcgcaactaacaccgagacaacaggcacgatcacactataatataaagacaacaaataaaatagatacgaatatgttataataaatgaacactacaaagactaagcacttataaaacagcaagaagatcatcaatgtactgtcattcttgtgtatttatgagtctatc

SEQ ID NO: 724764 - DNA, 357 bp, Homo sapiens
tcagaagcatcctgagtcatgacccacccactctcggcctccaaaggtgctgggattacaggcgtgagccaccagtgcccggcctccatgctattcttcatagggacggtactggtttacattcctatcaacaacgtataagagttctcttttttctgcctgctcactagcatttgttattgcctgtctttttgataaaagccattttaactgggatgaaatatttcattatactttcgattagtatttatctgattagtgatgttgaccattttttcatatacctgttgaccatttacccatatgtcttcctgagaaacatctattcaactcaggatgcttcttgacgggtaccga

SEQ ID NO: 724765 - DNA, 1472 bp, Homo sapiens
  misc_feature (470)..(470): n is a, c, g, or t
gcgggacgctgagcgagtcagtcggtccatgggctggcgtgtgtgtgtagaggcgttgcaggcgggagctcagcatccatcagggccggactagcaatgcgcgtgatggacatgtggcgtgtgcttgcttgtccaacggcagacgtgtgtgattatatgatctattgagaacgtctgggtgctggacggcaggcggagctgggccgggggcgctgtcgaccctcgttgtcttgtagtcgtgtcgtgccgaaggtttccatggtcgtgttggcagacatagcggatggtcgggatgcttatcggctaggcattggactcgaggctctggcactaagataatcgttctacattgacagaatcctttctgacagggtatctactgctggaccgaccgaagacaatggcgtccacgtttctctagcggctcgtgtctacttggcgcgggtagaaccaattgataggcgctcaanattgcgatttatgcaaagaggttagccgcatattgggtggagctgggggttgggtacgcatgatcattgtacttactcgaacggtttaggtcttgggatgcgttggcttgataactagccgcgtacgggtggtaaagggactcgggctgggacaatctccttgcaggtactactcgtgaaaagatctctactgtactgaacttcggaaaaaggagatcaggggttcgggaggtgagaatccgggtataagtacagtataggatttgtggcacaattcaaggaagctagtagtaagtggatgtgatgacggaaaactgactttgaggaaggtcgtaagtgagggttcaaaattaacaagtttgggatatgccagaaccataataataagtgtaaataggaagggtacgtccaattgacgagtctgtgggccaaaaggtacctaatatttaattctcgtactttcctggtggacatggttcatcgcagaggtaagccaattacctgttaacgaaagtgggatgggccttataacgcgcccgaagatatatgggaaggtggggcacaaatgcccccaaggtttagcgcaaccagttggagaggaagggggcagaaagagattcttggaaaaaagcgcactcggaggaggcaacgaagataacaagggggggatcacagagggcgccaacccgatacggctgtagaaggatttgtggcccgaccttggtaatgtcaaggcaatcacggcacaacgagagtacaaaggcgcacaacaagggcacgcagaaaacacaacgagagtacacgcgggagcgacaacaagggacccaactcaagccagagctaatcgtcgaggcagtgcgaaaactatacgcaatggaaccagggggacgcgaaacaagcatcgacatctcacataccagagggtacacaaagcagcacgacagcgagacacacacacaggacgagcacaggaagaggtacccaaccgccagacaaagcagc

SEQ ID NO: 724766 - DNA, 283 bp, Homo sapiens
  misc_feature (30)..(30): n is a, c, g, or t
cttggggggtttttccccccgtttgggggngggttttccggtttccccccggggccccccaaaaggggcccccctccccccccggtttttgggggggccccccccccccctggttttggggccccgccggttcccggggttttttttttttgttttttttcccccccccaggagggggaccccccgggggggccggctttttttttttttttttttttcccccggggggggccccccttggcccggggctttggggggggttttttaaattttttttggccca

SEQ ID NO: 724767 - DNA, 385 bp, Homo sapiens
  misc_feature (342)..(342): n is a, c, g, or t
  misc_feature (367)..(367): n is a, c, g, or t
  misc_feature (378)..(378): n is a, c, g, or t
atcattacactttattttacagatgagaaaactggggcgcagataaagcaacttgcccaaggtcttatagctgtaagtcaaccctacggtcaagacctacaagtagccgagctccagagtacattatgagggtcaaagattgtcttattacaaaaaaattccaagtagaatcaacctttaataagtctttaatgtctcttaaatatgtttatataggagtctaatcaccaattcacaaaaatgaaagtaggggaaatgattaacaataatcatagggaatcttaacaatccaagtgggctttgaggatattccattcttctttgacagtattggattccttnacattttcgttaagttcccattgtntgtttttgggnttttgag

SEQ ID NO: 724768 - DNA, 323 bp, Homo sapiens
  misc_feature (103)..(103): n is a, c, g, or t
  misc_feature (171)..(171): n is a, c, g, or t
gggggttacacacgcatatattaaaccttgctaggcttttgtggcgctaatcgtgtcgtaagcaactagcattttcccttttctaggctgcattctttcttgntatttcttgccctacgtagcctccgcctacttgcttgcttcctattccaagtcctcgctttccactgntatatcccgcctatttgttgtagccgtaagtcgtggtgttctcttcctagctcgcgttttatcccaccatctctttttctaccccaaccgtttatccccatctactatcccttttgcatagcctatcccgcccctccccctaactccttagt

SEQ ID NO: 724769 - DNA, 404 bp, Homo sapiens
ctttcgctgatgcaagagcctagtgcggtggtgggagaggtatcggcaggggcagcgctgccgccggggcctggggctgacccgtctgacttcccgtccgtgccgagccactcgagccgcagcatgtctggggacgagatgattttgatcctactatgacgccagacgacaccacgaagaagaagaagccttttatgttcagatgcaggaaggggattacccaaaaactatgaggaaaacccagtcttcagaaaccaaaagaagtggagccagagcaactgaggacaaggattggaagctgctgaagaggacactaggaaaaaagatgttctgatgatctagatgacttgaacttctttaatcaacaatgcaaaaggatggaaacaacacttaacacagatact

SEQ ID NO: 724770 - DNA, 343 bp, Homo sapiens
  misc_feature (14)..(14): n is a, c, g, or t
  misc_feature (96)..(96): n is a, c, g, or t
  misc_feature (149)..(149): n is a, c, g, or t
  misc_feature (206)..(206): n is a, c, g, or t
  misc_feature (245)..(245): n is a, c, g, or t
aatgagattgtggngatgtggagattaaaatatatgtatttgagttggggaatttgaatattgtgagttttagatgttggaaatttgggattttgnagttttgttttttgaaaatgattaagttttgttagtttgtgtttttttttttnatgttttttgggaagatgggtggtggtagagtgagaaggttattggttttgtgttgnagtatgtaaaatttagaattttatagattagttttatangtagtgaggatttagatttagagaaattgattaatatttatttttgtatttgtgtgtgtgtttaattttgtaggttaataaattaataagataaatga

SEQ ID NO: 724771 - DNA, 138 bp, Homo sapiens
aagagacgagatggagatgatatcagtttacgggggaaggcgctctggtgaaagtaggtcatcatttctcttggtccttgtcgttcaggcaggaatttgaagtagatagaaaccgacctggattgactccggtctgga

SEQ ID NO: 724772 - DNA, 298 bp, Homo sapiens
acacagggtcagtttatataaagctgtggtaaaaatataatgagatatacaaatcattcagtgtattattagctacataaaactattcttagttcctttttcataagtttcacatgaacattaaagctgaatataattagatctcatacatggtcatcatggttcatgattttcaacagcagcattcatcttttatagcatcatattaaacatacttaaatgtgtataggacagcacatgaagctgacccatgaaaccaaagtgagccatgaattcgtaactgtagcaagctcaaaag

SEQ ID NO: 724773 - DNA, 1235 bp, Homo sapiens
ctggctattgggggagccagagacaggggaaggcagcctgtccatctgtgcataagagagaggaaagttccatgtgatgtgtatgtttcacgggagcttcacatggaggagctgcagatagatatgtggtttctgtgtatgctgtactgtctgccttgttttctctaagtgggggcttctacaggctttagggaagtagggtggactgtggagtaggtgctgggaggagcggggccacagcgttaggctttggacgctcatggagtgtacatacactaaagtacggagcacgctggagacgtgatttctggtcatagatgcaggcatgaacgggctggcagtgaagtacaggtacataagttctcagtgtttgcttatagcgttgtgggtcaccgtcttgtaactgtatgtagcagatgtttacagtcttagcggatccgggactggcgagaccccaggtttagcaacagggctcggtcactccgtttaatccatctactcaaacaagtgtactcctatttactttgttagtattaaaaacgaaaagtcacacaaataaagtactgctggccgtgagaaaagagacacatcgaagagcagacagagcaaaaaagcaagaagcaacaacaacaaataccggcgcagcgaacccgccattcccgagagtcgggaacggcaaaaaaccaggaactctgtccaataagggccagatgagcgtcgacatgagacgacagaatccgtgcacccactcccatgcactggaaatttgaaaaaaacagcgggggaaaaataaacggacaggaaggtaaccacacgagcaataaagaagaacgagcaccacacgatgttgccaaaaaacaaacgccaagaaaacaacgtgacagtaaccgacagagacggcaggagatatacacaacaaacgagcatgtagaccagtagacgcaagtcaccagcttcatacccggggataaccgatacacgtaataacacaggggagagaagcaggtagcggaaagccaacaaaaggctgatgacaacagcaacatcgtgatcgtcagagtcacgcgaacaacacgccacaagctagtgcccaatgacacgctgtgagaacacctgagccacgacaacccgcagcagaccaaacaactaaaaaacgcatcgaaaacacggagatagccgcgttcacaactgacccgacgcagcgatacagacctgcgatacgacaataagactcc

SEQ ID NO: 724774 - DNA, 168 bp, Homo sapiens
gatcatcaaagacaaatggatcttctattcccatgaggagcatgtggacaccaaaacctccctcttcagaatggaggtatgacatgataaaatgagatgtggtgcttgacgtgtcacatgacaaatcttgaaaggttactaattagtgggcctcacttgttgggggca

SEQ ID NO: 724775 - DNA, 482 bp, Homo sapiens
cacgatgatcacaattcgtcctcatagcaactccatgaggagggcgttagtagcccagtttctctgtcctttaaagcctaagagagtgggataacttcctgaggtcaaaggacccaccatatgaagccctgggaagacgctgctccatttgggaccattctcaagcagttctataagagctgcatatctttacctaaaatctaaggtcagccacaatggcctccaaaaacagaactcctctcctcccactctgattgctgatgaccacgccgtcgggatctggcgtccaggagaggacggctctggctgtagaacttgctgtgtttcctgcatttatggctgcactgaccccaaaacagcgctctgttctctgcttttaatctactctgactttgaaggttctattgaggatgtttcctgcctgtatcttgtttctcctccctcagcacagcctccaaattaaaaaacgaaacaaaacaaaa

SEQ ID NO: 724776 - DNA, 344 bp, Homo sapiens
cggattcggtatcctgagttccgtctatttgccgttttgaattcttgtcttccgaaataggtataagaaatctcccaccagtgaatatcaaacaggtacacagaactatatgtagaagaattagaaagcaaagaatacttacaggttcttatctgtagatatctgaaaggattgagtgtgaagccacgaatactgtgcaaggaatcatagtactgctactcagctttgcggtactagtctggtgaccaaactggtggatggcactggccatagacctcagtacaggcttcggactctgtgccgggccctgcgacctgctgcctccaatcacggtggaaaacatt

SEQ ID NO: 724777 - DNA, 1002 bp, Homo sapiens
  misc_feature (714)..(714): n is a, c, g, or t
taaccattctatctggtgccaaatcttcacagcgtggtgacagtgggtttaaatctctccactaactccactccccaagaaggagcccacccaaagcaaaaattcaatatttatccatcatcatcagagtgatccactccacgagaattatatcttataaccgtgatacgagctcatcatattgtggtagatttatggagaagggcttcgtattcgtgcccaagaagaaagtttccctcctttacagccgtgattctcggacgtggtctaccaaattgtgccacgttgtgggagacgtgatattatgaaggtgccataactctcctcgtgtgcgtgggtgagagaggtctatacactaatcgagagacacgaccgaggagtggagagaacaccaatagcctatctcacacatatatctcgtgggtacaggacaaaactctatcctatgagaggggataacaaaccccacagagagtgtgtgtgagagatacacaatctgtgaggaaacaaatagagctctgaagacaaaccaagactcacctctgagaatctgagcgatcacaaataccacagaatcacacgggcgtgagagagacataggctcatggtgcaacaaacaacaaagatggaagatacacaatcatataaactgcgggtgacgagaatgcgcgagacaattaccaaaaacggggaaaaacacaccagatattcacnatatatggacgaatggcggaccatactataacaccatggggggagaacaaaccccaaaatgtatatggatcatgtggtcttcataccataaaacctggggattctcctatgggacacaacaagacaagagcatattctacttattagacaaaggaagtacattctatggagagccactaggacacaaagggcgttctttcagcaacagtgatataagtataacagacaattaaaggatctaagagtagtagaaacaacccacaccaacttgatgatgtataggccagg

SEQ ID NO: 724778 - DNA, 178 bp, Homo sapiens
gagagaccttggtctcgagcttataaaaatataattagttcacttttaaccaacccttcttacagatatattttaattttttataagaaacggagatattaccgctcttttacaccccagatttgggggtccccataggacaaatattttcggttttatttcgtttaccccacccact

SEQ ID NO: 724779 - DNA, 369 bp, Homo sapiens
cgactgagatcgacaaggattgccaaggaagaaggctttaatcgggtgctgcagccagggagataggagctcagtgtcaaatctgtctccctgacctactaaaactagaggtttgtatagcagggaagaaatgtaacaatgtgtaacattttgggatgcagtcttgctctgtcatttaggctggagtgcggaggcctgatcttggctcactgcaaccactgtctcccaagttcgagcaattctcatgtcccagctactcaggaggctgaggcaggagaattgcttgaacccaggaagcagaggttgtggtgagccaagattgcaccattccactccagcctgggcaaccagagcaaaactccatctaaa

SEQ ID NO: 724780 - DNA, 379 bp, Homo sapiens
ggttgtccgagcacggaagacatcgaaggtatggtccaggaagctgagaagtacaaagcagaggatgagaagcagagggcacgatggtgtcatccgaagcaatcacttgagtcctatgccttcaacatgcaaagccagtgttgcagatgcagcacacttcacaggcacgcattacgatgcaggcaaacagaagattctggcacagtgtaaatgacatgatcaactggcttgataggacatcagactgttgagaaggcagcaatttgaccatcaacagaaggagctggagaaagttagcaaccccatcatcaccaagctgtaccagagtgcaggaggcatgccaggaggaatgcccgggggataggaggtgggtacccga

SEQ ID NO: 724781 - DNA, 138 bp, Homo sapiens
atcattcgcgcagtaggagatgactttcttcaggtagttggagttgagccatagtgtagcagtgtcctccaacaggtggtgtgaaacggaacttatcgatcctctggtgtaagtcgtggatctcctcatctgacgttt

SEQ ID NO: 724782 - DNA, 1042 bp, Homo sapiens
  misc_feature (229)..(229): n is a, c, g, or t
  misc_feature (264)..(264): n is a, c, g, or t
  misc_feature (273)..(273): n is a, c, g, or t
  misc_feature (277)..(277): n is a, c, g, or t
  misc_feature (291)..(291): n is a, c, g, or t
  misc_feature (306)..(306): n is a, c, g, or t
  misc_feature (310)..(310): n is a, c, g, or t
  misc_feature (325)..(325): n is a, c, g, or t
  misc_feature (349)..(349): n is a, c, g, or t
  misc_feature (441)..(441): n is a, c, g, or t
  misc_feature (443)..(443): n is a, c, g, or t
  misc_feature (471)..(472): n is a, c, g, or t
  misc_feature (483)..(483): n is a, c, g, or t
  misc_feature (487)..(487): n is a, c, g, or t
  misc_feature (490)..(490): n is a, c, g, or t
  misc_feature (493)..(493): n is a, c, g, or t
  misc_feature (497)..(497): n is a, c, g, or t
  misc_feature (503)..(503): n is a, c, g, or t
ggtagtgtgagcttttaatgtttaagtcatattaaactcttaagtcaaattaagcagacccggcgttggcagtgtagccataactttctgatgttagtaaaaacaaaattggcgacttgaaattaaatcatgccaaggttttgatacacttgtcttaagatattaatgaaacacttcaaaacactgatgtgaagtgtccagattctcagatgtttgttgtgtggatttngtttagttgtgtgttttttttttttttccagggantgttgggcncttngcaatcctcaaacntggggttaccttggnggtntgggcttaactcagngacttgtacatttcagcaatagcntttggacgcaagttttatcagcaaggcaatttttccagttaataagggttccaaaaactcatgtagggattaaacttggctggaattgtcanangtttggaccctcaatgtcactggtacgnnttaagtaaatnggcntanatnggtnattaangttaaaaatatgcgctaggcctctggcttgtgtgcgcctggcggcaattattcccggagagttctcttttttacacatcttcaaacacgtgttgggactctggcgcacaaaaacacatctatcatcatcatcgcacgctactatacacacacacacactactctttgtgttttcggcgacccgcccacatttgggcgatcctccttcgggaaaaacaacgcgttttttgttgacagaaccactcttttgtggtctgtgggggagaccgcgcgagcgtggtccccccccataagggtgtataatgtgtagaacaagtggtggggctcacaaaaaagaggggtgttttcccccaataggaggaaaaaaaacttgctgggctcgcggactcagagaaaccaaacaggcgagcgcggagaagaattttctccccttcacgccgactatatattaaaaaaaacagacgccgcccccgcgcgcgggggggagaaccatcagccaagcgagtcgtcgtttttgtttcagcaacaaaactatccttc

SEQ ID NO: 724783 - DNA, 399 bp, Homo sapiens
gtgatctagaggatttccgcatttcgtcccatcagagtagtatgaatctgctaaaattgaagcaagaacaaacatcaaatggtggtgaagcatggatggaagaattgtgaaattattgatgctttacaaaaagcttatggggacaatgctttagtgattgtccccaaagaagtgggcagtttacaaaaggataactcactttaagaaggggccagatgatgttgaagatgaagcctgcagtagcagactatccacatcaatttgtgaggatcttgttcatgctctaattgaagaggaccaacaattaacagtagaaacaatagccaacaccacagatatctcaattggttaggcttatacaattctggttgaaaaattaaagttgagtaaactttctac

SEQ ID NO: 724784 - DNA, 272 bp, Homo sapiens
ctgctgtgttgttgtgtcgatctaaggtccctgtggagctggttctcaatggtcgcccggggttgggagtggagtggggctatctcggttcattgcaagctccgccttcgaggtacacaccattctcttgcctcagcctcccgagtagctgggaactagaggtgcctgccaccaggctgggttaattttttttggtattttaatcagagatggggttctccggtgtaagccagggatggtctccatcttctggaccttgtgatccggccggc

SEQ ID NO: 724785 - DNA, 184 bp, Homo sapiens
gattagagtagggttaggatgagtgggagagagaaagggaggaaggaagtggagaaaggaagggagaaagaatagaaaaggaaggagtggaggagtgaaaaatgattttttacttaagtaacaatatagcaaggaaggtttgtgagctatgattgtgggctgtaggggaaagcctggattctat

SEQ ID NO: 724786 - DNA, 450 bp, Homo sapiens
ataaactctgcattaaaccgtcagctgcggatggctcgacgatgactgtatccagcaatggtccgcgcgtaccagaagctcggcaaccacctgctgacttcgatgcagctcgaggacgcgcagaactccggccacagcttcgatagattcacggttcaaccgcgacgtccggatggagcagctcgacgcgctcgggcagctctgtcggtagcaacgagagtttcggtcgcgccaccgagaggggtgatacccagagcatcgcatcggaaactgcgacgacgacgtcgggcggtaccagcggtcggtcgatacacgacgagagcgttggacaagccaatcatattgggacgcggttcggtacagggattggcgcgaccgacagcatccagttgcatgccggcggaagtgggcatcttcggagtatgtattttcgcagggtggcggtattgc

SEQ ID NO: 724787 - DNA, 598 bp, Homo sapiens
gtggtggtatctatagctttgcttgtactcctcactgtttctgcctacgcaaaatatccatgtttcctctgagaaatctgttgtggactgaaagacgctgctggctgtgaaatttactaaagtgtgtatgctttgctaaaaaaattatttcttggacaataggaacagtcattgatactgtaaatcctggctcttaacagtgagtggccaaggacttgatcagcccatttcttgtgtccctcagtgcttgaaaatataaggtagcactgcatactcgtaatgttgaatatgactctagatgacttgtaggaggcaactgtgtgaggagatgctagcgtgtcagtgtacaatgatgctcatggcctgagtcagctcgagtatttctttcaagaaacacacttcagaggtgaagtatccagggtttccccggcctggacattgtgcagactgcgccaggcaggacacagccctgtaagaccacctagatgtgagctgataatatcctacctgcgtgatgaccacaaacgcgcatctctgctgtctcactgccacagccatacctccctctactcatactacatactgcccgtagacccta

SEQ ID NO: 724788 - DNA, 981 bp, Homo sapiens
gctgaatgtgctcccgcaaagaagggtggacgaggaagaaaaagaggccgttgctgccatcaacgaagtggtaacccgagaatactaccgatcaactattcagcaagacgcatccatggaggtgggcttcaagaagcgtgcacctcgggcactcatagatgagattcggaacatttggcctactgaagtgagatgggaactccagcatgtgcgcatttgacactcaggctcaaggaaatgctgtctgggccatgaggtacataaggaatgtgccataccgaactccggtgtgcggactgtccagaaaacgtagtgaggatgcaagattcaacatataaggctatcatagctttgggtgtacctatggtacctgttgaccactgttcaaagagatctacgagaccaggtcaatgtggatgagaactaatcggctgatcgtcagatcatataagagttataaatgttgcaaaaatgaattgacaaaaatgtcagaggtcatctaatgaagggggttgcgggcaagaaccagtgtaactgcaccatgggtctgtggcctgtagatagtagccgggacctgagctttcattgaccgcgaaaggggtgaatgtagccggactcccatatagtagccgaacgtctgttcttgaaaattgcggaaggagagccagtggtaacgcctggttgagtactctggtatacaggctattccctattaaccttggaaagtcggaccaggcctatgatcctggcccgtcggagcattctacaaggcacctttacacggaaatttccctaacttcaaggaaggtcgacagtccaacttccaaccacggttgcgggacggactggccgcgatccgaaagtctcccagtgaccaatgtggggtgcatctacctgcgaaggttagaggattctacccctgaaaaagctgtgttgactgcttgggtatccaggcgtgcacttcgcatgggaaaggaggcg

SEQ ID NO: 724789 - DNA, 920 bp, Homo sapiens
  misc_feature (919)..(919): n is a, c, g, or t
aaatagggtttaatttttttgtttgtgtgttaactctaaagctaaaaaagcttattatctaaaaccgaaatcttcctacttacatatctattttaggtactgtctatttgatgttgtcattactgtaagctttacctcctctaagattctaccaaacaagaaattttggggttagtttccttattgaaaatctatagtggatccactttgtacttctaggcccttccctgttctaccttcatctgcctccttttcatatctccatgctgcgattttcctggcccttatccctcttcagatataatgtcttatccttcattttattataatggggatattttctctctcttcacactttattttctgtctctcagaactgagcttatctccatttctgcttattctctagaacagatagtaagctagcagccaacgctacccttccctatcctatctcttcatggaagaccacattttatttatagagttatgtgtatttattgcatagcttcaggttctcttcagtatttgttaactagtttgctgaacaggtaaatagttgaaatcagtagtattaacttctttgccctttacacttttagatttattagtaactaataataatacatagcatatgccttgtatgaactgtgattcatacccggtctgacctaagtcctcttaactgaagtacactggatgcagaaaatatccggtacaatgttagccccgacgacccgtttatatgccgaagtaccagaacacgacgatgcgcccccttggcgtgtttgacctgttccgaacacggggggagggacacacgcacgcatgggcacgcctaaaaacgcggcacgcaaccaacggcccctcgacacacacactcaccagcccacgcctccaccctggttttattataatnt

SEQ ID NO: 724790 - DNA, 121 bp, Homo sapiens
ctcggtcccctggctctgaactttggagagcccggtgccgttatgagccgtgggtttattgtcacttttcctgtacgaccactgtcccgtatatttgcccgtgtcgcctttggtggactcc

SEQ ID NO: 724791 - DNA, 2273 bp, Homo sapiens
  misc_feature (366)..(366): n is a, c, g, or t
ctccagccgctgctcaccaggcagagcgagcgggcttggctggggcttcctgccctgagcgcgacaccgactgctccggaccgcgcctccaagcaggctgaagggcttccgctcttggcttccagaaaagtttggagaaagagaatttgaggcggattggagggtggtagcccctccccagccttctttctctcccagaagcctcactctgcacagcgtcccccattcttcccgtcctgattccccatcttcctgacccctccttctccctctcctgggtcgatcccagtcacattttctccttccgaatctcatcctccctcctcctctctatcccagtcctctgaacgatttccgcctatttgnaagccttctccctgtcattctcaacgcttctcctttctctccacctcccctgccactccattttatccatcaaacctctccacttgcatccacaccctcccttcatccttccctcccagcaaaccttgctcatggattctgggcctctgtgggatgccaaccccacccctcggggcaccctctctgcccccaatgccacaacaccctggctgggccgggatgaggagctggccaaggtggagatcggagtcctggccactgtcctggtgctggcgaccgggggcaacctggctgtgctgctgaccctgggccagctgggccgcaagcgctcccgcatgcacctgttcgtgctgcacttagccctgacagacctggccgtggcgctcttccaggtgctgccacagctgctgtgggacatcacctaccgcttccagggccccgacctcctgtgcagggccgtcaagtacctgcaggtgctcagcatgtttgcctccacctacatgctgctggccatgacgctggaccgctacctggctgtctgtcaccccctgcgcagcctccagcagccaggccagtccacctacctgctcatcgctgctccctggctgctggccgccatcttcagcctccctcaagtcttcattttttccctgcgggaggtgatccagggctcaggggtgctggactgctgggcagacttcggcttcccttgggggccacgggcctacctcacctggaccaccctggctatcttcgttctgccggtgaccatgctcacggcctgctacagcctcatctgccatgagatctgtaaaaacctaaaagtcaagacacaggcctggcgggtgggaggagggggctggaggacttgggacaggccctcaccttccaccttagctgccaccactcgggggctgccatctcgggtcagcagcatcaacaccatctcacgggccaagatccgaacagtgaagatgacctttgtcatcgtgctggcctacatcgcttgctgggctcccttcttcagtgtccagatgtggtccgtgtgggacaagaatgcccctgatgaagattccaccaatgtggctttcaccatctctatgcttttgggcaacctcaacagctgctgcaacccctggatctacatgggcttcaacagccacctgttaccgcggcccctgcgtcaccttgcctgctgtgggggtccccagcccaggatgcgccggcggctctccgacggcagcctctcgagccgccacaccacgctgctgacccgctccagctgcccggccaccctcagcctcagcctcagcctaaccctcagtgggaggcccaggcctgaagagtcaccaagggacttggagctggcagatggggaaggcaccgctgagaccatcatcttttaggaaagactcgctggggtctggtactgcccccaggactagtggaggttctctgcccacctcaggcactggaaatgagagctgggagggtaagggttggagttagaggaggccctgtctgaagcagagccaaaaggccagaatgggtcccctaccctggtgtcacagctgcccctagtgtgagggctgcctcataagctcccaatctcagacactggcagtcagggagaatcaaactgcctgtctccctggtcctgccatattcatagggtgtccatgcacacatggtgtcccagatctaggcaggcctaggatggtgctgtctaggggtccacgggtggcaggaattcagaggctggccttgtgccctggctacctgtctccattctaacctgactggcacatctcagcctaaccaggagaggggagaagtgaaaaaccgtgaggaggactctatttggatcctggatttgttgttgttgttgttgttgttgttagagagaa

SEQ ID NO: 724792 - DNA, 279 bp, Homo sapiens
  misc_feature (80)..(80): n is a, c, g, or t
  misc_feature (82)..(82): n is a, c, g, or t
  misc_feature (111)..(111): n is a, c, g, or t
  misc_feature (114)..(114): n is a, c, g, or t
  misc_feature (161)..(161): n is a, c, g, or t
  misc_feature (170)..(170): n is a, c, g, or t
  misc_feature (173)..(178): n is a, c, g, or t
  misc_feature (249)..(249): n is a, c, g, or t
  misc_feature (273)..(273): n is a, c, g, or t
aaaatgtgttagtgtgctgtgcaattggttttcaattcatattaatcttaatgacagagaacaatgtgttactaattatntnggttgtatgccattagtaaattgataganaanttaaggggattaacataacttcatttcattgccttatattacatctnataatacantannnnnngctaagggaaacagatggagctgtttattgagacaactggtgaggaattatcatgtgttcattcctatttnagagcgtgaactcctacattagantatata

SEQ ID NO: 724793 - DNA, 1983 bp, Homo sapiens
  misc_feature (76)..(76): n is a, c, g, or t
agcggaaagcctgctggtataagatggtcaattactttggtgcttgaagtcctctgaacgatttccgcctatttgnaagccttctccctgtcattctcaacgcttctcctttctctccacctcccctgccactccattttatccatcaaacctctccacttgcatccacaccctcccttcatccttccctcccagcaaaccttgctcatggattctgggcctctgtgggatgccaaccccacccctcggggcaccctctctgcccccaatgccacaacaccctggctgggccgggatgaggagctggccaaggtggagatcggagtcctggccactgtcctggtgctggcgaccgggggcaacctggctgtgctgctgaccctgggccagctgggccgcaagcgctcccgcatgcacctgttcgtgctgcacttagccctgacagacctggccgtggcgctcttccaggtgctgccacagctgctgtgggacatcacctaccgcttccagggccccgacctcctgtgcagggccgtcaagtacctgcaggtgctcagcatgtttgcctccacctacatgctgctggccatgacgctggaccgctacctggctgtctgtcaccccctgcgcagcctccagcagccaggccagtccacctacctgctcatcgctgctccctggctgctggccgccatcttcagcctccctcaagtcttcattttttccctgcgggaggtgatccagggctcaggggtgctggactgctgggcagacttcggcttcccttgggggccacgggcctacctcacctggaccaccctggctatcttcgttctgccggtgaccatgctcacggcctgctacagcctcatctgccatgagatctgtaaaaacctaaaagtcaagacacaggcctggcgggtgggaggagggggctggaggacttgggacaggccctcaccttccaccttagctgccaccactcgggggctgccatctcgggtcagcagcatcaacaccatctcacgggccaagatccgaacagtgaagatgacctttgtcatcgtgctggcctacatcgcttgctgggctcccttcttcagtgtccagatgtggtccgtgtgggacaagaatgcccctgatgaagattccaccaatgtggctttcaccatctctatgcttttgggcaacctcaacagctgctgcaacccctggatctacatgggcttcaacagccacctgttaccgcggcccctgcgtcaccttgcctgctgtgggggtccccagcccaggatgcgccggcggctctccgacggcagcctctcgagccgccacaccacgctgctgacccgctccagctgcccggccaccctcagcctcagcctcagcctaaccctcagtgggaggcccaggcctgaagagtcaccaagggacttggagctggcagatggggaaggcaccgctgagaccatcatcttttaggaaagactcgctggggtctggtactgcccccaggactagtggaggttctctgcccacctcaggcactggaaatgagagctgggagggtaagggttggagttagaggaggccctgtctgaagcagagccaaaaggccagaatgggtcccctaccctggtgtcacagctgcccctagtgtgagggctgcctcataagctcccaatctcagacactggcagtcagggagaatcaaactgcctgtctccctggtcctgccatattcatagggtgtccatgcacacatggtgtcccagatctaggcaggcctaggatggtgctgtctaggggtccacgggtggcaggaattcagaggctggccttgtgccctggctacctgtctccattctaacctgactggcacatctcagcctaaccaggagaggggagaagtgaaaaaccgtgaggaggactctatttggatcctggatttgttgttgttgttgttgttgttgttagagagaa

SEQ ID NO: 724794 - DNA, 251 bp, Homo sapiens
gggcaggcgggatgagaagtgacatctgcgtaacaaagagtatgttcctcgataagtctgataaagagcaatggaatctactagcatataagcaaacctaagccaaaggaacggaaagccacgaagaaggcacaagtcacaaccctcatgacaaagtacggcacaagtctaccaataagctaaatcagaatatacaaatacaagtgtcccaggctagcattgactcccgctcattgagagtgaaactggat

SEQ ID NO: 724795 - DNA, 174 bp, Homo sapiens
actctagagatcccggaggttacggcctgcagaagtacacgatcctggaagtctcctctggctgcttctcctctgcctcacgggttgcttcctcgccttcttgccctcggcttctcctccttgtcttccttcttttcctcctcctcgtactccacaggcacccagtacctgcag

SEQ ID NO: 724796 - DNA, 545 bp, Homo sapiens
  misc_feature (458)..(458): n is a, c, g, or t
gcacgaggggatatactcttcaaatcagagccgcgggaagagcgcgcgcgtgtggctctcctgtgtctgtgacaacactgtgacatcgagaccagagcttggagccgcagctgtgagccaggcaatgaaagggtggcagaattctgtgtaagaactgtagaaaatgagcaagtttcacagaatcaatggcatttcacagaaggggctgtggatattaatggagaggaatggcaactggttgaatgggctcagagaaccctggattgggaagggaaggtggagaactcttgaaacctcaatttagagggaagtgcaattaccaaaacacaagtgagcctcaaggtggagcaagggcaagaaccatggatggtggaaggagccaattcacacgagagctcttcacaatctgagtacccacttggtgatgaaccacagaagcattggggccaagacaattntttgaaggcaggtttgctcacatatcaattattgactatggagagagaacaccactttaatatgagcgcacaggttaattctgagag

SEQ ID NO: 724797 - DNA, 473 bp, Homo sapiens
  misc_feature (64)..(64): n is a, c, g, or t
  misc_feature (72)..(72): n is a, c, g, or t
ctgtctctacctgctgggaaatggaccgccgaatgtgtctagtccctacctgccgggaagatgnacccgccntcttgaacgtgtctagtccctagttcctgccgggaagatggagccgccatcttgaacgtgtctagtccctagttcctgcccggaagatggagccgccatcttgaacgtgtctagtcgttagttcctccgggaagatggagccgccatcttgaacgtgtctagtccctaggtcctccgacattcacccgtacaagctcccagctggcttgtgtatgtctgcagctcgacttgacaggctgttcattgttagaaaatgacttggggctgcttttcgttaaggagaaaagctgccgggcgcagtggctcacacctgtcatcccagcacttttggaggctgaggcgggtggatcattaggtcaggggttcgagacgagcctgaccagtgaaaccgcgtctctact

SEQ ID NO: 724798 - DNA, 271 bp, Homo sapiens
ttagaggatccaaagacccgaagacagctcacacaggtactcccggcttcgcttcttcaatcaccaccaccaagaccacctcacacagtactcccagcttcacttcttctattgccacctccaacacaacctcaagcagtactcctggcttcacttcttcgatcgccaccaccgagaccacctcacgcagtactcctggtttcacttcttcgattgtcaccaccgagaccacctcaccccatactcccggcttcacgtcttcgggtcgttt

SEQ ID NO: 724799 - DNA, 758 bp, Homo sapiens
gtgacatgatacgagcctggggagttacagcagtggtcaggggcttcctaggagtactgagaacagaagtgtgcacgagacgactagttacgacacgcagcgaaactagagaaaccattgtgtgtgagatctcatacctagagttgtttattttagaaagcctcacaaagaagcctctagtaagatactgtagataattcccaacttaaatatgctgtcttgaaacaatcctcttatatcaatttatacattgtgctttccctttgaagtctaaggtggataggggcataaactttggtgatgattaatagtaagttcagatcctgaaacattctgtctctgtcacgcatcattcttacctgtacaaaaaaaggttactaactacactcacattctcatggatataaaggaagattcagagggataatgcatacaaagattgttgacacaatgcactggatccgacatcagatagagacatcgagcaaatgtaaacataatattaacggctcctgaataggacctataacaggattacccaaccatatatttaagaaaatgattaattaaaaatgctatactacttattagggtgactggacattctgcaacgatgacagtaaaacacaagacatactgcctttggaaggaatgcacacagatagaagatgaggatatgcacaatacctcatgtagcacaacatccaccagtaataatagaacactgggaaaatgctaaagctgggcaacagacagtg

SEQ ID NO: 724800 - DNA, 212 bp, Homo sapiens
ataaaagccagcccagctatatcatcataaggagaatggccagtcctctcccaagtccacacaggggaggtgatagcatagctttcgtgtaaattatgtaatgcaaaatatgttgaatcttcgccttaatacttatagataatgtaagtctttagaatgatgagccttcgtgcccccccttcccccttttgtgtcctccgtcctccggccta

SEQ ID NO: 724801 - DNA, 326 bp, Homo sapiens
tgcctcagcttatcagcagcgcctcccaaactcttgaggacatgtggggaactacagctgggagtaagcaatgagacagtggtaatgagtgaggaggcggatagagtggatgctgttatgcccagaatggctcgtgactggtgggggacagaggccacggcaccagaaaacttcctaagggcttaatccgtcgactgttgtcacaaacgcatttcacccagagtggaaccggcagattttagccagggctcaggaggtctccatcaagagaggctcatcagagaatgtgagcaaagagaaggggttccgagctaacgactaacttc

SEQ ID NO: 724802 - DNA, 218 bp, Homo sapiens
gcgaggtgattagaggatcccggacggagatgtctgagtgagcatcttcatatgtgctgaaacaatgagtggttcaggtattcagtagttggtgcactttatatacgttggatttattaactgtttgagaatagcaccattagggggagattctgttaatgaatgtggagggaccagtattaatcctgatcttctttctttccccttttttctttttc

SEQ ID NO: 724803 - DNA, 830 bp, Homo sapiens
agagattctggcttacagtgccccaatctcaatgttttcataggttgctgagctaactaatgtgattattgagtttacagatttaaataattgtcactgttagagtatctactgtatttatagaagtcaaacttatgctgcctcagaaatccctgggtactgaaatggtaacatggaagtgaagaggtcactttgaaatattggtgagtcacacaagattaaaggaaaaggatcagtttgcagtatactcgaagaataaggttattgaaataattactgaacagcacattttctctctaaaaagtagtttcatgatgggttgtatttttaaagatcagattatcatttccgatatttggtgccaaaattgttgtaccttaggttacttgagagccagatttaatcatcattgaacattatgtggacttgtgtgctttcactacagaatatgtggaactgtagagccataagtatgttcgtctctaataacttgtcgattgcaaatatacagttctataaacaaaacccatatgtatatataaaatgtcaattttgcggaagctctggaaattataactatagcatctaagtttgagtctgtatgggactaaataagcaccatggctttctcaaatgattcagaaattaactcttttatttgcctctttatgttgatggtggttcggtttccagtcattgaagtagtaaaagccgtgaaacttgtgcaatggatggttggaaactgtcccgaggtatatctgtttgggttgtcctttagccgaggtgggcaaattaatttaaagtacgattaagtcagggaggtaagtaac

SEQ ID NO: 724804 - DNA, 261 bp, Homo sapiens
  misc_feature (38)..(38): n is a, c, g, or t
  misc_feature (77)..(77): n is a, c, g, or t
ggtttttgcccccccccccccgggatttttgaaaaggnccccggccccaaaggggtttaaaagggggttgccccttngaaattttaaaggtttggccgggaaaaaccctggtttttgggggggaggggtttccttccaatttcccccccccaagggaaaaggcttccggttaaatttggttttttttaaaagccctttttttttttttgggggggggggccccccccccaaaaggttttttaaatggttttttgccgccca

SEQ ID NO: 724805 - DNA, 1150 bp, Homo sapiens
  misc_feature (591)..(591): n is a, c, g, or t
  misc_feature (743)..(743): n is a, c, g, or t
cccctgttccccagataatcccctccagtcagaaccaattttcccaaaattaatgtttcttccaccggacccaatgggaaaagtccccccccggcaccaaaagttaacttcaaaagcccaagccctaaaaagatggttcttcgaatttgccttttgtgatccccttactccccccaagtacctgccacggtccctgatattgaggccagcacccgcgaggtctcccagatggatgcccaccacagcggtcttgtataacctcggggaaccttagtcactatggaaccccaaggtgttttttgacgcacgaagtctgtgtcttgtaaagccaccactccaacgaggtggaggagctctgttttctaatggtgtgaagaagagacgaaaatggtggtggaacacacagctgtgccaagagaatttttggggttttttttggaaagggaaaggagggagaagactcgcttttaaactctttgtgtccgtcgccaccacacgcttttgaagattttttggagacacacacatagacaccccccctcatattttccccttctctcactcacgctcacgagaacctcataccctcgncacacacacaccccaagggggacaccacgcgtctctggtgtgagaggtgaacacccacgagtgggcctctcttgtgttctcccaaagcgccacacacagtctgttctccacgcgctgagcaccacgagcctatatacactctccccaccccnccacgagcccacggcgccaaggggaccaggttctccccaagtgtccctcttcccacgcacaaacacacaccacgcggagaccacacaacaccactagccaccacacaaccgcgtgaaactcgtgagacctcgtgcacccctctcctctggtgtctccctcccctctggggccctcaacacgggtaacacacactctacctcttggcccctcggttttgtgagaaaaattccgctgttcctcgagcccacttgtttatgttttgttcctaccacatttctatatttcacatacacattttcacaacacatttataaccttgtaaaaatatagagactgtgaataattattaccataaagtaatttaaaatatgaatttaaatattcctaccagtctttagccatggga

SEQ ID NO: 724806 - DNA, 117 bp, Homo sapiens
acccggcctgcctgcgccagccacatacgaaacacaggaatgagagtatctgtgttccaagaaaactttcttgagtcggaggcggtcgctctgttgcccaggctggagcccaatggg

SEQ ID NO: 724807 - DNA, 515 bp, Homo sapiens
  misc_feature (9)..(9): n is a, c, g, or t
aacgactgngtcctcagtctacattctagtggttctgaatatttggctggtctaaatgacaccacacggaagatgggtgatacctgaagtataaaatcctagtaggatcaggggtcaaaggctgtattggtttttaatatacatagatatggccatatggccctccagggcttacaaccttataaccgttcattcgttttatgaactggcatatagtgcttacttggtgctagaaactatatcaaatgttttacaaatattaactggtttaatccccaaagctaccggtaggggagaggtattattattatcacagtttggctgatgaggaaacggaggcaggagagatgaagtaactggcccaaggttcacctcaagtagcagagcagagattggaacccacacaatcgggatcggcggtgggctcttaatcacggtgtggaggcggtttttcccaaaccggaaacctacagggatggcaaatattttcacctgtcctaatctgatcagtgaga

SEQ ID NO: 724808 - DNA, 722 bp, Homo sapiens
gttctccctgatatgagcgtctccagatggcccccctggagaacatgtgtatgtaatccatggccgctctatagttcttatgatggcttctaagtatcaacaaacttgaaatagatcataactcgtatcatagatatatgtacgcctagcctcatcaggggaggcttcaagatggagttgagtgtacaatatcctgtcatgggtaacagtctagcccttactgcaatgtcataaggctgctcaacactcctgatttgacacacgcaagacagagacggaacgtcggacatatgcgatcatctgtaaaataatccaactaggagcataaatataacagacatagactatgcctacgagcacatggtcacacgattccatcctagtgctaaatacgagttgcaagcagacacgtcaatactgttctttgcgtcctaggtatactcattgagcgtaggttcatgccctatatagcctcctcaccaatatgactatttccatgcaaacaaaaagtcacagagcatctgtaacttgtaatcgatatttataagtacaatgaacatctgagtattcaagaatagagatgggttcaacgagaataaaaaatctttggtggtatgtggaatatatatgggatctatgctgtagtgagcactactagggggaatgtagagtaagtgctctacataatgggtgtaggtcctcccagagttattctgtggtcg

SEQ ID NO: 724809 - DNA, 337 bp, Homo sapiens
gtagacctcaagttgaagtccgtgggggttgctgctttcgcagcccatgcactgggacgagtgtgccggcagtcttgcttcgggggtcatctctgatcgttgtccttaactcagcccgccacctacgcaacagggtgcggggggatcgatgaggtgtgggaaccggtcccgaacacggtctgtgctcaccactataggtaatactgccagtacctgttactgtccattacgcacacgcgaatggagtggcgcacaccacgcgcactatggggggagatggccatcaccaccggcacaggcgttaaccgtctgctagacggcgcttgcacttttggga

SEQ ID NO: 724810 - DNA, 245 bp, Homo sapiens
gatatcgcacagcccagcctccgggccaccaccctgtgaatgtaggtcaggtggtgacccatcttctagatcagcttcacttcctcatctaggaagtgagtctaccagagaagtcacagagatgggaggtccgtgctgggcacgaacccaagggcatgacagatccaaacagggcctggtaacagctattattctccagggaccataggaagcttaacataggcgtactgggagttttaaccccc

SEQ ID NO: 724811 - DNA, 376 bp, Homo sapiens
ttttgttttttttaaggggttttaattttaatttttgggagtcggggtctcgctcggtcacccaggcgggagtacaggggggagatcatagcttagggtagcctcgacctccggggctcaaagatcctcacacctcagccttccaagtagtggggactacgggcatatatcatcaggccgggctaaattaactattttatttaaaagagatgtggtctagctatgttacccagggcgggtctcgaactccgggcttctagcaatcctcccacctcagtctccggaatcacggggattacagggcgggggccatcatgcccagctctaggtttaaaaatggtaggcaaggaggtgcggacgtgggggtaccggagct

SEQ ID NO: 724812 - DNA, 1314 bp, Homo sapiens
ggcactgatttcccctattctcaggctacaccgatgcatacaccacatgaaacatccgtatcatctgtaggctcatatcattctctctaagcagcagtcatattgactaatttggcatggatttagcacgaagctcttctgcttcgacagcgaaacacgtcctaatcagtcacgacatgcaaccctcctataaatctggaagttgactcatattggatgccccgcacaaccgtatcgacacattcgatagaacccgtatacataaaatctagacggacaaaacggaaggaatcgaatcgcctcctaagagctggtttctcaaggctcgagacccctattgggccttcctatggagttctttgcagaattgagaacacactgaacggcatctgaggaatctacaacaaacgagagaaaacaacaagaaggacgcattcggcggtcctattagcgaggggagtggtgcctgaaggtgatggaaccatcacatccgtaccttgcacacaccaccgggaccagcattctcgcacctactggggcatccatcagaggacttaaaaaaggccaatcgaaacgacataatgcgaaatcacaccttgggcctgttgtagccaaacgcagtaccaactctggtcccaaggcactagcagacagccaaactcaagcaagcatggagaatagtcaatcccgggtagggcacacgagctataacttcgggcccccccaaacaacaaaccacaagtcaccaaacagccgctcaaatttccaattccgattcattcgcctaggacagaggaccttggggtgcaccaaacagacttggggttccaaaagggtctagttgcggaaaccacctgggcctccaaaatgctggccaaaggcgtcgacaaccgaaacccaaacagcccaaacaacttatgggaccaacgaaacaagggccataatactgcacaaacaaactggtgatcacacacctacgctcctccattcccacgaaatatgggacttccacccatcactttggtagacctttctactagggcacagggcaagaaggggattagcgcccacgcggaccaaaggcgcatcagaccgggggacactcatctacaacacacgaaaagggcaaaatcacccatattaacgaccgcctcaaacgaagatcgagtgggacgagacaaattcaaatagaaacaggccccctacgtaggcttctcgagccctctttacacacggcctccaacttgggatcttagctgagtgctcaggcccaccaactggcccgcccaagcacaattctaaacgataccacgg

SEQ ID NO: 724813 - DNA, 561 bp, Homo sapiens
  misc_feature (123)..(123): n is a, c, g, or t
  misc_feature (201)..(201): n is a, c, g, or t
  misc_feature (417)..(417): n is a, c, g, or t
accaagattcggggagttcgcagggccttgatccaggtccccggttaccagtttgacttccccagggggaaccagtacgggttgccttgggtgtacgcggagcacccaggggatggcttattnttaagggccaccggcccttggggttccaaaatgcggctattggaaaaagggttttcacacccggtgggggggttcatnggggtgcccttggggggccaggaaagaatccctgctttcttaggttggttccccctggggtttttaacccgccagccgggggggtagcctgcgggttggggggaaaaccgggagccatttggttgggcttgacttgagggtcccctgccccgccagcccagggtgggggggaggtcttgcttttccagccccaaagggcagcggcatgtttacaanacacgttgggccctaggtggggtttcctgtggggggggccggccttttttccaggggcagcccccaggggtccgggggctgggggggggggggggggcccccggcgggggttcctccccttgggaaaaaaatttttttccccta

SEQ ID NO: 724814 - DNA, 1490 bp, Homo sapiens
  misc_feature (212)..(212): n is a, c, g, or t
  misc_feature (357)..(357): n is a, c, g, or t
ggtccgccccgaggagcacagagcctcgccctttgccgatccgccgaccgtacacacccggcgcactagctcgactcgatggtagtgatgatctctgctcggcgcatcgtcagtaaggagtggatcggacgtccggagagtggtcgcaatgcctggcattctcggggcgaacggatgcctcccacagggccggtcttccccttcacatctgntggggctgctccctaggctgacgcatggacgatgcataggttaggtgcatggcgatcgaacatagggcattccgtatggtggtgccgacggaagagccccgagtagccagatgcagcatgtgcgcatcacatcatacacacatgnaaagtatacgcgcacaatcgggagacagactggtaattcgtgtcggacctcaaacgttggagcacgggaccatagtgcaggcacacactatctttgggcgacgccaacaaacgttttctaacaaattcgaaggctgtgtcgttgtttgggcaatctcgcagaaggggagccctaacccgcaccgcttgcaatggcaatgaaccgggatgagtcgctcactctcattgtagaaacacgcgcaataaaggggccccaaacctcaggcggaaatggaaacggtaattggaatcgccgcgaaggcaatcgagttgattctcttggagggaaccctattttcgaatcaaccccgcgccaagagcggcacagtgttgttcacttttttggccgttaattcccaagcgggtctatgtttggccctacaattaccgccttgagttcaccctggcttcgtcacttaagagttcccgggctagaccccaacagttgtggattcaacttcagagtgcaaaattggggcaagcgttcccccggagtttttggaaccctgggggagcgcatttcgaaaccacaccaaaggaggagacatttgggttggtccctcatccatctacgtaaaacgtaaacgcgagggggcattaactttgtttccctccattaacctggaccgcaccatttgttaggccccaaattggccaccatgggcacggattttctcttggtgggaaacacccttgcggcgttctaggtggaccaccgcggagcgaaaagcgcccttggtattcttggccacctttaagggcccttccaatttgtgaaacaaggcgaagtttcgcccgtatcaacaccgcctgtaaaaagcaccggaaccgggggctattacaccctaagacaccttattttcggagttcgcccaaattgccgcaaccgggcgagccacccgtgacacgaccggggggggacaacagaaatttcccggggttggcccgtgtttgggaaacccacatctttgtcacacccgcgggaacatggcacaagggcctgtgggattgggctttgaaacacggtatacgcgggtcacccccttgtgggtagacccctcattcttcgtaaagggcgcaaaggaagggaaactg

SEQ ID NO: 724815 - DNA, 760 bp, Homo sapiens
  misc_feature (305)..(305): n is a, c, g, or t
gctcgggaagcctgacatcgtgtgccagtcctgccctgagcaattctctgaacgccgaccgcccctcgatgcgccacgggacaggaacaaggcccgagcgtggaaaggtcgcagagctagcgtattcgctctagaggatcaatcggcacacatagtatagcgaatgaattgtcctgaagaaggatcatctgtgttgcagacgaataacacactggtgaggactgcctcaggtcgaggaatggcacgtcaaggagtcacgaagtgattcccattcgcctggtgaatcggaccgatgcggtgtcgtngaagtgagggtctagagaaacggccagagttactggctgtctatatcgtcaccaatacctgtcacgagtgccaccttgcgagatagacaccaacaccagtccttctgagatatacatagtgcttgccacctctatatattgcggaggcgtgaatgtgagagattttgtgtgatttacacactgagaggccacgtgaccgtcagcatagtaagaatcgatgtggtagcattggttggactagtgcaacacatatcccagtgttggcgacgccattgacattgccactcggaatgtggtgggggtagggccgattgtagggtcggccccatttcgattggattaagttcccgagcgttgattggtcgcgagggctccccaacgaaaaaagcaaaggcgtaagaagtttccggtcccggagttgtgccactccggggaagggggaaataaccggaaaa

SEQ ID NO: 724816 - DNA, 715 bp, Homo sapiens
cgagagtcgtcggggtgtacctgcgttcaacagtgctcggagggaacccggcgctcgttccccagcccgggcggccgcccatagccaggcctccgtcacctcttcaccgcagcctcggactgccccaaggcccctcgccgccgctccagcccgcgcgcaggcaccgcggcgacgccgcctctccttagtcgccgccatgagaccggtccacggctcgcaggtgcgccagaattaccaccaggtactcaccaggccgcacatcgaagcgccagatcaacctggagctcgtacgcctcctacgtttacctgtccagagtcgttactactatgaccgcgaagatgtggcctggaagaacctttgccaaaatacttgcttcacccaatctcatgaggagcagggaacatgctgacgaaactgatgaagctgcagaagccaagcgaggtggccgaatctaccttcaggaatatcaagacaccagactgtgatgactgggacagcgggctgcaatgcaacgagtgtggcatcaacattatggaacaaaaatgtgaatcagtcactaactggacacagcacacaaactgcgcactggaaacaaatgacccccataaggtgttgacttccattgagacaacattacctgaatgagcaggtgaaaacgcatcacaagaatggatgacaagtgaaccaactagcgacaagaagggacgcgcagaa

SEQ ID NO: 724817 - DNA, 328 bp, Homo sapiens
  misc_feature (6)..(6): n is a, c, g, or t
  misc_feature (27)..(27): n is a, c, g, or t
  misc_feature (35)..(35): n is a, c, g, or t
  misc_feature (74)..(74): n is a, c, g, or t
  misc_feature (77)..(77): n is a, c, g, or t
  misc_feature (116)..(116): n is a, c, g, or t
  misc_feature (130)..(131): n is a, c, g, or t
  misc_feature (136)..(136): n is a, c, g, or t
  misc_feature (259)..(259): n is a, c, g, or t
  misc_feature (272)..(272): n is a, c, g, or t
  misc_feature (284)..(284): n is a, c, g, or t
  misc_feature (303)..(303): n is a, c, g, or t
tgattngcatttccctgataattagtnctgtttcnagttctttgacttaaacagagatccttctgagagaaatncanttagtcattttctatggtagggagaaatccaccataagncaaagaggccaganntaagncaaagaggacctgtgttctggcactggctctacagtgttgtggctgcattatctagggtaaacacgcccatgggactctgcctggatctctattgagccacaggacactgaaattatccattngcaggtctgcctncccgtgtatagnccgtctgtcctggtctggnctggcgggtaggcattacaccttcc

SEQ ID NO: 724818 - DNA, 241 bp, Homo sapiens
  misc_feature (2)..(2): n is a, c, g, or t
anttgtaaaaaaattttttatacacacaggatggactgattttcatatttcccaaatcagagtccactgtacatttacacagaattgtctttgcatgaagccccagaggggacagcctaaaaatgagtgtttctgtagcccccttatttttgcgtgatcaacaggttggtagaaaagcagctgccggtatgttaccctcaaggtctgagacagtagaagagtccaaggtgttttgacattc

SEQ ID NO: 724819 - DNA, 101 bp, Homo sapiens
  misc_feature (2)..(2): n is a, c, g, or t
cntagatttatcccggctacagcccaggggcagcagcagtagcaacagcagcgcgtggcgctaagttctgcacagctgtgggaacgcctcaagtaaagcac

SEQ ID NO: 724820 - DNA, 956 bp, Homo sapiens
  misc_feature (183)..(183): n is a, c, g, or t
accaaatatatgtttgtagtaataacagatagaagacaacttgtcacctccacaatgagagagtcaataagtgctatcagataggttgtgcataggtacttgaatatagtggtaaaagatgtcttctatgaatatcattgtagtactgtttaagtgatgtccaatatcttcgtatagcctccntatgtgtatgtgttatggtcatctcacattctaaaggcgaatgtttaaccaattctattgttcgttctcgtagaaagacatgatactcacgcatgcgcgctattagtgtcaaatagattgtagaggatagaggccgtcgtagtatcttttcaccatgcttatgtcactttcgctgaaattacatttgggcttaacataatttaatactccaattcgtaatatgcgagactcatttggtcaactaatacttcctgtgcaccttctatcatgacatattaaccaatgtgatgtgtcacgagaagtaatggtcttatccactttgctttgctcttaccacaatcatttttagccctgtaaatggatgcgccaattgatatatacgagatttattagtactttgcatactatctcaatgattcatttctcaagaatgttccattattttgattgtcatccttttcatgaggttttatggtcccctggattctgtagttcctttagtgtgtcattggatctctttattagtaacctaggtgatgttacccctgagaaggagtcgcgtccctttgttgtttgggttagttgatctgtgactttttgttcctttattgactgttagttgtttccggggcttagtaatgggaaccttaagttgttttaactcttattttgctccaattggttatcccttggggcccgtcttccttttcctgcgcgcctttctctccctggcttcctggcgcttccgtctcccggtttgaggggcccccggg

SEQ ID NO: 724821 - DNA, 1598 bp, Homo sapiens
  misc_feature (253)..(253): n is a, c, g, or t
  misc_feature (788)..(788): n is a, c, g, or t
gtaactaaactgtattgtagttgtgtttatgacactgatttattgggatggcaaaaacatttttttataaataaaaagtgtagttcacatttaaaattaaaacctaattttccaggaaaagtaatactatcagtctagttaatccagtaatcattatgaaaaatatattcatgtttcttacttaaagctgccaaaatacttccaactgtatttaaagttgtggtcttttgataccaaacacatgcaggagatngctttgtttaacttttaaaaattctattcaagttacccccggtacatggagaaaggctatacctaagactatacaaatattttttactcttcttcatgtgttaggcatttctaacggatagttcagtagtgatgtactttagtgtaataatccatacataagaaaaatacatggtgaccaaattattaaatatcatctagaatagctgctttaaagagttactttctaaacttataaaactcatcttctacatgttttctataattgggcatgccttattgtgtaacgtcacccttaatgttttcaagtcattttgggttcataaggacacattcaattctcttctttggtggtctcacaggccgggttacgagggcccatatggagaaaaggcctccttagaccctggttcacacgtcgtgtacacaaaggtcccggccatcgagcaaagcgagggaggacgttccacaatattgctcttgttcctctcttttcttttcctttcttatccgcatgctaaggataggacacgggntaacacaaagtaatagaaagaatacaacataacacacaactcaacgagcgccgagcacgaagagaggcaaacagaaaagacgcgaagcaaggagacaagaaaagacgacaagaaggaggaggagaacgaaaaacgagagaacgcagagcgacagacacagagcgacacagcaggagccacacaagaaagaaaagtgaagagaagcgagaggaaaacaaagacagagagaaggagaacagacgacgacaacaaggagaagacagagaagacaaaaagaggagaaagagaaagaaaggaaaggagcaaagaagcgaggagagagggaaaacaagaagagggtaggagaaacagatcgacaagaaaacagcgaacagaaagcaggagcaagaaagagcgcaaaaccagacgagacgagaaacgagaagacgaaggagcgaagaagcgggagagagaggacggaagaagcgagggacagagagacaaaaagagaagaaaaagaaaagaaagaaaaaaggaaaggagaggagaggcacgagagagtgctcgggggcggcggaggcggcgcgaggagggagccaggaggggcggagcaggggggacggcgaggcaggcgagggcgggcgagggggaggaggggggaagaggaggagtacagcggggtagacaggcgcagggaggagggggaggagtcgcggacgcgaagggcgggtcggagagcaggggagggagaggcaggagggatgaaaggacgggcgcggaggggcgcggaggagacgggagggacggagcgacggacgcgaggagcgcggg

SEQ ID NO: 724822 - DNA, 432 bp, Homo sapiens
agagcctccacacaggactcctccgtcattgaggacaccgagatactcgacagcgcacatgtgtctgcagctccgccaacttgaggcgcaagcgtgtgcacacggccccggtcattcgggctgagggtaccttgggcctcgtctgggcaccagacttggatgcacacctgtgccaggactctacagagacacgggcatctctgatgcgcatcttcagatgaagaggtggtggaggaaccttagagccgaccgacaccgatgtccatgggcaccacacgggcttaaagtcaacctctttgctggactgaggcccttagtcctgaagggcaagctgtgcccccggaatctctcaactgaggaaggagagctggctgagagcgagtcgagccacaatgagttcgcggtccagcggaccggctgcaaggtgccgct

SEQ ID NO: 724823 - DNA, 904 bp, Homo sapiens
  misc_feature (203)..(204): n is a, c, g, or t
  misc_feature (206)..(206): n is a, c, g, or t
  misc_feature (218)..(218): n is a, c, g, or t
  misc_feature (231)..(231): n is a, c, g, or t
  misc_feature (239)..(239): n is a, c, g, or t
  misc_feature (246)..(246): n is a, c, g, or t
  misc_feature (248)..(248): n is a, c, g, or t
  misc_feature (254)..(254): n is a, c, g, or t
  misc_feature (257)..(257): n is a, c, g, or t
  misc_feature (259)..(259): n is a, c, g, or t
  misc_feature (273)..(273): n is a, c, g, or t
  misc_feature (281)..(281): n is a, c, g, or t
  misc_feature (284)..(284): n is a, c, g, or t
  misc_feature (290)..(290): n is a, c, g, or t
  misc_feature (294)..(294): n is a, c, g, or t
  misc_feature (296)..(296): n is a, c, g, or t
  misc_feature (299)..(299): n is a, c, g, or t
  misc_feature (311)..(311): n is a, c, g, or t
  misc_feature (321)..(321): n is a, c, g, or t
  misc_feature (329)..(329): n is a, c, g, or t
  misc_feature (333)..(333): n is a, c, g, or t
  misc_feature (335)..(335): n is a, c, g, or t
  misc_feature (339)..(339): n is a, c, g, or t
  misc_feature (341)..(341): n is a, c, g, or t
  misc_feature (343)..(343): n is a, c, g, or t
  misc_feature (347)..(347): n is a, c, g, or t
  misc_feature (350)..(350): n is a, c, g, or t
  misc_feature (369)..(369): n is a, c, g, or t
  misc_feature (372)..(372): n is a, c, g, or t
  misc_feature (374)..(374): n is a, c, g, or t
  misc_feature (381)..(381): n is a, c, g, or t
  misc_feature (440)..(440): n is a, c, g, or t
  misc_feature (460)..(460): n is a, c, g, or t
  misc_feature (501)..(501): n is a, c, g, or t
  misc_feature (521)..(521): n is a, c, g, or t
  misc_feature (830)..(830): n is a, c, g, or t
  misc_feature (891)..(891): n is a, c, g, or t
ttcgtcgtcgccgtcgagcagcggtccctgccagcgcgccctccacctgcagcttcacctatccgatccgggccgggaacgacccgggcgtggcgccgggcggcacgggcggaggcctcctctatggcagggagtccgctccccctccgacggctcccttcaacctggcggacatcaacgacgtgagcccctcgggcggcttnntngccgagctcctncggccagaatttnacccggtntacattncnccgcancancngcagccgccaggtngcgggctnatnggcaanttcntnctnaaggcgtcgctnagcgcccctngcagcgantacngnagcncntnggtnatnagcgtcagcaaaggcagcnctnanggcagcnacccggtggtggtggcgccctacaacggcgggccgccgcgcacgttccccaatatcaancaggatgcggtctcttcgtncacccacttgggcgctggaccccctctcagcaatggccacnggcggctgcacacgaattcnccctggggcggcagctccccagcaggactacaccgaccctgggtcttgatgaagttctgagcagcatggactgtcaccctgccctgccgcttcctcccggcttccatccccacccggggcccaattacccatccttcctgcccgatcagatgcagccgcaagtcccgccgctccattaccaagagctcatgccacccggttcctgcatgccagaggagcccaagccaaagaggggaagacgatcgtggcccggaaaaggaccgcacccacacttgtgattacgcgggctgcggcaaaacctacacaaanagttccatctcaaggacactgcgaaccacacaggtgagaaacttacactgtgactggacgntgtggatgaaatt

SEQ ID NO: 724824 - DNA, 114 bp, Homo sapiens
atacaaggggccagtaccacaccccagaagcttgaggagaggctcttattgacccccagtgacatgcctctcctggaagtagaatttctattgttctctacctttgccacacct

SEQ ID NO: 724825 - DNA, 422 bp, Homo sapiens
ccaagaattcggcacgaggggaaaaggagagagtccatgtcctttaacatcttccctatgaatgtcaccatcagttacggttctctgactgccagcaataaactggctctaacttaagtaagaacaaaaggatgccagggtaacccactggtctgaaagaagaattgaatgacaagcatagggtacaatggtaaccagggcagctctgaggactttggcctgaggaacttgctgaccatcaccctaagtgcacccttctcatgactcaatcccaactgccttttgttactgtgtgtctctactcaagaaagagaatctgattggcctggcttgagttacatgtatccttgaggcctggggcagcaggggtactgtgggaaagaggggtgatttctgcccacccaccaccaaccaaaaaccca

SEQ ID NO: 724826 - DNA, 372 bp, Homo sapiens
gtaggtggaatgagttagatcacagccattggcatgccatttggggtctaagagtatatacacagctcagtagtacatggagttgattcacagatattccacagccctttggcggctaggagtttatacacagctcagtactccctggagttgggtcacaacacatggatcagtcatcaggggagactaacactctatatacagttcagtactccctggagtcggtcacaagacaaggtaaagccatagggggctaagatgtctatacacagctcagtactgcctggatatgatgccacctgaggtgtatactacttggggatccgtgcacgttaacgattactaggactatgcagaaaccagagagtttaa

SEQ ID NO: 724827 - DNA, 172 bp, Homo sapiens
acatggttgtgggggcagtgcaccatcctggccaggttatcatagcggagggatcccacactggcatgggagttctgagcacatgcccggagctggggctgggcgaggcttggggcgagatgggaagaagtcttcctggaggtggttactttagagcaggttctggataaga

SEQ ID NO: 724828 - DNA, 156 bp, Homo sapiens
  misc_feature (1)..(1): n is a, c, g, or t
ntccggacgccatctggatttatttcttgctcatttaacagttcaggatggtattctaggcttgtttttgcctctcttccacatggtgactcagtgattcaggcttctttcacattgatggcttcagcatctcctagactcatgtcatcttttaca

SEQ ID NO: 724829 - DNA, 198 bp, Homo sapiens
gtgcggattcttgatacgtgtgagccatatgttcgtgttgcagagtaggaaacacagttgagacatactgaggcaattacagaaacaacagaaagcatggagaattgcggtgataagggcttacgcttcatttcttatgctgtctacttttctgaccagtattttagtatttccatagaacactaccacattattatg

SEQ ID NO: 724830 - DNA, 299 bp, Homo sapiens
tgagctcaagtgatcctcccaccccagcctaccaaagtgctgggaccacaggcgtgaaccaccatgccccgccagaaaattaaatttaaaattttttttaataaaaaattagctgggcatggtggtgtaacctgcaatcctgcactccggaggctgagacaagagaaccactcgtgcccaggaattcgaacctgcagtaagccatgattgcaccactgcactcccgcctgggcaaaggaacaagaaagatcctgcctcttaaaaatataaaaataaataaaaataaaagattgcggccg

SEQ ID NO: 724831 - DNA, 877 bp, Homo sapiens
  misc_feature (16)..(16): n is a, c, g, or t
  misc_feature (64)..(64): n is a, c, g, or t
  misc_feature (107)..(107): n is a, c, g, or t
  misc_feature (114)..(114): n is a, c, g, or t
  misc_feature (116)..(116): n is a, c, g, or t
  misc_feature (124)..(124): n is a, c, g, or t
  misc_feature (130)..(130): n is a, c, g, or t
  misc_feature (148)..(148): n is a, c, g, or t
  misc_feature (182)..(182): n is a, c, g, or t
  misc_feature (208)..(208): n is a, c, g, or t
  misc_feature (210)..(210): n is a, c, g, or t
  misc_feature (268)..(268): n is a, c, g, or t
  misc_feature (359)..(360): n is a, c, g, or t
  misc_feature (451)..(451): n is a, c, g, or t
  misc_feature (492)..(492): n is a, c, g, or t
  misc_feature (541)..(541): n is a, c, g, or t
  misc_feature (552)..(553): n is a, c, g, or t
  misc_feature (556)..(556): n is a, c, g, or t
  misc_feature (665)..(666): n is a, c, g, or t
  misc_feature (670)..(670): n is a, c, g, or t
  misc_feature (672)..(672): n is a, c, g, or t
  misc_feature (674)..(674): n is a, c, g, or t
  misc_feature (677)..(680): n is a, c, g, or t
  misc_feature (683)..(683): n is a, c, g, or t
  misc_feature (699)..(700): n is a, c, g, or t
  misc_feature (703)..(703): n is a, c, g, or t
  misc_feature (710)..(710): n is a, c, g, or t
  misc_feature (749)..(749): n is a, c, g, or t
  misc_feature (775)..(776): n is a, c, g, or t
  misc_feature (798)..(798): n is a, c, g, or t
  misc_feature (803)..(803): n is a, c, g, or t
  misc_feature (805)..(805): n is a, c, g, or t
  misc_feature (815)..(816): n is a, c, g, or t
  misc_feature (838)..(838): n is a, c, g, or t
ttgaaaagtttgtaanatagaggctggtacggttcggaattctcgggatgtggcttcgagttcntcttctgtgacagccgagattacgcgctcttttccagctaccngttcttncncacagttntttttnttttttttcttccccttntctgctcatgcagggagcccaggaagcctccgcntcagagatgctaccgctgctgctgcntntgctgtgggcaggggccctggctcaggagcggagattccagctggaggggccagagtnactgacggtgcaggagggtctgtgcgtcctcgtaccctgcagattgcccactacccttccagcctcgtactatggttatggctactggttnntggaaggggctgatgttccagtggccacaaacgacccagacgaagaagtgcaggaggagacccggggccgattccacctcctctgggatcncagaaggaagaactgctccctgagcatcagagatgcccggnggagggacaatgctgcatacttctttcggttgaagtccaaatggatganatacggttatnnatnttttaagttttttgtgcgtgtgatggccctgacccacaggcccaacatctccattccagggaccctggagtctggccatcccagcaatctgacctgctctgtgccctgnntctntnancannnnacncccccatcttctcctnnatntcagctncccccacctccctgggccccaggaccacccagtcctcgntgctcacaatcaccccacggccccannaccacagcaccaacctcacctntcagntnacgttccctnnagccgctgtgaacatgcagagnaccatccagctcaatgtctcctatgctccacagaaagtg

SEQ ID NO: 724832 - DNA, 156 bp, Homo sapiens
aagaggggtgagtatcagttaattatcatagtactcaactgaatggtatttttgaactccttttttggtttttggtttttgtttctgagacggagtctcactcgtgtcatccaggctggagtgcagtggcacaatctcagctcactgcaacctctg

SEQ ID NO: 724833 - DNA, 140 bp, Homo sapiens
ttcttccaggattgctcttataaggggaccagagtgcacatactgatgcctacagaggcatctagagatgcacaggtgtagagatggtaagcctacaatgccagcctactggtatgtactaaggggggatccatctagta

SEQ ID NO: 724834 - DNA, 185 bp, Homo sapiens
ggtattgaaactgcgggaggggtcatgaccaaactgattccaatggaacagcggtggtgcctaccaagaagtctcagatctttcctacagcttctgatactcaaccaactgttacaatcaaggtctatgaaggtgaaagagccctgacaaaagacaatcatcttctgggtacatgggctctgact

SEQ ID NO: 724835 - DNA, 832 bp, Homo sapiens
  misc_feature (561)..(561): n is a, c, g, or t
  misc_feature (587)..(587): n is a, c, g, or t
ctagtattcacaaacacttctactaaacataaatctgtgattgtgatctctgaaagtcagtccttttatctactcaaaagaagacactaaggttttcagaaattaaattgctttttggaaaaggtgggagattctgggaacatagaaacttgaatccagttttcttcaactccacgtcaagacagttgcattgtgtgagaaaatagctacggccatttgtggtaaaatcacatatatgcaattatgtgaaactaattgtgtatatgtatctgtgtatgtgtgcgtgtacaatatataaactatcaatatttatcaaagtccgtatagctgctagcaatgagggggatctaggattctatcacatgatacctttttatgaggcctttgttctttccagtacatttgtcagctcgttcatgaaagagattcttaattatttactgaaatatcacaaaagtgatggtgagctaggttgccacattgatcctgataggtccttgacaaattcatattgactctccacaaataaaactataaggcagtttttcccattgtgatgcntttgtctacaatcttaatttgtaacntcttccaagaataaacacaccatatatcaattttttaacccatttaggtagaaatatgggtatatagaaaggaggaagcaagggtaacggtgagcagtggctaaatgaacaagaaacattcagtaagtatctcatcttccaaatgtataaactggggcagaaagtactttgttgaatcaatagttcgaaacagacatccagtagggccatcgaagggtccaaataaagcactgatggaagattgg

SEQ ID NO: 724836 - DNA, 536 bp, Homo sapiens
  misc_feature (21)..(21): n is a, c, g, or t
  misc_feature (28)..(28): n is a, c, g, or t
  misc_feature (48)..(48): n is a, c, g, or t
  misc_feature (65)..(65): n is a, c, g, or t
aaaaggtgcatttaaaaaacnagatgcngcttctgctaaaacactccnaaagtgcaaaggctgcnaacacggtacaagtgaaagtttaggactcttcctgtgtcactgtaaggcccaagaggacagagctacctgctgtcctggcccttgggcttctgaggaagagccaagcagacaagcaccagtctgattgtccccctcctctgaccctggcagctcaggccatcttggcagcaggagagttgtatcactgaggacaggcactgccaccctcatactcaaaaacagccttgaccatgcctggtcgtggaattaaaaatgggtatgtgttggtggggagggatagagggaagcctcgtttatacagtatatgttataagccatatatattaaaaccattaacagtgtatagtcccacggtggctcttagcccctcatgctcaggtggtgtggccagccatgtgctgaggtccagcctcacccttgagggcaaggagggatagcttgctctcctctggctcttggccaccagctcc

SEQ ID NO: 724837 - DNA, 298 bp, Homo sapiens
gggtctcaggaaaggagaagaggtgcggtggatctggaggtatataatcggtaacatgtcgagaggtgagaatagttatcggcatgtcttcctgggacaagagccaaaaaccttttccagccactgatactggttgatcttctagcaacataagcaactggcactggacagaagaaaaagcgagggactgggattttagcatgataaaacacacaaagaggcctctggtggaggcacagcatgtgtcagggtctggtggtcctcacaccattcattcccagagtttagcacacaccaa

SEQ ID NO: 724838 - DNA, 539 bp, Homo sapiens
taagttcacgtttgtgattattagtacattgttacatatacttggtgagctcatctgcctcagcatttaatcgataatacatgaattaaattaatgcaagttaaggaagcagtaattgagaaaggaatagactctttaaagaatcagaattctcaattcaggcagtctgtctctatcattgggtattctactccttcacaaattgcagtattgtcccaatagacagtggttgtttccactggtctcttggagatgacctgtacacagatagaaggcatccagatgccctctcatcaccctggtattctcgcgctaatgatctattaatcataacgctttgcttatattttttacttagtatggggcataatcgtatcattcataggattaagtctgggttatttctttgataagaactgaatgtggccgggcgcagtggctcacgcctgtaatcccagcactttgggaggccgaggtgggtggatcacaaggtcaggagatcgagaccatcctggctaacacggtgaaaccctgtctct

SEQ ID NO: 724839 - DNA, 686 bp, Homo sapiens
  misc_feature (329)..(329): n is a, c, g, or t
tggggtaagtcaactaggtttacagtcccttattttaaatggcctaagtttggacagcaggaagaaaacaatttttaaaaaattctcattacattagacgcacaagaatagtgtcacataaagaaaagtggtgtttagaaatacgtggttttcatatttacgcatgtgatattttcctaagtaaaatgtgccaaggtggactgtggaagttccagaaagagggaaaataatttaaattaagtgcgtgggtgactctataacacatatttgggtaaaagtgagtgcttccccctttctccagtggtcatagctcacatttgtggtccaantatgaggatattcgtgacttttacaagtcttgggttactcctttctctaatttttatacgtgaaactgtgaagagccacaagagaaagaacttacaccgagaaacatcgtgggaaaacagctgtgcaaggtgtgttgtcggagaggaaagcagttgaaattcgaagccgtggatctttataaccttgtgcggtagtggtcgtttatactcaagaatttgggctggcacctagtggccggtgggcaagggacacttgggttctaacgaatccaaactggtgcactagtggtctggccagggtctggtcgcagtaactgcgtcaaaggccaaagtcccaaaaaacacacacaacacacg

SEQ ID NO: 724840 - DNA, 175 bp, Homo sapiens
gagactgtcatctgggaacttaatgcataaacaaatctgtttaaaaaaaaaaaaaagtaactctttgacttcacttgcagtggtgtgtttgattctattttagactggccacaccattgtgcagtttaaaaatacgtagggaacttacataaatcttcaattgtatgaattatga

SEQ ID NO: 724841 - DNA, 489 bp, Homo sapiens
aaaattcagcccgccctaccagtgccccttccccggccagaggccctggtgaagaaagggagaatctgtccctttgtcctcccccagccccaaagggggtttaataaaaaggtggccggggtccggaacttggaggcctatggtttggacccctactcagggggtgccctccttcagcagggaagccagggtagcccccccgtccatcctgcccctggggccaagggcagccttcaggggcagatcccgggaaacccgggccccccccccgggggggttttggttgaaagggatccgccccccccaaaaccccccccagggttaaaaaaggcccccccccccggccaaaaaaagggcccgcctcttttgtcccccggggggggtccgggggaaatcccagccctggggggggaatttttttgggccttttccgcttttgccaaacccaaaaataattttttcccaaaataaatttttttttttttttta

SEQ ID NO: 724842 - DNA, 403 bp, Homo sapiens
  misc_feature (403)..(403): n is a, c, g, or t
ggcacgagctgacctgagacagagagtctatattgcctgtcttctgtctcgtgctccatcctactgttggcacgcctgtgctgcctggtccctgtctacctggctgaggatccacagcgagatgctgcctagaccacagacacattgcaccatgatcaggagcactcatcctgcaacaagatcaccaccaactctggttcagtccgactttaacctgatcacggagctgtatacacgactacgacagcatcattatcatcatctaatcactgagcatagctactgcctttgcgatgctctccatgtagaccaaggctgacactcacgatgagattatgtagagatcgaatatccctcacggcgatgacggaggctcagatccatgcaggctacaggagcatcn

SEQ ID NO: 724843 - DNA, 467 bp, Homo sapiens
gtcaggctcggaccttacttccacgatcacattaaaagctactcacccttacccggctcagtgccaacatcccatcccacagcatgctttgaaaggattaaagcctgttatcactcgcctgctacagcatggccttttaaagcctataaactctccttacaattcccccattttacctgtccaaaaactggaaaagccttacaggttagttcaggatctatgccttattaaccaaattgttttgcctatccaccccatggtgccaaacccatatactctcctatcctcaatacctccctccacaatccattattctgttctggatctcaaacatgctttctttcctattcctttgcacccgtcatcccagcctctcttccctttcacttggactgaccctgacacccatcaggctcagcaaattacctgggctgtactgccgcaaggcttcacagacagaccccatt

SEQ ID NO: 724844 - DNA, 250 bp, Homo sapiens
ggatagttctctgtgcagagcaggctgaagctatcaccatttgtatgtccggtatccttcgtatgttctgggactccatgctgagccgtcctggcaatctgagaccagagatagtcagatcagacccactaagcctgaccttactcattattgagaactgatagatgaggtcgacaacgctaggaagtgttggcacttttttgcacccaagacagtctgattccaggatccccaaccgcttacctgggag

SEQ ID NO: 724845 - DNA, 176 bp, Homo sapiens
aaaaaattttttgggcccaaaatgcccaacgaaattgttccaatagaatttatccaattttgatctttttatatttttctccccccccgggaaacagaccaaaaaacattttggggttttaaaaaaggaatttgtataaagcattactctttttcaataaattgttttttaattta

SEQ ID NO: 724846 - DNA, 590 bp, Homo sapiens
  misc_feature (564)..(564): n is a, c, g, or t
tgggagaaggaaatgaccacccataccttataatgggatttaaacggcactaggagttcgaacatggcttttcgtggtgaccatacggacctgacacatggacgaccatagtacaaaaccagaacgataggtctcatgtggtaggatgatgggccagaaactagccagaacgactgtcaaacgtccagtcaagaatctccagagctgcatgcttcactgcggagggacagggtgtgctctgcacttcaggaaagatgcctaacatgtgcctagaaatgtgggtgtcatgataggagatgatcgggtggtacatgaggggctgagcttgccaggcatatgaccatttacagagccctcttaggcacatgcgcaaacgggtgtatgaagatgatcgcaaaagtaccagatgcagttactcttacactacactgacacagtactgtgatcccacttatgcaacataccatcatggtcgttgttccacatccatgactgatgcgagctgggcaggagacaaactggccagtagcatcatgcacaaggaccacagtcacaagagggtgntatactcttcctacacaaacaagtta

SEQ ID NO: 724847 - DNA, 446 bp, Homo sapiens
agatataccagaatgtgcctctatgatcagtctgaaagagtgaaggctggaacaccatacccacatgggcctggaccggagtgagaagtgatagaaaagagcttaaggacagcttagatacccagtgagtagaatgccagaccatggatacccagagctacctgccatcaagttgttgggttcccaggatgtgggtgtgagagaaagaaagagagcatgtgtgtattgtagatgaactgtggccccaagatatatagtgttacagtaaggggagaagctgaagaacaacgactcttcccaagctcagcttgtctcctctcctgtcaccctatgagcccctgcgctccatcgggatgccgcgtcttgacggctccattgcaaccctggtctttctccagtgctaccaggcctctgccaaagcgcccggcacggtcgtctctgggtgt

SEQ ID NO: 724848 - DNA, 305 bp, Homo sapiens
  misc_feature (65)..(65): n is a, c, g, or t
  misc_feature (73)..(73): n is a, c, g, or t
  misc_feature (92)..(92): n is a, c, g, or t
  misc_feature (200)..(200): n is a, c, g, or t
aatagattcacattgttttgttaaataaatgtaccttcatctaaacaatagtactgatgaaattntgggtttnatgtgatatcttgtttttnaaatattcgtgaaaataaatgtgtaacaattatgagacttttttaaagtttgcccacataccaccttatacctcatgctgggaaattttggggttttttccttttttnagagacacgatctcgctttgtcacccaggctggagtgcagtggcacgtggattgtagctcactgcagccttgaactcttgggctcaagtgatcctccttcctcgg

SEQ ID NO: 724849 - DNA, 1094 bp, Homo sapiens
  misc_feature (662)..(662): n is a, c, g, or t
aaattagcccccgtaatagaaattaacttgaaccagcgtcgattcatgcgagctctcgcccacctccatcgcaacatctccgcatgatgaaacttgcggctcactccgttggcgcctgcctgattcctccaaagtcagccatcaggacgtagttcctatgccagtgcaactacgtcacgcagagcgcctcaaccgcgctttgtcatcaaatcgcgccatcgatcacgtgcgagacggtaaagttatggctgaatcatccgcgtaccttcacgccaatggcgcctcaagtattctttatctgcctcttcctacacatcagggctgaggcctatattacgcgatcattatcatctacatcagaaacctgaaacatcggcgattgatcctcctgcttgcaatccatagcgaacagcgcttcagtaggctatgtcctcccggtgaggccaaatatcattctgaggggccacagtaattacaaacttactatccgccatcccatacattgggacagacctaggttcaatgaatctgaggaggctactcagtagacagtcccagccctcagcacgagttctttacctttcacttcatctggcccttcattattggcagccctagcagcactccaactcctattcttgcacgaaacgggatcaaagaancccctaggaatcacctcccattccgtataaaatcaccttccgaccttactacacaatcaaagacgccctcggcttacttctcttccttctctccttaatgacattaacactattctcacagactcctagggacccagacaattttaccttagcaaacccttaaaaaccgtccaaataagcccgatggagattccaattggcttaaaatttccgaaatccggccctataaaacatgaaggaggcattggccccaaataaaatcaacccaatctataagaaatatcccactctcctgttttcaccgacacaggaaatatttcgccaaagcaacgttgtagcaaccaagagccattacatgaaagagcaggaagaacttacccgaagaggaagcatcaacacacagacacactcaatcacgcgctacaacaaacg

SEQ ID NO: 724850 - DNA, 191 bp, Homo sapiens
atctaaggatccccgacgaacggcgaatccctagcagcgagttagaactcggtgcggaccaggaatcgactgtcttattttaacaaagcatcgcgaaggtccgctcgcggttgttagacgccatgtgatttctggccagtgctcttaatttcaacgtgtcagaaatcccatgaaccgcgcgtaaactgcgt

SEQ ID NO: 724851 - DNA, 303 bp, Homo sapiens
  misc_feature (22)..(22): n is a, c, g, or t
  misc_feature (242)..(242): n is a, c, g, or t
gagagaactagtggtccttggntcagcagcaaaagcaccacctgggcactcattagacatggaaattctgggcctcaacccggacctcagcatgggaatccctgggggtggagcccggcggtttgtgtttgggcagccccagctgactctgaggcaccatcaggttggaggccacagtgggtgatagtccctgccctgtggtagcagccggcctccctccttcatttctgttattccatctncttcttaaaacaaccctgtgaggctggcagggcagatgtcgattttatttaacagatgaag

SEQ ID NO: 724852 - DNA, 123 bp, Homo sapiens
gcggtctttcagcagggaaaattgcgctggccatagctggtcttagtggtttcgccgtcgtctcggccggggagttcttcgaaactactggagcgactctacggaagcttccagaacagccgg

SEQ ID NO: 724853 - DNA, 174 bp, Homo sapiens
tgtgcccttcgatcgaagcgatcaggcgcatgatggcaatgccgaccatcgcgcagcagcagccgagcaggccgtagatggcgtagtcggcggcgcgcacgtcgatggtcgaggcagcgggcagcagataggcctcgatcccggcctggtcggccacgaacgcgccggccagtg

SEQ ID NO: 724854 - DNA, 403 bp, Homo sapiens
agtatcttctattctcatttataaataatagagtaaccctttaacacacataactataatatccaggcctggagatcaggtgatacaaattcaaggacgcaggcactgataactataagaaagggcattcaaaggttaacatgattcattctactctactttaagataattcagcataaactgtgctcctctatacttgacataggggaaatcaagcagcactaattattctgtaggtgggtttcttaggaaatttttctcccatacttggccagcactggtttctgaccttcaaaatgaagtctaacacttacctgctaagtcgtacattcctttatagctactcttctgtctttttcatctggtgatataaatgtcaatagtcgtgtttgtatcagttgtc

SEQ ID NO: 724855 - DNA, 625 bp, Homo sapiens
acattcgcccattatggccgtgggagcctgaagcgaacaatgtcggaagtctgaaacccacttatgcggagactcagcgcctgatggccgacgagcagcacaaggcgcattttactgcgcaggtgcataacttcatggagttatgttggaatgaatgtttggagaatccagggaatcgcctaaactctaccactgaaaattgtctcttccgctgggccgaccccttaattgacaccactcttgacattaccaaaactgttgcccagattgcacagataggagggctgtactccattccccaggagaatgacagaagcaaaggacttgttactaagcagaactaagggtcagtgtgggaaggctatcaacccattgtcagatcactatcaagctgtcatcaagtctgctgggctaaaatttaaagatgcaaaatactatactgttccttatgaccgatgtgggccactctagtcataccactttagaattgacgaagctatttttgcgccccaataaaaggttctggccaaattcgcccttaaggagtcaaatacaaaatacttggccgatttttaaaacgggttcactggaaaaccttcgcgtaaccaacttaatcaccttgttg

SEQ ID NO: 724856 - DNA, 348 bp, Homo sapiens
  misc_feature (50)..(50): n is a, c, g, or t
  misc_feature (69)..(69): n is a, c, g, or t
  misc_feature (269)..(269): n is a, c, g, or t
  misc_feature (303)..(303): n is a, c, g, or t
  misc_feature (309)..(309): n is a, c, g, or t
  misc_feature (333)..(333): n is a, c, g, or t
caaataaataaataaataaataaataaaaactttctttgtagagactggntcttactttattgcctgtnttgcccaggctgctcttgaactcagcttcaagagatcctcctgcctcagcctttcaaagtgctgggactacaggcatgagccactgggcctggtcaatctgtgtatttctgtgtcatgtttgcgtgtgtgaacagtcatgtttgtgtgtgtgaataaagatagaggggaagagatggctgtctctaagctatactgcctnagaatggggcttgctggggttttttttttaacantttcgnccaagatccacctcaaaagttaantttttgcctggccct

SEQ ID NO: 724857 - DNA, 208 bp, Homo sapiens
agccggtaccctctatgcaatctagagacagtatatgaatcatttaatactacagcatgaaaattgtattaggcgacatgaatgcgaaggtgggaaaagagaggatgtatagaccaaatctaggaattcatagtctacaccaagtgtcaaatgataatggaatacgcctcatcgaatttgccctagctaaaaatctttacatcaaaag

SEQ ID NO: 724858 - DNA, 139 bp, Homo sapiens
gctgctgggtgccgccgccgtacctgtccttcgtggtggtctctcgaggcgcccggtgtgcaggccggccggtggagggccgcccttggtccggcctggggtcgctgggggtgcgctgctctggtgccccggcccttct

SEQ ID NO: 724859 - DNA, 105 bp, Homo sapiens
gccttatgtgtgccactataaactctagaaactgattactacaggagatatcagagatcgaaaaaaaggtatgacatttgcagcacaggtttctagagaaaggtc

SEQ ID NO: 724860 - DNA, 839 bp, Homo sapiens
ttaagattacacactgcaagcatccccgtgccagtgagttcaccctctaagatcacctacgatcaaggagggacaagcatcaagcacgcagcaatgcgagctcaaaacgcttaggcctagccacacccccacgggtaaacagcagtgattaaccctttagcagatacaacgaacagtttaactaacgctatactaaccccaagggttggtcgactattcagtagccagccgaccgcgcgtcgcacggacttgacccaaggtcgaagtaagaaagcctgcgcgtaaaggacgtgttgttaggagtcacctccactcgcccatagtaacagctaagaactcagcctgagattgtgaataaaagctccagctatgatgatcaaagaaatagactaacgaaaggtggctttaacgagtaatctgaagcagcagcaactacgctacacgaacccaagactgggcacttacgtagtatcctcgcaccctaggtgctgtacgtcccctacaaatcctcagacagtgtaatatcgtctaaaggcgtgctcgccatagacactacgagccacagcttaaaactcaaatggacctggcggtgcttcatatccctctagacggagcctgtctctgtaagtcgataaaccccgatcaactcagcacctcttgctcagcctatataccgtctatcttcagcaaaacgctgatgaaggctacaaaagtaagcgcaagtaccccacgtaaagacgtgaccgtcagtgtagcccatgaagtggcagaaatgggctacgttttctacccagaaactagatagcctttgaactaaggtcgagtgttagcgaccctag

SEQ ID NO: 724861 - DNA, 116 bp, Homo sapiens
aaaaagttagaattgtttttccccagggtttatgggggggttgattcccccttcatccattgggtggaacatggattgggggtttgatagaaaaataaaccccgctttttattcca

SEQ ID NO: 724862 - DNA, 531 bp, Homo sapiens
tgcctcgcgagcgtgtatctttcacagtgtcgttggtctgtctgcagtgtgttttgtagtgttaggtaacggttcttcccttccatgtttagtgcttccttcaggagttcttgcaaggcaagcctggttgtgacagattacctcagcatctgcttgtctgtaaaggattttattgtctcctttgcttatgaagcttaagtttggtctagaagaggagaagaggaaggagactcgctcggaaccatgcaactacatggaaattgaacaactaacttgctcctggatgactcctgggtaagtgatgaggttgaggcggaaatcgggaggttctttgaaatcggtaggagcagagaggtggtgtgctggagtcttgaacacagctggggcggtgttgggagggaagtttatagcactgagtgctcacattgggctggagggatctcagattgacatcctaacatcacaactggaggaactggagaaccaggagcaaacaggctccagggctggcggaggacaggaggtggccgg

SEQ ID NO: 724863 - DNA, 725 bp, Homo sapiens
ctaaggcagccaggggtcgtggtcccaagaaagcatctgaagcgggtggcagtgccaaagcatggatgctggataaattgagcggctgtgtggtgtcctcgtcgcatccaccggtccccgacgagattgtagagagtgtctcgcccctcatcattttccgtgaggaacggacttaggttatgccctgacaggtagatgaaggtgaagaagattggcactgcagcggttcatgtacaagatcgatggcaaggtccgaacgtgagtataatgctatcgcctggcgtgggattccatggagtgtcatcagcgattgacaagacgggtagagcaatttccgtgctgatctatgacatccaagggtcgcttgctgtacatcgtagttacacctgaggagggcaagtacaagttgtgcaaagtgaggaaagatcttgtgggcgcaaaaggaatccctcatctggtgactcatgatgcccgacccatccgctactcccgatcccctcatcaaggtgtaactgataccatctcgagatggattgtagagacctggcgaagattactgatctccatcaagttcgacgcctggtaaccgtgtgtatggtgactggaggtgctaactaggaagaatgtgtgtgatcaccaacgggacgagaggcatcctggatcttttgagcgtggttcacgtgacgagatgccaatggcaacagtttgacagtcgagttccaaca

SEQ ID NO: 724864 - DNA, 348 bp, Homo sapiens
  misc_feature (11)..(11): n is a, c, g, or t
  misc_feature (58)..(58): n is a, c, g, or t
  misc_feature (134)..(134): n is a, c, g, or t
  misc_feature (192)..(192): n is a, c, g, or t
  misc_feature (211)..(211): n is a, c, g, or t
  misc_feature (341)..(341): n is a, c, g, or t
ccaacaaattntgacctaaccatattaaacctagtcaacctattattctagtacaaanccagcacatgggtattttccaacataaaagagttctaccaatacaggacccatgaaccattcttgaagaaaagttnctcagtaaggaaatctagccaagcaagcaacatgtacccataaaagattattataatncggaccaaagttaagtttncatccattcacatgtataccattaagatatataggaattataattacagaaaagaatgttacaaaccttcacaaagtcaaaaatatttttatatcagctagattcttctgtttcaatccataaaaccagngttttgg

SEQ ID NO: 724865 - DNA, 179 bp, Homo sapiens
gggggcccagtttgggggcccaaaagttgcaaaattcgttgaaattccccccaagtaaacccttagccgggaggcccccccctggtgccgccatggggtgggcctcccccccccccggggggtttttttgaaacatttatttttggtttttttcaaaaaaagttcaaagccccccccca

SEQ ID NO: 724866 - DNA, 173 bp, Homo sapiens
aggtgatcgttagagcatagcggcatcacgtgcggtttcttaatgtccctggtggcggataccgaggtcctcggaaggacatctggacaccactttctccgactcgacccctccaacaagcatcgcaggcactgtcctcgggggtacagaccgtggtccacagtcgctaccac

SEQ ID NO: 724867 - DNA, 537 bp, Homo sapiens
atgtactccgtctgagaccccaacattaacatatcgctgccatactggttacattgttcttaccatattcgtatataaatatcattgctgatggacttcaaggctcggattgccttctgtcctggatgcatatgcctaggtgacgtgtccactagctatggtaccttaagttctacacctgtgtcatcgagcgctgcctcttaactctgctcttgtacagtgggagtctgtgtgttttcttgaatgttggagagagcttgaccttgaagttatgaatttctcagcagctgctagtcgtgcttgctgggataagtcttcgatcttggattccccaaaaactatgtacgtatctgaagcagggcgcttgtagacatctggttttgtgatgcccaagaggatattcttagatttccgggtagggactctagtaactcctgtaaccggccgaaaagccagtttggacatagccttccgtgccttcttttcactccgactctgttttgctttactgactggttcttcatcgatttcagctgc

SEQ ID NO: 724868 - DNA, 783 bp, Homo sapiens
gggcgcaaacagaagtgcagcggtggcggcggtggttgcggccggcgggggctgcggagatggaggatcttgtcaagatggggtgcttcaccagctacccctgggaccgggaaatctaagctggaaacattgcccaaagaagacctcatcaagttgtgccaagaaacagatgatgctaatacagaaagctaaatcaggtgtacagaattggcagaaacgaacattgaagacctcagatcaaaacctgttactgaaggacactggtgatattattaaggcattaactgaacgtctggatgctcttcttctgaaaaagcaagagacttgagcaaccaggttgtctttctctgaaaaaaaaaaaaagcaacaaaacaaaaaaaaattttgcggggccgcgcctgcggcgctcaaggaaaagtgtttctagaacccacttcctcgtgttggggcgcgcgcggcggccccatgtgattggtcgtggaaccccttgggccaaagcggtggctcccagagggagaacgcccgggggccataagcgaccaactgcgcggttgggaggttctcccaccaaataaaaaaacgcgcgcgggcgacacacccggggctgtttcggaaacaatcccagagatgggctgtcgggcggccagacgggggtcctacacacaccggggtcccagcgaagcgcagagataatcgcgcgcaccagccaggaggggaacaagaaacaaacaacacagatcacagcacacacgaaagcagcacagacacgaaccgacacgcagt

SEQ ID NO: 724869 - DNA, 586 bp, Homo sapiens
  misc_feature (4)..(4): n is a, c, g, or t
  misc_feature (20)..(20): n is a, c, g, or t
  misc_feature (39)..(39): n is a, c, g, or t
  misc_feature (59)..(59): n is a, c, g, or t
  misc_feature (79)..(79): n is a, c, g, or t
  misc_feature (87)..(87): n is a, c, g, or t
  misc_feature (91)..(91): n is a, c, g, or t
  misc_feature (111)..(111): n is a, c, g, or t
  misc_feature (142)..(142): n is a, c, g, or t
  misc_feature (151)..(151): n is a, c, g, or t
  misc_feature (155)..(155): n is a, c, g, or t
  misc_feature (229)..(229): n is a, c, g, or t
  misc_feature (239)..(239): n is a, c, g, or t
  misc_feature (250)..(250): n is a, c, g, or t
  misc_feature (253)..(253): n is a, c, g, or t
  misc_feature (280)..(280): n is a, c, g, or t
  misc_feature (323)..(323): n is a, c, g, or t
  misc_feature (342)..(342): n is a, c, g, or t
  misc_feature (349)..(349): n is a, c, g, or t
  misc_feature (380)..(380): n is a, c, g, or t
  misc_feature (432)..(432): n is a, c, g, or t
  misc_feature (457)..(457): n is a, c, g, or t
  misc_feature (464)..(464): n is a, c, g, or t
  misc_feature (466)..(466): n is a, c, g, or t
  misc_feature (546)..(546): n is a, c, g, or t
tganttcaccatgcaggggngacttttatttgaaggcanaaaaaaccctatttgggggntcactcaaaaactgcaaaantttgtttntttntttttaaaaaaaaaaaaaancaaaagccaaagggcctgggaaggaaagganaagggtagngggnccatgtcaggctgaagtcaggccgcgtaggggaagcggacagccgcccttcgtgaggctccagtttcaggcgtnccagcccaanaggggagcccnccncacggcctggctgggtgctgagcaggnggtcagccttggctggcaggctggcgctggcaggcaggtcggnggcctgccgtccagccganaggcccncatccccaaagttaagccctaccaaaaaacnctcattctggtcccagtggcggatataggagaagagtccaggcccagcgganaacgcgtggaagtccccctgcagtngggagcncnccttactccgctggtcactcagccgccggaacaaggaaaggagggagccagggtcttcactctggcccttcacagtcatnttggcacttacagcccctgggatgtcagggaagctggact

SEQ ID NO: 724870 - DNA, 404 bp, Homo sapiens
ctcaacaatttaatgtaaaaagaaaactcaacatacacagggaacattagcaatatttatagtctggaataaggggggccttcgtaagaatggaaccaaattccacaaacaataagcataaaaagattcaggctgggcacaggtgactcatgccttgtaatccagcactttgggcaggctgaggcaggagaattgcttgaacccgggaggtggagtttgcggtgagccgagattgcgccactgcactccagcctgggcgacagagcaagactctgtctcaaatcaaaaaaaaaaaaaaaagggtccccctggggtttctatttaccttttttttaatcctttcacggggggagggccctttagttggctcccatatcttgcctatgcgaaccgcgcctgcgtta

SEQ ID NO: 724871 - DNA, 257 bp, Homo sapiens
  misc_feature (43)..(43): n is a, c, g, or t
  misc_feature (222)..(222): n is a, c, g, or t
accccctcctatctgaatccagatcctcctatctgaaccagancctcctatctgaatccagatcctcctatctgaatccagatcctcctatctgaatccagatcctcctatctgaatccagtgactgcgacgacaataaaagtacaaggccatccgtctcatttttgtcatcatggcggtctggattcagataggaggatctggattcagataggaggatcnggctcagataggaggatctggattcagataggagg

SEQ ID NO: 724872 - DNA, 297 bp, Homo sapiens
cacaagcttgggattacaattatccctagctttatcacttagtacgctatgaagattcacaggcaagttgcttccctgcgctgagccatacacttgagcgtctttggtactgatgaattaagagcatctagcttctaacagattgttgtaagaattaaataagataatccctataaagcacagtgcatggggcaagatgctcatctagacactatgctactaaaactcaccacggaaagtttctgaagcccatctagtccatgttctaccctatacaatgatctcatcttattcatt

SEQ ID NO: 724873 - DNA, 146 bp, Homo sapiens
  misc_feature (111)..(111): n is a, c, g, or t
ctccccctcctatctgaatccagattaaaagtacaaggccatccgtctcatttttgtcatcatggcggtctggattcagataggaggatctggattcagataggaggatcnggctcagataggaggatctggattcagataggagg

SEQ ID NO: 724874 - DNA, 251 bp, Homo sapiens
ttccttacacaacggttgacacggaaagcataaactgtatcaaactacattcacgcatcgggctcttcgtctaattctggtcggattcgcatggcaggtgttacttctgagcagtcttcaagagtttcttctgacgttgtttttggttcctctaataagtcttctggcttctcatcacaccgtatttctggctctttcacagaattttcatttggcatgctggcttcttcttcccagaactcatgaagacg

SEQ ID NO: 724875 - DNA, 125 bp, Homo sapiens
ccatgccaggtcgacccgagaggatcaccacacacaacaccacccatgccagatgcacgaccggggaccgacgtggcccgcatcttgggctggctatggcaccactagggccgcgctcttctggc

SEQ ID NO: 724876 - DNA, 627 bp, Homo sapiens
  misc_feature (476)..(476): n is a, c, g, or t
  misc_feature (593)..(593): n is a, c, g, or t
  misc_feature (615)..(615): n is a, c, g, or t
  misc_feature (624)..(624): n is a, c, g, or t
gcaggctgcttcatgatcaacaactgcaccaccctctccccagattcaggagatatcgccaatacgttgaaatcacgccatgcgatgcaagagcgcactttgcagcagtttttatgtcaacgacaagcgcgcggggaaatcccgccccactgtgacgtgacacatctggcagaattccttaattgtattattcaggggatgtcgatcagcgcacgcgaaggtgcatcgctggaaaaactgatgcagattgccggaacgactttgcgtttatggcccgaactggtgaaataagtcgcaaaaaaagcccctcagcctgagcgaatgaggggccaaattgcagagtacagccttgttatactttgttattcaaaatcagttgcccgttgctatctagcgggatctgcgtacccggatcgcggtccatgcggattttgccctgctgatcgccaatcttataggtcacatcataaccgagncattttttctgacttgtcatacaccgttttacaacgctgttgcgtagtcgtgtaagtatcgctttcctgggagagagccctgggatctggttaccggcatatccaccacccagcggnccccacaacagtgggcgacatntttaaccgngtt

SEQ ID NO: 724877 - DNA, 495 bp, Homo sapiens
atctccttccctgggcggccatggggggggcccccctcttttgtggaccgggggttttcttacacccggcccgggtgccctccggcgccggggcttgtttttttgaggcccttgtgtggggaggggtccccccccccttgagtggcacgcccttttttgttttctttgggcgggcccccgaagcgccaaatcccttttttccggggcctttcgacaagagagagtgtttccttgctcccccagcagggtctcgccagaacaaaaggggttttaattttttttcaactctttcacaagggtccgggaggggatgagtcttccccccccggggttccttctttcacatgccgggttttttgccggcccccccggcccgtctatccaacttttgcgtctttcccccccgggtaagggggttcccgcgcccccggggggggccccccccccccaaataccctgtttttttttggagttaaattttcgccgtgatatgcc

SEQ ID NO: 724878 - DNA, 216 bp, Homo sapiens
cctgatcagctcggtaccctctctccacactggtgacctcataagcaagagattttgggtacagaggaaagaccatgtgaagacgcaggcaaaggacagtcatctgcaaaccagggaaaggggactgagaaaaaaccaagctggccaatgtcttgatctcaaactcccagcctccagaactgtgagacaatcatttctgtgccagtgtggagagag

SEQ ID NO: 724879 - DNA, 170 bp, Homo sapiens
ctccagtgtcacggatttgattgtgcaggacggacaggaggcacccagcaacgtgtactcgtgcagcatggacggcatggtgctggtgtggaatgtgagcacactgcaggtgaccaagccgttccagcgtgacgaggtgcctgacgtccatcagactgcacggcggtcgc

SEQ ID NO: 724880 - DNA, 768 bp, Homo sapiens
  misc_feature (428)..(428): n is a, c, g, or t
  misc_feature (450)..(450): n is a, c, g, or t
gtggaaaaaaagcaggaatactgctactcaggtcgtacgagtccttactgtaggctcaacatgtccaggtcggtattcaacacgtgtaatgtccagtcaaccgttcagatttgcagcagaaagagaacagcccgcatgagtgatacgccctgtattccgtgaaatactgatggaaaatatttaatatagatagagtcagcgttgccagtataaagaatcgtatctctcatttataggcagagcgcatgtgtttggatattatcggaggaagtactgatagttagtattataatgcgtttaaaagacctaataaagcgttctaagtctactctttggtgagcctcctgcgtacaagtttcctgacggttcctacctctaataagtccacagtcaccctccatacctgctccctatgctgagccatgtangggatgcacaatcgaactctangacgaatgaagtcgctacttagcacgcatctaacagaaacttatctgttcaaaggactgaagacctgtatgctaaggacacaaagagatgacggcctccctaggttccgcattacttactccggttcctattcttgggttacggattgaacactgaccttttctgtcactcttcgtgcaagacaaccccataagaaagctgaaacctgcttcttgtgaaagcctatgattactataagacaggcacagagcaagaaaatgtattgaggcattgtgtctataaacaagacttggctggaatccccagacccacgacttt

SEQ ID NO: 724881 - DNA, 205 bp, Homo sapiens
tcatgaacgccatccgtgctggcacccgattcgagttttgctattcggagtcctcgacgatgcccacgactcttaccgagtcccatcacctgcctacccaccctttggaggacttcgccttcttaactcgcctgcgtcggcacggcattccggtgggtctgttctatcgggacgtctactggaagttcccgctctacggtgaggg

SEQ ID NO: 724882 - DNA, 254 bp, Homo sapiens
aggtacgtcaggaggcaggaacctgccagttttccttggtgcaaaaatttgaccctcggctgccctgcaaagggggagggcctgacccagaatgggggtcagcccacccccctgtttctgggggtcctgctcccccctccagctaaactcaactgatcatccctttgctggctgctccctgctgctgccccttccagggaaacccctagcagctgcccatgttttttgaaccaattaatttatgctatagctga

SEQ ID NO: 724883 - DNA, 525 bp, Homo sapiens
  misc_feature (509)..(509): n is a, c, g, or t
gaatagcggataggcggatcacttgagctcaggaggcgaggtgatagggagcaggatcgcgcactgtactcactcagccttggtgtcagaggaggctctgtctgggggagggatgggagggagaaaatcagaggatctctctctccagtctctcctctctgtggttccactcattttctgatacataagaatccctttttctctttgacttcttgtaagattatctgattgtggacctctgtgactaggtgccacccttggtgcaaggccgttagagaagtaggagcagtgaaagtgggggaaggaaattaaccctatcttaggttactttgccaacatttgactcctctctacaacctgcctaattttgttttgttttcctagttctcaggtagttgctgtttatattttgttgagaatttctagttgtgagcagaggaagaatggctgggcacttaccatgatagctccatgactttaaataccctattggcaactctcagatttanctgtgttggctggacg

SEQ ID NO: 724884 - DNA, 279 bp, Homo sapiens
cgatttattttacaatgatacttacaacccctggagctggggagacaagagggagagtttagagttaccagaatttagacttttagagaacggatttgtggacccagatttttcgacgagaaaagcagccagcatactagcatccaagtactacgagtacctctgaggggtcaattagctctgccaatatgtaaaaatgaatcaggaactagaagcaaaggccattacatgggatgaaaagttgttgccaggtaacactgtcacgaataagaaaacagg

SEQ ID NO: 724885 - DNA, 146 bp, Homo sapiens
gatgggtcagatggaccaaaagcagcaggatggtggcagatggctccattctagaagctgcatttgctccatctgtaaacgtaatcaattccagctgctgtcgcaccagtgcatgggttcacacagattgctctctggggatgcca

SEQ ID NO: 724886 - DNA, 176 bp, Homo sapiens
  misc_feature (68)..(68): n is a, c, g, or t
  misc_feature (70)..(70): n is a, c, g, or t
tgaggacccacgtatatgtaacttatttttaaggaaaaggggctggtattgtggttaaaatcattgtntngcagagtatcctttttgaaggaaatatacatccttataacacatcaggtagttttctcttttctgtatttaaattatatatttgaattaattgaatataatttgag

SEQ ID NO: 724887 - DNA, 412 bp, Homo sapiens
tttcttttttttttcagacagagcctcactctgttgcccaggccaggatgcagtagcacgatcttggctcactacaacctatgtcttccaggttcaagcgattctcctgcttcagcctcccaagcagcagggattacaagtgtgcaccaccacgcccagttaatttttgtatttttagaagagacggggtttcaccgcgttaaccaggatgctctctatctcctgactttgagatccgcccgccttggcctcccaaagtgctgggattacaggcttgagccactgcatccggccccttatctgtttctttgacagggacttgttctagcacccaggctgtagtgcagtggcgcaatcatgaagtctcactgcagcagtgacctctacagctcaatcagacctcccatgtcag

SEQ ID NO: 724888 - DNA, 665 bp, Homo sapiens
gggagaggcgataggggaactggcacactaagactgcgtaatagaacacaggtctatgcaagtccgtcagtcaccaggcaccgcccactgcgctcccgagcgcctcaggctgcagctctaatatccattgtcagcgccgttcccaccgcggctagcgtttccgaggtcagaggaaaaaggctctattcggccttcacggttgcatcaccctaatacagaccgtcctctcaagacccgccctcctgttacacagggacccatttcggagtcttggatcacagatgggcgggaactgccgtgacagaattccccccaaggtgttgagtatccatcccaacacagcatctggcttccctcccacctccaccgcagctcccacaggccccgtcgccccgttcatcggctgggcgctcgagacggcgccacccaagatcgtcccacccagggaccagtgtcccacagatgcagctgaggagagaagagccggcggcgcgggcaacgatcaggaataggatactgggacagccgcagctgccgaagcgcagcgcgcggtcccacgcacgacctgcctccgggacggccggacgggctggcccggagagagagaggaggatgcgcgccctcctcccagctccatctgcgggttaccgcctgggtaaagaccc

SEQ ID NO: 724889 - DNA, 158 bp, Homo sapiens
ccctgacttgtacatgggaaaatttaaaaaaaattataaaaaaaagaaaattatctgctaacttaatgatacactttatctttgaggagatatgtacaattggtgtatcctttttcacatgtaccggtacattttagcactaaaatttttttcctctc

SEQ ID NO: 724890 - DNA, 195 bp, Homo sapiens
gctaagtcacgtggtgctcatacttcatccccgccaccgtgcactccctcaggccctggacatcgagttgatgaaacgcctgagcaaggtggtcaacatcgtccctagtcatcgacaaaggcgagacacacttcaaccctgggaggcagagggtccaccttcaaacagggggatcaccgcagaaccttgttgtcc

SEQ ID NO: 724891 - DNA, 223 bp, Homo sapiens
gggcacacaggttagtgattcctcaaaacagttgaacacaggaagttaccatatgaggcggggtgcgtggtctcatgcgtgtaatcctatcactgtgggaggctgaggcgggcagactgcctgtagctcaggagttcaaaaccaggcggggcaacacagtgaaaccccgtctctactaaaaatcacacaaaaaattggccgggcgtggtgaatcgtggaaatg

SEQ ID NO: 724892 - DNA, 335 bp, Homo sapiens
aagtggtagatttagaagaagagacccaaaacttttgctagaaatcagcttttacgagagaaactcatggcctttagttgagaccacggagttaagacagcgctttggggatggatgccctcggtttctgaagaggaggcggacgaaggggaatgaagtaggccagtcgcgcgtctgctgagtcgcagcactcagactacgtgcacctctacagcaggtgcaggcccagttgtcaccctccagaacatctcccatggattctggcggtattactttcagttcagagtctgatatctgttggcattctgcaacttgcccagcatgtctcaatgcct

SEQ ID NO: 724893 - DNA, 902 bp, Homo sapiens
agcgggctgtcgggctcacagcgcatgttgttaccgaaccggatggcgcccgtgtcagcaggacgtatcgctacctgtttagcgaatagtctcacgatagctccacacgaacgatgatcacgcaaagtggcgatgcataaaccagtaactaagacaagctcactgttgggcacagtccctagaaggcctaacccttattggaggtgcttctcatgcgacacaggaatcgtgctgtgcaaaagagtagcgagttgaagccaatacaggccaaattctgccattacgcgaacgtgtgtaagggtccacgctgatcaagaatggcaagaagaatcacagcctatgtacccaatgacggttgcttgaactttatttgaggaaaatgatgaccgttctggcttgctggattgggtcgcaaaggtcatgcatgtaggtgatattacctggagtccgcgtttacggttgtcaaagtagccaactgtttctctacatggcacctatacaaaggcaacgaaggactagaccaagatcagtaacactacgttaactgcgctgcacataccagctggtacgctaactagcaacgtttcactaatggaccaacacagacgcaacacacaagattctcccgagacgcgtcggtgaactcggggcacataacgggtcgccctggataccgcattcacaaacgtgtcggcgcccccccagggactacccacgaaatgtctagtggttttcccccctcaatatatcataaaaagcggagtaacacactatacaccacacgtcttcaggggcgtaaaactacattatgctgcccatcattaagctagtgctgtacccccagggacgttggaaacaaatgggttatactaccgcgagcaatgacacagtgataaccacac

SEQ ID NO: 724894 - DNA, 897 bp, Homo sapiens
taaattagcatatcgggaattttctgttttgtctcctgctatgcttcagccttatataataaaaacacatacatataatgtaaatagaggcactttagatactttgatgactgaaatgaactttcttcacttgctttttagaatttcctaggtttagaaaacgaaaatgaatctatgctcatggtcgaagactgaaacaggacagatatgcattaaggtaaaaagcagaagtccccttctccatcctagcctccccactcccgtaggaaccatactccctcccgtccccacccagtgtcacaatagagcacacatgctcccgtcgtcataggtccctttgcttatggactttggaagatttctacattctgtctgacatacagccttaggagagaaacgtgaccccctcttaagatgatccttctcatcccagtccctagttcccctaactggcaatcctcattgttcttgtctcagtgatgtcttgatctgcataggcttgttccctctggaagttctagttgggtatcccatcattacatgtacggaatcatgcatccgttcacagtatcagtatcttccctatgagctcctgtgagtacaggtgcagatctgatcatccgtgatacgcccgcacctgtaggcatgaccacccgagtcggtgatgtcggacgaggcagaagggaaatgcccaagaaccggctgggaaaggcctccgaggtcaaaaagagacgggtccaggacccggcaccgtaagattacaacaaaggcgtaggagacacacagaagttgggagataaaatcccaagaagaaggtaaaaacctccggacaggggaggagggatagaaagaaagggagggaaaaacggccacaaaagaagacctaaaggaagataa

SEQ ID NO: 724895 - DNA, 971 bp, Homo sapiens
  misc_feature (36)..(36): n is a, c, g, or t
  misc_feature (273)..(273): n is a, c, g, or t
  misc_feature (303)..(303): n is a, c, g, or t
gcttctgggtatttctattgcgcgagtcattgatanagttgcgtgggcggcccggtctcgtcagaagaggggagatggtggcgggtcgctgaattaagcttccaagaatgatgctcgcgacaccagtttatctctattgtagacaggagtgggactgagtagctcaccaaggactatcccactcagtcattgctgacgtaaaccatcagatagtcgctgcccagggtgatatgcgtgaggctgtatagaagctaacccgtgcgggtctcccgntgtgcatagggacgagagtctgtgaattgntcacgatagggcgacgatgggctaacaaggcgcacagcaattgtcttcgtaatggatgggcgccacaaattctgagaagcttcttgagtgtctgtccatcctgcatgctagaagacatttggctcatacgattggctagatcccaagatgctgcaggtgggttgatggcatcgcacgcttcagttgacgcttgacgtggccgtgcaagtagtcttcgtggaaggcaggttgaagacctcgtaatgattggcagcgaaagggggtttacgagcgcccccagtactcgatcacttctgaggcgtatttcgcgcatcgagtcgcaatcccagacgtggcgagttgaacgaaggatctaaatgagattgctgtgaccgtgaagaaggcacgataacagtggaagcagaggaagctgctggagaaagtgtgccatgaacgctctgagctccaagctgatctcccagccgaaagctttctttgctaagatggtggtggatgcagtgatgatgcgtcgatgatttgcgtgagcttagacatgatttggactcaagaaggtacagggtggagcccctcgaggattctcagctggtagctggtgttgcattcaagaacgatttgctcttacgctggggtactgaaggtgcgatcccatgaaagtaccacaattccaa

SEQ ID NO: 724896 - DNA, 150 bp, Homo sapiens
gacttaacagttcgtcgctagtatgttaacctgttgtgatagagagcgtataatttaccaatagcgttacgctgtacgcctgagtacatttatgccattctcattcatcaggcacgacgaagaggagagctttgaactgttaacgtccgg

SEQ ID NO: 724897 - DNA, 893 bp, Homo sapiens
  misc_feature (515)..(515): n is a, c, g, or t
cgagctcccagtggattctattaatatagtccattgagacggaacttccagtgtgttcccgttgtatctcaaacgttttgttgtcagacactcactaaattatactgccgataataactcttagaccttacagtcgtagatctgttggaagtctatagtcttggtactactatgtgatatctgaactcacttccctcctgaggctttggatttgacccttgcattcgccctttcatgttagattagtttcgtacatgctcgtcactagaggtcaaatggaattgaatagacgtagattctatcccgccagtataccaatgcttatccatgaattcgaacttctatgcattgatcgcgatcattgcatgttcgataatgtgttaatgcctagttttgccctcactcttccttgcttctctcctgtccctccacctagctcgagatctattttagctaaacggattccatatagggtacaagttcgcagttgacacatcgagttataattgtgcaanaattgctgtattatatgatatattatgttgtataatagcagatctcacttatgatcgtccacagtgccaggatttgcacgtgggtgactgatcttcagatcatggtaccatattgcctcccgcggctcgcgccgattctcctgcctctgtctcctctaggtacgcgtgttgagttaccaggcacctgcctagtcgtgccctggggtattattacgtaccttcttacggagagaccagtggtctctccatgtagacccttggttgggtgcggactccctggtctcctggtggtccagccgcctcgggctcccccaaagttgttgcggtatcggcgtagaggtcgccggccccccttgtcatgcttttgtttctgcttta

SEQ ID NO: 724898 - DNA, 135 bp, Homo sapiens
  misc_feature (21)..(21): n is a, c, g, or t
  misc_feature (79)..(79): n is a, c, g, or t
  misc_feature (81)..(81): n is a, c, g, or t
gagccagagtaccttcctggncatcctgggcggagctaaagttgcagacaagatccagctcatcaataatatgctggananagtcaatgagatgattattggttgtgacatgggcgttaggatcctctaacgcag

SEQ ID NO: 724899 - DNA, 686 bp, Homo sapiens
  misc_feature (392)..(392): n is a, c, g, or t
  misc_feature (421)..(421): n is a, c, g, or t
  misc_feature (429)..(429): n is a, c, g, or t
  misc_feature (461)..(461): n is a, c, g, or t
  misc_feature (546)..(546): n is a, c, g, or t
  misc_feature (578)..(578): n is a, c, g, or t
  misc_feature (582)..(582): n is a, c, g, or t
  misc_feature (588)..(588): n is a, c, g, or t
tctctgctaggaccgaagggacgacccttctcccaaacgtcagaaacgaaccccagctggctggcctctccctgcatgggcccgcaggagagagggagggaaggtctgtccatcctgtggctagaaccggcggggaaggggcgcttctgagtgcccgggaggtcatcatgaagagcggctggagtgactgccctacccccgggatgcctatccatgcccgtggcctggggcagcttctctctgagctcctgaagggcgccagctttagcctcagagcctgtcgtgttctctgctgctcagccctactggggagcatgtctgtctccgcagagacactgccaggagctacggcttcgttcttcaccatgtttgtcaccagcagggcctgcatngggggtgtggaggccgagccggggcccgnagaaagcnaatatttcagatgatgggcctgccaagcaggngcgcacgttggagccaaagccttctgtgccagtcctgtgctagtctagggcacatatgcccttcggggaggcaacaggccatggntgtcctgtgggaggtgtgtgacctggggatgntggngggtcnccatcttactaagggcctcctggtcggtgcctaaaggtgcccctgttcgggccctgggggctttccgggagcccaaactgtttctaggggccccgttc

SEQ ID NO: 724900 - DNA, 336 bp, Homo sapiens
caacagattcgcactgctagttgtttgtaagctatgatatttctttcccactcttgatctgaaagttcccaaatgcactgcataaaaaatagatattccacggccggacgtggtggctcatgcctgttatcctaccactttgggaggccatgacgggtggatcacttgtgctctggagtttgagatcagctctgggcaacatggtgtaacggtgtctgtacgatgatatactaacagtcgtcaggcatggtatcgtgtgcctgttgtccgagtttctcaggcggctgatttgggaggattgctttaacccaggaggtcaaggcttcagtgcgtcga

SEQ ID NO: 724901 - DNA, 285 bp, Homo sapiens
ctttttccctttccccttccttccctccttttttcctcctccttccctcccttccttttttccttccatctggccttggtttcctcccttcccttcctcccggcctttttccttccctcctttttttccttccttccgggggtccgtggtttcctcccggcctttttccttccctcctttttttccttccttccttccgtttggccttgttttcctcccttcccttcctccctgcctccttccttgttttaagaatttgaaaaaaaagtttcccaggggttttga

SEQ ID NO: 724902 - DNA, 432 bp, Homo sapiens
ggtgagaccaggacccagagcaggggaggcaccgctgtctgcaaggtacagaaatgccagggctattgctcacttgaggctatctgcaaatgaagaggtgcccacactgccaattattggggcacctttacatttacattgaacagatgcttacctttaaacaaaagggaaaaaaaggagaagggttgtaagatatttatgagttaggaaaaatatcaatttatagtactttgcaggtaggtacagtaatagagcaaagtttaaagtggtatttttacttttaatcctttatatcttcaaatctcgggagaagaactctaacctcacttggagatagcatcaagtgaatgaagccaggcaatgacccacacactgcccttactgtcccccaccccacaccaaagacatgggcatgctttcatacacacaaac

SEQ ID NO: 724903 - DNA, 982 bp, Homo sapiens
gcttctttggtgggctagcatcttcctccgttctgcctgggcccgcctgctgggcctggaggaggcctcgctgttcagcctcgggggcagtatcgcgcatgtgacccgagggtgtcctggccgccgtggttgggcctgctgctgtcctgcttcggtggggcggtgcgtctatgtcttgagcccgtatcgatggaaggcgggcttcccagcgcggaagagcctggcctctccatggtagcttcaagatcgctgacgtggagcggaagaataaggcccggctcccagatggatgcgctcgtgccggccgtgggtggttcgcgcggtggtgtcttcttgtctggcgctggtgaagcgtcttccaggactgcaggctccggagcagtgcgttctggctacgatggcgtcggtcgcgtgggttgcagttgcatctgtgttagacgtgctgcgttctggggtcaggtctgccgcctccatctgcttctcggctttcgtccgtctgtctattgaccagtcattgtgtgtggtcccgtgtctctgtggacccgcttcactgtagaaggcttcgggtaggactccgggtgttcggtcctgtcgcatgagcacagatctttacgaagcgagagacggaggcgccacctctgtggcagcagatgccttgaggcaaggcccaggggaagatcgagggggggccccaagggacctagggctgtgatgtccagtgatggtgttgacactataacaatggagtccgtcacgactgaacaccctgtggcaatgattggccgtcgttaggcgcaagacccggtgaataatggcaacgacaatagaggtagaaagaactccgaaaggtgacacaggtctgaaaacacgaataaacgatccaaaaataaacaaatacataaaccaagtactaaacgtatcatgcaggaaaccctcacacaccatctaaaagacacacataaagacgaaaaagtcaaacaaa

SEQ ID NO: 724904 - DNA, 195 bp, Homo sapiens
tcagctcgaccgttctgcttctgctggggctggtgggttttgatctttccccttcttttcttccccttcttctttccttctttgatcttctgcttcctgcttctgcctgcttcctgcttctgccaagaatcttgcgctgatgtggtggatcctgctcagagtctagcgtggcagggcgtgctccgtcttaggaat

SEQ ID NO: 724905 - DNA, 379 bp, Homo sapiens
ctgacaatcctgggaacaatttttcagttaaatctcgcttccttgccactgtcaacgaattctctactggtaaatcttcacaggtgtcaactttcattatcatggcatctattggccatctattaaaggcctttacctgttttttctgtcatccagctaaatcttacactatttactttgtgctcaacattatatagcaaagaaactatggacaaaaatctctaggttcaatttatacttgatacctcagagcactggctggtgggaaggcattccatctaattcagactcagataagggaaaacgatcacacttcattacagacttgtctatggcccattcaagtacctttgaatcttgagcaatacacattgccagt

SEQ ID NO: 724906 - DNA, 266 bp, Homo sapiens
ccccctccccgggtatggggtttcgcgcctgtgttcccagctactcgggaggctgagatgggagaaacgcttgagtccgggaggtcaaggttgcagggagccatgttcacaccactataccccagcctgggtgacaaagcgagaccgtctccaaaaaaaaaagagggaaaatcgacggggcccaggggctcatgcctgaaatcccaaaatttggggagtctgaggggggaggatcatttgagcccaggatttcaacatcagcctga

SEQ ID NO: 724907 - DNA, 881 bp, Homo sapiens
tcagctaggatagagaccggagttcatcgaacgaggcattgcccagttgtcagaagaggaggcacagttccacagaatacgatcactgtagtgggtgtggacaacgttggtatggcgtgtgctatcagcattctgggaaagtctctggctgatgaactatgctcttgtggatgtttggaagataagcttaaaggagaaatgatggatctgcagcatgggagcttatttcttcagacacctaaaattgtggcagataaagattcattctgtgaccgccaattctcaagatatgtcagatggtaactgcaaggagtccgtcagaaaagaaggggagagtcgggtcaatctggtgccagagaacaatgtaaatgtcttacaaattccattataacctcagatcgtccaagtacagtcctgatagcatcatcaattgtggtttccaaatccagtggacattcttacgtatgttacctggacactaagtggattacccaaaacaccgcagtgattggacgtggatgtaatctagatactgcatagataatcgctaccttatggctgacaaaacttggaaattcaatccacagcagattgccatggatggataaggaaggaacatgggcagatcaagtgtggctgtgtggagtgatgtgaactgtggaaggtatgtttcctcttccaaggaattgaaatccagaacattgggatctgacatgatccgtgacaatttgggaaggaaagtgcataaagaaggatggattgaaagttggctattgaagatacataaggataaaaggatattacaaaatgggctattggattaaagatgatgaatgaatttaattgatacatgttgaaaaaattaagaaaggataatccgg

SEQ ID NO: 724908 - DNA, 707 bp, Homo sapiens
agccccaaagccagctccagcttactaccagacaagccggttagccaagaccaatttacccgaagataaagtataggcagatagaaatggaaaccgggcgcaagtagatatagtaccggcgaaggggaaagatgaagaaattataaccaagcgataagtatagcaaggaactaacccctataccttctgcataatgaaggtataacctatgaaataacctatctgcaagggaggacgaccagacaggctaaggaccgcgccgaaagatcgcacggagcgatgcgtatcacttaaacgcaaaagcagcctaaagacaagcaggtccagcaagcacccgggtccctaatggaatacgggcacaaaaagtaacggtcggggaaaacggacgtgtctaatgcaaggggtacaggcaaagaggcggcagacaacatacactccgtaaacccaggcatgcgcgcttggaggtacgaaacttcaaggccctccagggcctatgaggttccgcgagaacaaaggacactcatacgggaacaattacctttggtttcaaggttttcgcgagaagaacgggttatagattcaacaaaagttcaaccatgaggcggccccacaaaaccaaatggggaaaagaaccgcaccggtttccattccaaaaagaaattcccactcccaccttttgttgggttccaacagagaagtgttctgga

SEQ ID NO: 724909 - DNA, 929 bp, Homo sapiens
gaggcaggacctagggcttaaaggggacttctccttgctccattactaagaactgggactctccgatgagaagctggttgtctgaagtaaccctgcggttgttggcttaggggacataggtctgttattcgtcggattgagtggctctaatcttaggcatatcgagagctctgtctcaaccagttatatagccccatggatgatagaatacttttatagaaggagtagaggagcttaggtagtaggaagtgcctttcattgtaactacatttatgcaggagcctgtcagtatttgatatacacatgccatcgcgtagtgtgatactgctggtttagcttgacaagtcgtgcctatgcttcattgtctcctgttgtctttcaccaggaaggcgggacgacgcgtttagtaacggaggatctgggtgataagaagtcgcttgggcaagaccagctcgatgtggagctcttactcatgtcttggaggtgagctgaggaaaagtggttaccttgcatgtgtcttaaggatcttctgaagggtagactgatggaataacagtgatcatttgggaagtgctagtccctgttgtgctgtttagccgtgggtgatgtgtcccggttcgatcgtttggttgagctggccggattcaaatgtgggcgattgcataattgattgtcttcaaagtgcgaaggaccttattagggtgccgggggaatgttcgctagatatgcaaagagtggatggaatttgcactctttttggggccggcagtcaatgggcggaaccaaggtaagggaatacctttccagtaggacgggcctaatgaaaaggttgtggcgcccccggtggtggggcagagttccggaagggaaagaggggaaaaaaagccggggaagggacacaggctggcccaaaaaaggacccgtgcacc

SEQ ID NO: 724910 - DNA, 164 bp, Homo sapiens
aactgatacaatcagctcggtacctagaaatcgctgtcgccttaatccacagccgttttcacacttctagttaggtctacctggacgacaactcactacacgaagttaggtctacctgggttaggtctacctgggttaggtctacctgggttaggtctacctgg

SEQ ID NO: 724911 - DNA, 120 bp, Homo sapiens
cctcttctgcgctccctatagaacaccacagctgcccaggagcgtgaagggtttatttcctccatgagcacagcatgtgtgctcgtagagggcagagcatgggatgctccaaatccaggc

SEQ ID NO: 724912 - DNA, 373 bp, Homo sapiens
gtcagcacctgtgggtgctcttgagaacctctagtcgcctcttctaggaattttttcatctcatcctcagagaatcccacattcatagcagacccactcaaaccataggaaggcctcaccaagcaggggtagtccacagcctttgcaaattccagtgcttcattcaaagtattcacagctttccaaggtgcttaagccactttcagttcatccaagccatctgagaagatggacgcgatcctcagccctgtcgttctgcagggggcttgtgcccatgatcttgacaccactcttgtatagaggacctgacagggtgtgtggtatgtggcctacatctgatatgacacagccaccacatgcctcctgatgatag

SEQ ID NO: 724913 - DNA, 583 bp, Homo sapiens
aggccttttagcaatgaagatatgtttagagaagtggatgaaatagatgagataaggagagtcagaaaccaacttatagtgatgcgttggaaggttaatcgaaacctccttacccctatttaatggaggttaccttgatttttatttgatattaacaataccatatagcctgctttttattagcatttcctgatattcctttggccatatttctacttataacctggtgctattaatgggtttagatggatctcttggtatctgcatctcattggttattggattttgaacccatctacaagtctctgtcttttaataaaagaactttacccctttggaaaaaaaagggttttggtaagatataaaatgggaaaagggtaagtaatatgtgaatatcatatttttgaaagggaaaaaggccctttggtttttacaatatggggcataacttgggaaggatgaaaaaaaggccagcctctcggggggggggttatgaatggtttttttccttttggttggttggattttttatattcctaaaattaaccccccttttttttggtagaataataaaagtttttta

SEQ ID NO: 724914 - DNA, 143 bp, Homo sapiens
acggaacgacaaagaacgaaggtgccacgagagacaaggagaagcgtcatcctctgatgagggcagctgattccagcagtagctcatcagagtcctgagatgacatctggagtccgacggaggagcagtttaagaaccctgcc

SEQ ID NO: 724915 - DNA, 262 bp, Homo sapiens
agtgggagggggtgagagaggggggggggggggggggggggctggagcttgcggattggaacattttagcttattgaggagctcttcaaattagaaggcagcatgttccactgatgaaaaaacggggagggggggggtaggcaaaataaaaaagagatgagacaacggactgtgccaacaaactaaaattttacctgctgctatggataaaatagctttctttttagaaatactcatgttaataaactcctacatgcgacat

SEQ ID NO: 724916 - DNA, 1138 bp, Homo sapiens
  misc_feature (1138)..(1138): n is a, c, g, or t
ctggagcagaggcagcagccggacgagcatgcggaggcggtcgggagcgatggtgaagatggcggctggcgggcggcggaggcggcgtgtgtgcctgctactacggcggcggcagtgagggcgtgcctgggcccctaagcggctcaagacatgacaacgcctggctgaccagcacggaggctggcggcggtggcgggtggaggagccggtggctggcgggcggcggcggcggtggggagaactacgatgacccgcacaaaacccctggcctccccagttgtccacatcagggtgcctgattgagcggtgatggatggaaggcaagacgcttgtgggaggcccttgacaggggaggttatggaacccagtcagcataatgtggtgggtaatgccgtaagagaggaggacaagcacgtggtggaagtttgaaaggtgtgttggagggcttgcaaacgcagttgaactacgtcaggccgaacaaccaaagatatacagttgctgggtcccccagccgttgtaggtccaactacgtcataccagccacagacagatatcccagcctgggcgactcggattgagctccccggagccgttgaacaagtgatgctttcatcgtttacgcagtcctgaaaccccgagttcagttcagattcacgcactggatgttcctcgtgacactaatcttgttatccctttgctgggccctggtgccaggagcaacttggtcacttctgtccagccgtaaggaacgctgggacagttccagggacgcatgggtgggaaagttttggaccgtcagagtttcacaaggctgcacccaagctggtgcccgcgaaggtcccctccttctacacacttgcgagcgctagtcgaaccgatcgttcattgtccgttggggcgaggtggctggccgacggtcccatgggaaacggaacttacggacaacattaacatcgccagaggcgtgccccttacgcagaccggtccatatgtgcgaatcgtgttgttctccactgacacagctgcgcagccggggcgtgcagtacgctgatgcggcgacacgtcagcaagagggtaggtgcccagcgcgtggaggtccgtacccaggagtggtgacccacagggcgtttgtacaccn

SEQ ID NO: 724917 - DNA, 108 bp, Homo sapiens
aggtgggaaacgctattgtggatatggactctagaataggatggcgcggttatccctagggtaacttgttcagttggtcaagttattggatcaattgagtatagtagt

SEQ ID NO: 724918 - DNA, 120 bp, Homo sapiens
ccaccagttctcatgggctggcacctcagatctctcttctctccagctgactaaactttttttctgtaccagttaatttttccaactactaaccagcaactaaaggcagcttttctaaac

SEQ ID NO: 724919 - DNA, 517 bp, Homo sapiens
ctaggatagcctacgaacttccctttaaagaaagctacgtagatgcaggatgagtaaaaatttacaaactgaaacaggaacatggtcaaggtggagcacagtggcgtgatctcagcacactggaacctccgcctcccaggttcaaacaattctcctgcgccatcctctcgagtagctgggactacagatgtgcaccaccacacctggctaatttttttgtattcctagtagagacagggtttcaccatgttggccaggctggtctcaaactcctgacctcgtgacccacctgcctctgtctcctaaagtgctgggattacaggcatgagccaccatgcctcgccaattgagagctaatggttttaaagtgtggcacttccccatgcactctctctctcctgctgccttatgaaaaacgtgtttgtttcccctttaccttctaccatgattgttaagtttcctgaggcctccccagccatgtgaactgagtcaattaaacctctttcctttaccaact

SEQ ID NO: 724920 - DNA, 234 bp, Homo sapiens
ttgagcaaaggaattacaacgctttaattaaaaaatcacgagtggatgataaagctgtgtagaaactgaaactctttacaaactatttaataaccttggaatcgctgactgttcagaaactacacagtattggatcatgtggtggtggtgaacatgcatgaaagggattatggatgaatcttgcattgttctaggctgctccccagtgccacccagtctccgatggcaaagcct

SEQ ID NO: 724921 - DNA, 159 bp, Homo sapiens
gtaacgtcaagctcgaagtcacgcgcagatcacgccggagggcatatcatcctcgacgtggacatcaacaaggacagccgggggagacaggcttgctggatcgggatcaacaccaagcacgtgaagacccaggtactgttcgagaacggcggcagggtg

SEQ ID NO: 724922 - DNA, 113 bp, Homo sapiens
atggctttgttaatggcagacctctcggaagtggtccgcagcgcatcgtagacctggccaccaggtgtaatggccctgcgacatctctcgccagctccgctgtcagcaatggt

SEQ ID NO: 724923 - DNA, 144 bp, Homo sapiens
agaaaggtgaggtcttcatctccttcaggttaggattgatcaaaataaaaggtttaaacttgctctcagatgtcttacatataaatttcttatattggaggcatacacattcaagagagcaagagtgcacgagatctataagta

SEQ ID NO: 724924 - DNA, 214 bp, Homo sapiens
cttttggggtctttgctctatatcgtgaggctcggatatgtcgacttctgaagacatccaaacatcgggcgcctccatgacagtatttctgaagaagggtttcactacctcgcgttagaccttgttaccggcggggagcttgttgaagacattgcggccagagagtactacagcgaagcagataccagccactgtatacatcagattctggaga

SEQ ID NO: 724925 - DNA, 214 bp, Homo sapiens
agttaatttttgtatttttagtaagagacaggtttcgtcacgttggccaggctggtctcaaactcctgacctcaggtaatccgcctgcctcggcctcccaaagtgctggggttacaggagtgagccactgctcccggcctgatcttagacttaacgaccttgagtctgtgctttagcctctctcagcctcagaaactaaaactgtgcatggcga

SEQ ID NO: 724926 - DNA, 304 bp, Homo sapiens
atgcgggaaggcaagtgtgcgcgcagcttttccttagacaaaccattcgcgcaccatctcaggcggcattggatataacgtggatagacgataaccgtgcacgggacataaaacgatgccgttttgttcacccagccaaagacatcgcgcgcttccaagcgaacagcttccaattgatgacggccgcgcggcaaggaaagcgtccatgtacaagagaggtggcggcgaaacggccaagcaatcgcaatcatctctcctccgtgcttccgcccttcctcagcaacagcaagcgccgccagcggaa

SEQ ID NO: 724927 - DNA, 161 bp, Homo sapiens
gcgacaagcttttaagcattgattcacaccttgcaaaacatactagaattcacaggggagacaaacattacacatggtatggatgtggcaagggttttgatcaaaagcaacccttgcatgcatcatagaggcatacttgagaaaaccttataggtaattag

SEQ ID NO: 724928 - DNA, 172 bp, Homo sapiens
tcaacgctttatacttcacctattcagtcagcttaatgcatactaaaataaacgtgagacaaatatctagaaatgataggtgaagtattttctacgctgttttttaaaaatgcatagcagatgttccatgacagactaaagagaaaggacactaaaggattctactgcagat

SEQ ID NO: 724929 - DNA, 642 bp, Homo sapiens
gcattggttgatttataattttggtaaaggatcctaaaaccctgtattctttttctgtgccccataatgaccaaaaaagataaagaaaatgagagtaagatcaaaagatcaaactaaaacataaacagtctccttcctgtctgctttcttacctatctgttcacactttatctctttccctttctctctctctctcacatgcgcgcgcgcgcgcgcgcgcacacacacacacacacacacacgcacacacacacacacacacttgccccaacactgagaaataatcttgccagaattctggtttttatagttgttgtagtccgtttctctaaaaatagtcctgttttcatatgaatctaagagaacattaccggagaaaataaagttactcatttatagttactaataataagttagtgattaacttaccacaattggataaaatataaaactattcttcagcacatttatacctaaattagtgaagtccatttgtgaagttcatttggcatctgcagttaagagttaaccatgtataaaatccttcccaaagaacataacatcatttgttgtaagaccaaatccctttttaaggaacaatttaaaaaattttctgggtgaaactttttatagattgattcc

SEQ ID NO: 724930 - DNA, 193 bp, Homo sapiens
atcacttgttcctaaggtaagggacctcgtatggataggctccacgaggttcagctgtctctaacttttaaccagtaacattgacctgcccctgaagagcggcataacacagcaagacgggaggaccctatggagccttaaatatattaatgtcaacagtaccttaacaaaccagagtcctaaacctaccaaa

SEQ ID NO: 724931 - DNA, 285 bp, Homo sapiens
ctcgcttacgacagttgcgggagactatgggtatgaccacagtattcaaacctcctgtgcaggagaagtgatggagggtgtgtaaccagggtgcaggagacaaggtagacagtgaggcagaatatgtatcggggcatatagaccacgactccgcagtgggcctccctcgccaaagacagcctggggaggacggcaatgaagaagataaagaaaatcaaggagatgaagacccaaggtcagcagccacctcaacgtcggtatttttcgcaaactggtacggcgggg

SEQ ID NO: 724932 - DNA, 280 bp, Homo sapiens
  misc_feature (8)..(8): n is a, c, g, or t
  misc_feature (12)..(13): n is a, c, g, or t
  misc_feature (16)..(16): n is a, c, g, or t
  misc_feature (22)..(22): n is a, c, g, or t
  misc_feature (119)..(119): n is a, c, g, or t
  misc_feature (121)..(121): n is a, c, g, or t
  misc_feature (135)..(135): n is a, c, g, or t
  misc_feature (147)..(147): n is a, c, g, or t
caagccanatcnncgncgtcancaatgtggaagccgatcacctagacaattggggtaccccgcaggcgtacttcgacggcttcgtgtcgatggcaacccgtcccgaggtgcgctacgtngngactaatgccgacnatccgggggcanccgaattggcctgccgactggaaagcaccggcacagtgcgagtcgttacttacggagaatctgagcaagctgaggtcaggctcgttgaccttgacttaaatgggacgacggcttcggcgactctcgttcatgg

SEQ ID NO: 724933 - DNA, 330 bp, Homo sapiens
tctgtactgtgactacatgaatcacttgacatcggtagcctggaggttgcagtgagctgagattctgccactgtactccagcctggtgcatcagagggaggctgtctaagaaaaaaacaaaataaggccgatcaccttgtggctgtgcccgcccaggctgttttatgtggtaaaatcttgtaaagcgtagatttctcctggggttggagggagtcggactgttcttcactcattgtccaccccgtaatccgtgcctagccctctgaatcgatcgtgatttttcgccaagtttatgccctaattgcctcttttgccttgccttctggtgcc

SEQ ID NO: 724934 - DNA, 129 bp, Homo sapiens
agcacgataagaaatatgctaatgtattgtgtagctctcaggatggaaagataatggacatatgccttaatctgttattccatatagtcatcttatattccattggtataagcagcaagcagtgtatgt

SEQ ID NO: 724935 - DNA, 439 bp, Homo sapiens
ggaccattgtcgtacatagtcatcttatttatttatttatttattcattcattcatttattttttgagatggagtctcgctctgtcgcccgggctggagtgtagtggcgcggtctcggctcattgcggcctctgcctcccgggttcaggtgattctcctgcctcagcctcctgagtaatccccacaatctcagctcactgcaacctctgcctccctggttcaggcgattctcctgccttagcttcccaagtacctgggattacagatgcatgccaccacggctggttaatttttgtatcttttttttggtggagatggggttttaccatgttggccaggcttgtctcgaactcctggcctcaagtgatctgcctgccttggccttccaaagtgctggaattactggcaggcccatagtccatcactgatggaaacactg

SEQ ID NO: 724936 - DNA, 480 bp, Homo sapiens
  misc_feature (24)..(24): n is a, c, g, or t
  misc_feature (65)..(65): n is a, c, g, or t
  misc_feature (219)..(219): n is a, c, g, or t
aacccctaaagtcccgggtaaaanttttaaagtcccggatgtgaagttttaaatttttgccctgnccgtagtttggtgaaatccactagtgaaatttaaggaaaagtttggcctcccttataaaacaaaataatccctgtccatacatacccttgtataaaatgttttaaagaggtgtttatcctatattaagaaatcaggctgggcgcagtggttcanacctgtaatcccagcactttgggaggctgaggcaggcggattacttgaggtcaggagttcgagaccagcctggccaacatggcaaaccctgtctctgctaaaaatacaaaaattagccaggcatggtggcaggcgcctgtaatccccgctattcaggaggctgaggcatgagaatgccttgaacccaggaggtggaggttgcagtgaaccaagatggccaccactgcgctccagcctggctgacagcaagactctgtctca

SEQ ID NO: 724937 - DNA, 234 bp, Homo sapiens
  misc_feature (190)..(190): n is a, c, g, or t
aggtgtactgttccatgggtgaaggctctaacacggcctgtaaaaactgggtaaggagatgtaagagacatgggccaagtgctaaatggaggaagagggtaatggcagggcctaggaagggcagtagccagtgtgcccatggacgttacgaaatcacctggtgccgtggaatcttgaaaggcgctgcctngatttgcatgcaggctttttgttttttctttgggagaatgggag

SEQ ID NO: 724938 - DNA, 147 bp, Homo sapiens
  misc_feature (59)..(59): n is a, c, g, or t
gactacgggcgatgagtgtggagaggaatggcgtgctatatgtatgttcaaactgacanattagttttacgttgatagatatgctgagtagtgtgattgaggtggagtagattaggcgtaggtagaactagatgttaaggagggcgc

SEQ ID NO: 724939 - DNA, 115 bp, Homo sapiens
  misc_feature (105)..(105): n is a, c, g, or t
acgcctccacaatgcccttactctgtgcattcgtggagaggcccttcaccacctcaaggcccacggtcctaaacctaccttcccaaatgcatccgggtcagtgtnagtggagctt

SEQ ID NO: 724940 - DNA, 124 bp, Homo sapiens
agggttatccgctgtacatgttgcggacattggatattcgcgggcagcatcgggtcggggctgtaggcggtgcgtggatagctgcagttcctccccggtacgggaaggagctgttacgccgcct

SEQ ID NO: 724941 - DNA, 302 bp, Homo sapiens
  misc_feature (3)..(3): n is a, c, g, or t
gcnccgcctctcctgcccccgggttgcgccctcctgttgttccctgggggccgccccgtggtgcccttgggggggggttctgcccggctggccgcgggagcgtccgttgtcttcggctgcctggcggctggctgggatccgccgccggtcccccgttttttggcgaggagcgcgtcggccctcttgctgtgggtgagggggcccctgaagagttttgttatctatgtgtcacaagaatggacgataatgattcctccgacataaatctgactcccctcatagaaattcctttcatgaaagaa

SEQ ID NO: 724942 - DNA, 163 bp, Homo sapiens
gtgatgacagtgatgatggtgatgatggtgatgataatgatggtcatgattgtttggtgatggtgatggtgacagtgatgatggtgatgatgttgaaggtggtgatgatgttgatggtgagtgatggtcatggtgatggtggtgatgaccctgatgatggtga

SEQ ID NO: 724943 - DNA, 162 bp, Homo sapiens
ctatctgtatctacacttggaggcagcagtgatcactgaggtcggatttgagacagctgacacatatgaacccccgtctctataaaatacaaattagcgggcgtgtgcgcatgctgtatccagctgctggaggctgaggaggagaatgcttgacccggatgt

SEQ ID NO: 724944 - DNA, 916 bp, Homo sapiens
gccagctgtaatatctgcaggttgcggcgggtcggggcgagaaggctgaggggatctggcgtgtggagcgctaggatcagacgcccccgcaatgaccagctcccccgtctccagagtcgtgtacaacggcaagaggaccagcagcccccgatccccacccagcagcagcgagatcttcaccgccaggccacgaggagaacgtccgcttcatttacgaagcctggcagggtgtggagcgagactgcgaggcaggtgccgggtggcgagcggggctggctggatggagtatgtggatgaaggtccctaggccccgagcctgaaacgacgttcaagcccatcgacctgagtgagctgaagcgccggaagccacgccaggatgccaaagaagtcctagagcgcacccggtgcaccctcgcacggaactccggaagataagggatcacgaggggagaacgaaggagcctctgactgacgtccagagctgctgggactggcctggatatgggatcattgaagtggtcaggactacaggacaacgggcagcgccaacacctatccagcacttggcagcttcacaccagagcaggaaccacttttgcctggcatcgccggtgggcacttgggacaaacagcctggaggagcatcacgtcaaagaacagtaccgccttacacgaacccaggcccctgggccatcaatccgcactcgcgaaatcaaagcgttaagagaactggacaccatcacagtcatagtgggggcccgagggcgaatacatggacgcgagggacccaccccaacatggggatacacgaagggaagcccaaaggcaattgggcatcccatgggctggtagaccggaggactaagaacggtggaccacattgtgcacgagcagccacacaaaggaatcgacgaag

SEQ ID NO: 724945 - DNA, 1032 bp, Homo sapiens
tgatacctctctctcccgagggtaaggcctctggagccattacttccctgggtcgtgggctgtctccgaggtgtagggaggggctatgtgttggccatgagaaagttctcttaaggggcgtctccactggggacttctctgggagcgggggactgtgtcccgaaccatggggttcgaggcgggtgtgtctgcccatggggacgttggagactgtgtctcctcgggttatctagtggggaggggggccgtgtcatctactacgtgtgtaggggggtaggggggtcgagggtgggggggtttatggcgccgcgttcgtggtgcccacattggcgagttcgtgttaacttctatggttcgtgccactttcccacatgacatcgcataaccctcccgtggaagggcacccaacggacaaagcacaaaaaacgaaaacaaaaaacaaaaaaacacggcaaagagaaagagaagcgggaaaaaagagaaaagagcgaaaaaagaacaataacagagaaggagcaaaaacgaagaggcagcaaaaacggcgaaacgagccaggacgaggaggcgggagcacgagacgaagcgactatagcgcgcgcgggggcgagcagcgagcaagaagcagaaaaagacacgaagaagaacagaaaaaaacgaagtaaagacaagcacaaacgaagagcgacacagagccagaacaaggtagcgaagagcaggagagaacgagcggggaggagcggacgaggcagggcaagatgggagggaggagcgaggaggggagcaggaggcagatcgagaagagacacaagagaaaaaggcagggacaagcaatgacgacaacaggaggggcggaagaggagaggagcgacgaccgacgaacaggataggcgaaggaagagcagggcgagcgacccggcaaacgagcgaaaggcgaaagcaggagaagggaggggacgaggacaggggacggaagaacgagagagggagaccggcagcgcgaggcaggcagcacgaagacgagacgaagaaggc

SEQ ID NO: 724946 - DNA, 690 bp, Homo sapiens
agcgggtggtgttcaaccagcgcgcttgcagataacagctcgttattatattcctcccttgcggcgatgcgaatccgaggatcggtgtctgactcccagagaggcccagaaagcttctgttgaattgtcctcgtcgccgccccttgtcatcacgcaagaccaacaaaccctttggtatcatctgtgtaggggatgacaaccgtgacctagaccccgcttaccctgtgctcctcacgttgaggaaggcagcattgcgaagtgtgtggactttgctggatgaaactggtccgcggatgtataattcctagtgtgataaacaagagctgggatgcctaagcctgctcagagttgttcagtcataatatcacagtacagaagaattatattcctacctagagaggaattcatcccacatactatatttcaggcatctattggtgaatcccagaggaccgccgagttgtgattatcgagtccgcgtcttatgtccttggctcggacttcacgagagacactcacgtcgtgttcttatcgaaatattgttgaggttccatcgtgtcttgcttggtccaagtcgatctaatgggtcttctgacgcttggacattcaattctgccatggtcctagatcgtcggcatcctaggggaaagcctggtgttaccccactatatgcacgggaatcccagttca

SEQ ID NO: 724947 - DNA, 899 bp, Homo sapiens
  misc_feature (352)..(352): n is a, c, g, or t
  misc_feature (366)..(366): n is a, c, g, or t
  misc_feature (373)..(373): n is a, c, g, or t
  misc_feature (378)..(378): n is a, c, g, or t
  misc_feature (408)..(408): n is a, c, g, or t
  misc_feature (475)..(475): n is a, c, g, or t
  misc_feature (478)..(478): n is a, c, g, or t
  misc_feature (522)..(522): n is a, c, g, or t
  misc_feature (539)..(539): n is a, c, g, or t
  misc_feature (597)..(597): n is a, c, g, or t
  misc_feature (601)..(601): n is a, c, g, or t
  misc_feature (608)..(608): n is a, c, g, or t
  misc_feature (620)..(620): n is a, c, g, or t
  misc_feature (646)..(646): n is a, c, g, or t
  misc_feature (655)..(655): n is a, c, g, or t
  misc_feature (667)..(667): n is a, c, g, or t
  misc_feature (679)..(679): n is a, c, g, or t
  misc_feature (720)..(720): n is a, c, g, or t
  misc_feature (727)..(727): n is a, c, g, or t
  misc_feature (739)..(739): n is a, c, g, or t
  misc_feature (754)..(754): n is a, c, g, or t
  misc_feature (776)..(776): n is a, c, g, or t
  misc_feature (804)..(804): n is a, c, g, or t
  misc_feature (822)..(822): n is a, c, g, or t
  misc_feature (870)..(870): n is a, c, g, or t
ggctgcacgccctacgaggttcgcttcaagaaggaccactcgctgctgggccgcgttttcgccttcgacgccgtctccaagcccggcatggactacgaattgaagctgttcattgagtaccccacgggctcgggcaacgtgtactccagtgcatctggtgtggccaagcagatgtatcaggactgcatgaaggacttcggccggggcctatcctcgggtttcaagtacctggagtacgaaaagaagcacggctccggggactggcgcctgcttggagacctgctccccgaagccgtgcgcctttttcaaggagggcgtgcccggcgccgaacattgcctgccccaagcccantccttggacgccangcctgtnccacntgcctgcccaacatgctcatgggtgagtcntgagcccgcgccccccaagcgcaaccccccgggggaaccggggccctttgcctgccccgcctgcgcncgntcggggcccgggggcgcaaccgcacaaggccttgcgcaaagaanaaaaggccctcttccgngaggcccccgggacttcagaccgtaggggcgcgtctgtaagcgtggggcgagggaacnagcnagaggcnagcaagttggantggcgaaccaaggagcagagggcgcntgaaagcanacccaatgtccngccgggggggcnttcgcgggcgccgggggcacgcgggcggggggggtccgccntccgccngcccccaccctnctgggaccccaattncaaccgggaccacccccacccntgagttagccccccccagaaacgggtcngtcccctaatggccgctnctcaatgtcggttggcagaatactctgggcacagcgcactcgcccaanggatggcagttccgtgcactctaccactg

SEQ ID NO: 724948 - DNA, 129 bp, Homo sapiens
tagtaactcatttattgaaaacatattatctcacctttctcaaattgaagacgcaaaaaataaaagcgagctttattgagttgctagtgacctcggggcgagcgacgacacgcctctccacgctccggg

SEQ ID NO: 724949 - DNA, 198 bp, Homo sapiens
catgcttcgcgcacacggtcccttcgcgcatacactcctatcgccggattccagagctgccatagcccccgatccctgtctgtactcatatcaaccagatcaccttttctgtggtctgatgagcgtcggcctcgggcgccttaacccggcgttcggttcatcccgaagcgcctagttctcgcttaccataagtggggg

SEQ ID NO: 724950 - DNA, 102 bp, Homo sapiens
ccgattggtcagtgtcttcagctgctcccaggacttagacagatatatgctgcttgaggactacacgtctgatgacaaccctccctctcactgcactgaccc

SEQ ID NO: 724951 - DNA, 173 bp, Homo sapiens
gctgcttattgtggtgcctttccacagcatgacgtaattgctatatggattacaataatctgtggaggacaatagataacatggggaaggagattccaactgatgcaccctgggaggctcaaccatgctgacaaatgaggacaacaatgaccatgaaccgagctcatatgaca

SEQ ID NO: 724952 - DNA, 396 bp, Homo sapiens
tttattttaaatttgtgataattctgtgagatagctggatcactccattttatggggtgatggggaaaaggttggaatcagtaacttgaaatttagtttgaaaaatgcagagccagccagacgtgtttgctcatgcctgtaatactagtgctttgggatcctgagggcaggaggattgcttgaagccaggagttggagaccaccctgggcaacatggtgagactcccatctctacaaaaaattaaaaattagccaggtgtggtgatgcatgccagtagtcccagctattcaggcagctgagctaagaaaattgctagaacccaggagttcaaggctgcagtgagctgtgatcatgccactatactccagcctaggcaatagaacgagactctttca

SEQ ID NO: 724953 - DNA, 178 bp, Homo sapiens
gtggggggagggaggggcccttccccccccttttaatccccggggccccccagcttccctgggccccagggtttgtccccggaaaaaaccaatggcccgtgggggtgatggggaggcccccccccccctgtttaaaacccggggtcttaaaaggggttttttggccttttttttttta

SEQ ID NO: 724954 - DNA, 297 bp, Homo sapiens
  misc_feature (74)..(74): n is a, c, g, or t
ttgacctttggtgcactgcccacttcccagctccactggcccaagtctgagccggaggcccttgttttgggggnctgtgctgtactttactggggaggccatagaagatgatgacaattttgaagaaggtgaagaaggagaaaaggaggaattataaggtgacgaggatggagaatactatggttatgcgtaaattaaccccatggtgtaatgtttgtctgtcaattactcatacgatgtatttaagtaagccacttttcattccgtatacatctacagttgtgtgtcaatgtatag

SEQ ID NO: 724955 - DNA, 723 bp, Homo sapiens
tgatcatgacgcttggagaggttagccaaactcggacaggtgtactgctcccatgtcatgtaaacattacgacttgcagatatgatctcacagcactgactttcaaagtgcatatctgtacatgcagccgtaagtgttggcacttgttcacttttcaccacatgatcactgtgtcatgtataagacgagacctgacaaatttacgctgcgctgtgtcacactcatatgagagttaccaacttgtgcattgaacgggactttaccctacttggcctgaatagcttaactggtggagacttcttgctgtaacgcacaccagaaaattgtctgcgtaacagaacacacgccccacgcatatggcggacaattattatactaatgccatacaccaaactgccgcaggaccacgcgcgttcccagctgtcgtggtcccgtcaaggtatacggatttattcccatattcccaaaatgttgtgacttggggccgtacataggatagtgccgtagggactttgaatctgacgtatcaggaactccagtaatgggcgggtgaacaaatactatgtgtagcgcaaacagtactagtgcgataaatctaggagcaacaataatgggccagacattcaggtattccccgcggatcaacacatctgtttggggcacctactagtgcgttacacacgcgtgagtcgatcgcagatatcatgcaacgtagtacatcaa

SEQ ID NO: 724956 - DNA, 182 bp, Homo sapiens
ttgggatatttataaaagtaatagtacatggtatttctggtggcctctgagagagagagagagagagagagagagagagagagagagagagagatatctctcattcagtctctggagtttttttttttttttttttttttgaaaaaactttctggggggccccccgggggggaggggggggg

SEQ ID NO: 724957 - DNA, 1310 bp, Homo sapiens
  misc_feature (1)..(1): n is a, c, g, or t
  misc_feature (69)..(69): n is a, c, g, or t
  misc_feature (197)..(197): n is a, c, g, or t
  misc_feature (204)..(205): n is a, c, g, or t
  misc_feature (212)..(212): n is a, c, g, or t
  misc_feature (242)..(242): n is a, c, g, or t
  misc_feature (250)..(250): n is a, c, g, or t
  misc_feature (284)..(284): n is a, c, g, or t
  misc_feature (293)..(293): n is a, c, g, or t
  misc_feature (295)..(295): n is a, c, g, or t
  misc_feature (305)..(305): n is a, c, g, or t
  misc_feature (344)..(344): n is a, c, g, or t
  misc_feature (346)..(346): n is a, c, g, or t
  misc_feature (365)..(365): n is a, c, g, or t
  misc_feature (398)..(398): n is a, c, g, or t
  misc_feature (408)..(408): n is a, c, g, or t
  misc_feature (535)..(535): n is a, c, g, or t
  misc_feature (748)..(748): n is a, c, g, or t
  misc_feature (794)..(794): n is a, c, g, or t
  misc_feature (823)..(823): n is a, c, g, or t
nactggtataggtctggttgggtctcagatcgtggtaagttgcatggacggttgtagactgcggtggtnggtcgaggtggtctgtctgtggtgtgtaccggatgcggtcgttgcttaggtgagtgttgctagtggttcagggtgctcgtcgacgttacgataggttagcttgatggttggtagcttgcggggtacgnaacgggnncaagtgngccccgggattagcccccgggcgtttgctnggtcggtnaacccgccggcttcccgcgccggtcatcgcccgnggtgtgacntnccgccgcgcnccggcagactggttgtgtggtatcacaagccgccccacncnatattgggcggcgtggttntgttcgcccccctctctctgtggagttgacgcntgcgtccgtncctgagaagacttctttgttggtctgaggttagctctgtccgcgctcagaaaaactcttctctgggttgttgcgcgagctcacactatagttactggagggttgttctccgttcgtgcgctggtctncctcgtgctcatatttatggtctcgctgcggggtgtttctgcggcgccctctcttctccggccgccgcggcgttatgtaatggggtcggctctcctcttggcccacccttctgggggtggttatatcctttctgcctcaaggaggacgcacccgccgccacaataaatgtggtggaccgaggagtttcgtgtgcaaaaggcttgttcgctccncggtccgtgggataactcctacaaaacaccacggtgggagagtccntcgtgttctgttatcacttagagacgacnaacatatcgggccttaataacgagagtgacaatgatgttcccactagagagaagatgctggcgcgaagaatttgtgtgatacacggccagctattagtgggtgccgcgcccgccaacactgccgttcatgtgcgcgcacgaatatagagagcaccgttgtcgtgccgccacaaatagggcacggaaacatggttcgtgagtgccgcgccagtaatacatcttgtggggtgtccacacacacagaggtgtgtagtatcaatatatgctgcttccttaccacgggcacatgtacagcaattagcgtcgtgtgttctactaggaatattagcaggcttgccacccgccctggtaggtaattcttgcaccacgaatagcccctgtgcgagaaaaccccggctgcaacacatttgtggggggcgtggtcgtcccgcagttagaaatcccccccccatttttttgtggggggtattttttgccccacaaaaaa

SEQ ID NO: 724958 - DNA, 388 bp, Homo sapiens
gtgaataaagtgtgtagttatatatttcactaaaagtgaaatacccttttaatgaccaacattctttgagtgcctggcattgttttgcctaaaaagacctgcacatggctgggtgcaatagcttacgcctgtagtccgggcactttgggaggccgaggcgggtacatcacaacgtcaggagttcgagaccagcctggccgatatggtgaaattccatctctactgaaaaaaaaaaagaaattggccgggcgtggtggcgggcgcttgtggtcccggctgctcgggagggtggggcaggggagtccctggacccgggaagtggaggttgcagttagcggagatcatgcaactgcattccagcctgagtgacagagcgagactctatctc

SEQ ID NO: 724959 - DNA, 209 bp, Homo sapiens
tatttatacaagaacgccagtcttaacatttctatctctgatgtaaatgaagtaactggtcttaaataaaagaaatgcacaaggtctgggtactggctgctatgtgacggtcttaattaagtaaactaaggagtttcttttataaaaaaaatgacatgttggaaggcttcattttatggcacaaaacgtccggggggatccgagcgtcg

SEQ ID NO: 724960 - DNA, 172 bp, Homo sapiens
gaatggactgcagtaacgttagcgtttaggcgtacggccagggctattggttgaatgagtaggctgatggtttcgataataactagtatggggataagggatgtcagtgtagcctctgctggtaagaacgctgcggctaggccatctgtaagtcttgagaggcgaagagcct

SEQ ID NO: 724961 - DNA, 132 bp, Homo sapiens
tgagctcggtcccccatattctgattatctttcatttctgacaaccacttcctcaacctccccaccctacagagctgagcaaagaattcagttagactttctgcaatgtcagggcctctcctgtgaaattgt

SEQ ID NO: 724962 - DNA, 252 bp, Homo sapiens
tgacaagtctttgtggtttatactttggttatgatgggctacttttattgccttatggtcaccaactgtggcctgcattatttttttgaattttccatttatgaagttttctttttcacttactatatacttgacttttgtacatgctacctgatggcttaaaaagtggcatattatctgcttttggttaatgtatctttgtatgttcgtgtggaataccgtgtgtctaattctaggcagcacacctatatg

SEQ ID NO: 724963 - DNA, 709 bp, Homo sapiens
agctgagtggttgtgtggtcgcgtctcggaaaccggtagacgctggcagcatggactgaccagctgagtgaagagcagatggcagaattcaatagaagctttttcactatttgacatagatggtgatggagctataacaacaaaggaatgggaagtgtaatgagatctcttgggcagaatccgacaagaagcagagttacaggacatgattaagtgaagtagatgctgatggtaatggcacaatgtgacttccctgagatttctgacaatgatggaagagaccatgacatgacacagactgtgacgaagacaattagagaagcattccgggtgtttgataaggatggcaatggtatattgagtgctgcagaacttcgccagtgtgatgacaaacgttggagagaagttaacagatgaccgaagttgcatgaaagtgatcaggtaagcagatattgatggtgatggtcaagttaagtatgaaagagtttgtacaaatgatgacatgcaacagtgaaagagccttggtgcagaatgtgtcaactctctctgtaccaacactcggtgttatattgacctggacctctgttagtgagcttaatcttgtacaaggttcctccccttagtgtccacacaatttgcctgtcctcagtaaactaacggaacttcaatttcttcccatggtgttcctggcccttatcactaacgggct

SEQ ID NO: 724964 - DNA, 763 bp, Homo sapiens
cgaggatggccgtcatggcgccccgaaacctcgtcctgctactctcgggggctctggccctgacccagacctgggcgggctctcactccatgaggtatttcttcacatccgtgtcccggcccggcgcgggagccccgcttcatcgcagtgggctacgtggacgacacgcagttcgtgcggttcgacagcgacgccggagccagaggatggagccgcgggcgccgtggatagagcagggaggggtccggagtattgggacgggagacacggaaagtgaaggcccactcacagactcaccgagtggacctggggaccctgcgcggtactacaaccagagcgagggccggttctcacaccgtccagagggatgtatggctgcgacgtggggtcggaactgcgcttcctccgcggggttaccaccagtacgcccttacgacggcaagggattaccatcgccctgaaagaggacctgcgctcttggaccgcggtggacatggcaaggctcagaccacccaagcacaatgtgggaggcggcccatgtggcggaggcagttgagagcctaccttggagggcacacgttgcgtgcatgtggctccgcaagattacctgggagaaacgggggaaggagacgctgcagcgcaacggacgccccccaaaaggcatattgactcaccaccgcttgttctcttgacccaatgaaaggccaacccctgagggtgcttgggcccccctgaggcttttaccctgcggaagattcaacat

SEQ ID NO: 724965 - DNA, 746 bp, Homo sapiens
ctcccatgttagttctgaaggagtgttcaggacacaaatgggggagccctcctgcccaggcaattcccttagatgggtaacatgatcccggatagtaagggaaatccccagtcccatggagaggatgccttgtctgggaccccgccagaccagtaggataaccatagcgttaatgtcctctggaaaggttgaaaattccctgagatcccgcccaccgcattgtagcccaaattgtttattgctagcccccgcccagaatgggtatttccaaggcccggggctttttttattttgttttggtttgttttgttttttttcttttttgctacccttttttgggggggaccctttaatttgggcagacaatgctgagtatacttttctttcaccacccttgccaaccccggtagccctggagttttctttttttctcatcatcattgttttgttttttttatggttccagacttttgccatacatgaattaaaaataagccgttctttaaagcatagcgctctaaaaactattcttagtttataccctccaaagttgggtctttcatgaaacaccgtggtttcgaatatgaacccccgtagcattctcgttcgttgttagggtaagagagttttgtagaatgatctcccacaagaacccgtcctccaaaggcctttacccgtgatatcttttaatactcatgtttttatttaatgatgtaagatagaattaataaactactaaggaaata

SEQ ID NO: 724966 - DNA, 145 bp, Homo sapiens
ccaggattccttctcaccgcatacactcttctgtgcccataaatactcatttcaattaataattgccagaggaagagaagaaatatttgagtcacgacatgtagttccccttttagagtcatttatataatccagcaaattgcaa

SEQ ID NO: 724967 - DNA, 772 bp, Homo sapiens
cagaagttacaggaagggtttccatcaccttgagtggccaagctatttttgagtcaagaaaatctgaacctgtgtccagaagcagagtcttggcagtcactttataaatcataccacctataggaaggattaggtgataccatctgtacggggttggatgatgtcccctcaaaattcatggccacctggaaccttagcatgtgaccttattggaagggatccttgcagatgtcatgagttaagatgaggtcatgctggatcaggataggccctaaatccaatgactgatgtccttagaagaaggccatgtgatgatggaggcagagatgcgcgagatagagctacccaccaaggaacaccaagggtttctggcaggagcaaggaaggattcttccctagagcctgcagagggagcatggccctgctgacaccttgatcttggactttttggcctccagaagtgtgagacaataaacctctgtgtcttaagtcctgagtttctgatcatttgtgacagcagcctaggaaggtagtataccaaaatagccatttccacaagtggggaacaacccaggcggtcttgtactgcccagacaatgatgctccctggagtcacgtaagtggccttctctggaattccccatatccggcccggggtcagactcaggggttgctgtttcttaacctcagaagcaagtacttcagggctcccttcagagggcaataagagtgggggcctcaactccctattggggcacatatgggcagatga

SEQ ID NO: 724968 - DNA, 207 bp, Homo sapiens
tggtaccgaatacgggaggacaactctaagaggcataatcgtatattgtcctgtgttcacgcgagaagaaaatgagcaaggcgcgaggttaggtaaatgtgctaggggtacatcattggatcatataacagcaataagaatttgtgtcgttgtgcatacggtgcttcctgtgtagttcaaatactattctttattatgggaaatggg

SEQ ID NO: 724969 - DNA, 253 bp, Homo sapiens
ttacttgtgtagtaataattgtgtccacctatgatcaccatatgagccacgactccctgctattgcaataatcagtctccggagccaccctgtgatcataagccatctgccattctgatgggcaccatgtatctagttgcagagtcccgaagtttcatcagacactgaaagcaatccatgaccgtcgtcaacggtctccatgtgtctcccatctttctgatcatagcgccatgagtgtctccccactactagg

SEQ ID NO: 724970 - DNA, 748 bp, Homo sapiens
  misc_feature (496)..(496): n is a, c, g, or t
  misc_feature (521)..(521): n is a, c, g, or t
ggcacacatctcccgcttcgttgtttagctccgccccccgcatccccccccgtccttcgtctcctcacgtgcgggcgtatttgggcccccccccccctctcctcaagccggtggttgtctcctttcaagtagcaacgcgtggcaccacagcagattgtatcccgctggtttgtcctccacacgacgggtttcccgacagcgctcgggtggcacacccactcgcagatatgcggggagactcttgctggaggtgcgcccttctccctctcgcgagagaaaacaatgtgggcagtgagcctcgccccccccagaccagggggtagccgccctcccgagtgcaatgcttttctgggaccccgtggctcctctccggcgtgaaagagagttgccccccctgctcgccacacgctgtttggcctccccccgtagacgagctgctctccaccacacgttcttggggtccaatatcgtacacaggtgcgcgcgccacatgccncgggggagcttatttgcttgccccnccgcaggagacatagtggtctccccccgcccccccgttcgcaaagagagaggagcgccgcaaagctactggccggcgccccaaccgagcccaggcgaggccgaagaagtggggcccgtggcgacacacgacatccaggatgcctttgttaggtgacctacgaaaaatatggtgggccggaggaagttcaaaccccaacaaccatcgaaccagaccaataagcccatc

SEQ ID NO: 724971 - DNA, 626 bp, Homo sapiens
tggcccaatggagtctttcgggggatcttacatgggaatctttcttaattcctcttaaaatccattaaatgttatctggacaatattcctgggatttgggaagaaatctgggatgtaggggccgtatgaaaaaatccattccgaatatcagattaagggggtataggggtcgggatagagaatggttttaggaaagaaagatatggtaagggcaagataacataatttggtcacattccaaaggtataaaaccggcgtacttttttccctaagaaaaggggaacgctcatttatagggcagcctaaaccaggtaaagattttcttcctcctcacaaggtgcaagattttggtaccttctcggttggtcaaaacatttcttgggccctatggcttggccaagagtggattataagaaagggaatgttaccaatattttttgtggaagaacaaatcacttcctggattaaaattttctttaagacaattggagtaactcattttataagagaagagaattttacatggtgatttaaggctcgtgggtctcggcccctttggggggtccactctttctaccttctttccattcacttattggctaacatttttaggaaggtaataatcg

SEQ ID NO: 724972 - DNA, 851 bp, Homo sapiens
tcccaaagtgctgggattacagatgtgaaccaccgagcccggcctactttttgtatttttagtagagatggggtttcgccgtgttggccaggctggtctcgaactcctgatctcaggtgatctgcccgcctcggcctcccaaagtgctgggattacaggcatgagccactgcacccatcccgattattggttttatgccacaaattatttctcatctcttaaacaaagaaaaaaactatttatttttaattttcaactcaaggggcacatatgcaggtttgttacatggatacattccatgatgctgagatttggacttcaattgaacctgtcacccaaatagtgaacatactgcccaatagatagtttttcaacccttgtcctcacttcttccctcctcccttttgtagtccccagtgtctttttgtcgttgttaagagacagggtcacactatgttgcccaggccaatcccgatctcttgggttcaagtgatctacctgcccttggccttccaaagtgctgggattataagtgtgagccaccacatgtggcctccagtgtcttttgttcccatctttatgtccatgtgtacccagtgtttaggttcagcttataacaggagaaccatgcattattgcggtccctgttctgcattttattcaccttaggataaatagcctccagctgcaaaccatgttgctgcaaagggatatgatcttttcctttttatgggctgcattactatccccatggttgtatattatgctcctctacaaattcttttatccaaatccaccgcttttgggccacttagcgttgatcccattttggctatttttgacaatgcttg

SEQ ID NO: 724973 - DNA, 148 bp, Homo sapiens
gcctgtgtgacggaccacacggagcgccgcggcgcatctacatccaggcccacatcgacagggacgtcctcattgtcctcgtaagagatgctaaaaaccttgtacctatggaccccaatggcctgtcagatccccacagagagagcgt

SEQ ID NO: 724974 - DNA, 1296 bp, Homo sapiens
cacgaagactccactaaccgccgccgcctgtctgagctagctgcgctatcatactctcccagtactggacgatgcagcatgacactctctgctcagagtatgtttctcgccatgcaaggagacacagaagtccatctattacatcactgcgctgacgagcaacagagcagcgtggccaactcagcttctcgtgcgacgccgcagctgcgcgcacacgcggcgccttccgcccgctgcgctcctactatcgacccgcacgcccgacctctgcacgagctactgctgctgtcagtcacgccctcaccggcaccctttgccctggcgcaccgcacgccctggctcctctaccctctaccccaatcgcccagcgctatcttgccagccctgccacctcaacacaactagaccgcatccgaacccaactataacacatcactgcccacatcacaagccctacgtcccccaccccctcacgccaaacaaccctcattccacacccctcaactctcacacttaaccacccatactaccacccacaaaaagactatcccctcaaccgctgcaccacactactccacaactttaccacctctgcctgctactcccacccctatgccctccccccctccctatactccccaccccccccctaaccaacacactcccacccccaacccccattaatacaacacacccgcgacactccatcgccaaacccctcccagcaccaccactcccgcctcccccactcccccctccccacccatccccccccccctccactcgcacccaccactcataccaccacccccacccacctcacccccctctgcctacacaacaataaaccaaagaacaaaaacccccctcactccaccataacagcctacaaatcgccctaccattaaactgcatccaaccgccaccaccctccccgtcccacacccatccacacaaccccatagtccaccgcccacccccaccccacaccatatcactacatcaaacttacccctatactttttcaccgacctccgaccgccttaccaattatccacccaccatcaccttcctcacccatttctctcacttctacacatcctaacccacaacaagcaaaacacgaacgtatcaacctcgatacccccaactagcaacgccctccactacacgcccgccccccccctatacaaaccccacccccgcaccacctcaaactaataatgcacaccccggcagcctaacctgtgtacacctctccaatcgccaatccgtctctcttctcctctcctctat

SEQ ID NO: 724975 - DNA, 390 bp, Homo sapiens
tatacgcgtcaggggctggacagagggcaggaggagcgagcgtgagggtgagggccccctcccagcgctggagatgggagggtggataggctgtgggtagcagctgtgagtctccaccccgacaagcagtgttcctcctgtgccaggccagcccatgctctgtggcatgccctagcaggcacctagcgggacagtggcgtctgctacagggacatgagcaccgagcgcaggtgtgacacatctatgcactgcttgatgctcttgggggttgaaggtcacatagctgggccaccttctcccactctgtgcctggggtctcctcctttggattccttcacgaaagcctcctcggatgcccggttgttgatcttgtccttctctacttgttca

SEQ ID NO: 724976 - DNA, 222 bp, Homo sapiens
cagctgtttgccatcaggcgcacaagcaataactccatgcgattctgccctaccatctgtgtgcgctggtttactgagtccattacagcatgccatgcccagactcctaaatcctatgggtacagacgcgtacccaacactaaacgggacgagctttgctatatactgagtatgggtattaaatacgacatgtatccgacagcctggccgctcacgctaccg

SEQ ID NO: 724977 - DNA, 365 bp, Homo sapiens
tgaggctcctcggttcgatggctctggggctgaggttcatgtgggagttcccagtcaagtgactgtttcctatagtcgggctggaggactgaatagcgatcgctggatgatttgcctggggccctgttgttcagaggggctgcacatgatcagggagctagtcctggaagatcagcgagattccattcccccgagttcagggataggaggattccaccttctcaattaggttgactagacactttttggctcctgtgaagttgctggccccaatgctgtctgatccatctagcaccaggtagatgttcatggagcctgaagggtccaggacgatcttccgcttctgttgttcccctgggtgccag

SEQ ID NO: 724978 - DNA, 366 bp, Homo sapiens
tgatgtggttgtactatgaggggaggagttcgagacacgactgaaggagaagaagcaggagatctgtctgatgagctaaggatttcttggggatgcagtaggaacaaatggccacaagtccctcccccatggcttgattggcatgcagcgatatggaccaaccccatcgtattccaaactgaaaattcctgggctgaactcgcccatccctgagagctgttcctttgggtaccatgctggtggctggggcaaacctccagtggatgagactgggaaaccgctctatggggacgtgtttggaaccaatgctgctgaatttcagaccaagactgaggaagaagagattgatcggaccccttgggggga

SEQ ID NO: 724979 - DNA, 1889 bp, Homo sapiens
  misc_feature (410)..(410): n is a, c, g, or t
  misc_feature (631)..(631): n is a, c, g, or t
ccgtcgagtctagcgtccgtgttccatattgttggatcattgccctcttgggttggcatgtttgttggcgctctaagaggtagaccgctctctctatctgctcgtggtatggtttcgtcctgcggtctactacccgtggggggtgacccccggaatgcgtcccccgttggtggacccctttggtgtgtttggggggaccccgccccgtgttggtctttctctccctcggaagtgtttttgtcctgacactagttgtggcaacttttttcggggggcgccgctctgggggtgttgcttgactgcggtatcgccgttgtgtatacgcgggcgcgcacgcacagagggtggtcgctacaagatgaggcgccccgttccagcctaggtggctttgtctctcgcgtcgtaacgtnggtcacatatagtggctcctccatacggttgatatatattatcgtctcgacgttttgtagaaatttgtccccgcgtgtcttacaccacacaaagattgttttgggtgcccacgcctcactggtttgtggtgccacataagtggggaagccaagttctggttacgggatgtcctagaaaagggttcgcgctttgtggtgagagaggagagaaatatgttctntgagttcgcgttggttggtttcgttccgccccgactggcctccgccacacgattttaaaaggggagtaagtttcgtcagatgagtggaggttccttctactctggataggattgttccgtgttgccacccgttggggggggcgccccttctgttgtgttcctataagaggataatatggaggtagagtggtttgtgttaaaagagaagtgttagttagcctccccacagatggcctgcaacgtatgtatccttcgagagatacccctcgtgtgcctcccgtggtcgccacaaaagcggcgcgcaaccaccacaagaagttgttcgtaaagaacagctcaatattattcgggtgggggcgtactattcctcgtcgggggtaactgctcaccaacaaagtggtgggcgccaacacgtcggttcctgggtggttttttttgtgggtgtgttgttaataaatgtgtgcgttcctccacaaaaagagaagatgtggttgggtgctccaacctcccgtcagcgactagtgctcttgtgttggggggagcgctactattctaaaattctccttctgggccgccaacaacaggcggttctgctccgcaactattctgcgtgttcgtcttcccgcgggtgggccgcgccaacagaagagggtgtttaatctctgtggggtgtgatgacacaacatcagagtgtctcgcggcacaatagcgtcgcccacacacaacgtgtgtggtcgctcctcttgccacatcagtgttgacacacagaggccctctcttcccggtcgtctctcgtgtgtgtcttgtgtgatacactctctgtcattgtcccctcagcaaaacactcacaggggacacactgtgcacattgttgtgtctcgcacacactgtgtgtctcgtataaagagaacttgggctctacatgagatgtgcgtgtgtatatccgagatgaactgtgtaacacacacctcatagcaccgcgggcgtgcacactggccacaccctgggacaaactttcccaaaggccaccctcttgaagccacatgttttaaagaacctatcacggtatacctgagacccccgaaccttctggagaaggagagctgtaattcaccccaagtttccctattcaaggagttcacctgagccacacctcgtcaagacccacacccgagtttccctgcaacaggactcacggctcccactgtggcgtaccaaaatagggtttttaaacaagaaaaattaagtgaattaagcg

SEQ ID NO: 724980 - DNA, 934 bp, Homo sapiens
  misc_feature (344)..(344): n is a, c, g, or t
tcccaatatttcactaacaaaagggtactttaatcccctttagaataggacaacgcttacagttaaaaaattacgagctccagtaaaaatacagcaaggtggcctactatctattagtgaacccaacccaattattatccctattcccagagaggaggagggcgggaaagaagaaaaatataaagtacgaggttcagaaaatagtggtgtaactttttttatttttctcgtcgggcaagagccagataaccctattatctagagccatctttattttcgctaactatatatctgtttttctctacactgtgggtgtgtgtgaagggcaatatccccccctctgntttggatatcccgcccatatataaaccagatgtgtcttctattatagactattattcttgtgtgtggcatatactacagagaaaattccgagaaccacgcgcgaagggggggcgaggaacaaaacagatctgtttcctctaagaataatctcgcccgggatcttttcaccagtgcttacccgtgggtgcacccagagcggataccaatattctgtttttatgtagagacccccccaccttatattgaaatattttttccatcgtggcgacctctattcctcccagaggggaacacaacgacaaaagagagggggtatcattatatctgtatctccatcgtcgtggttctgtcgggggacaaaaagattagccccccgaagagggacataatttcaccaggcgcgaaatatttattgttgaacacactattcttggcggggtggccccccactattttctaacacacgacaaggattaatctattccaagagaaaacatattttctgccaaaataacatattcttctattcaccatcttaatctattcgtcttagaaacgagcgccgcccgccgtttaccacaccctaaaa

SEQ ID NO: 724981 - DNA, 840 bp, Homo sapiens
cagttgtccctccctgccgccggcttcccgcacaaaattttccccgccgcgattttttgcccccccttttccttccccgtggcgcccaaaaatagaaaaaagctgcctcctccacaacccacactccacactcaacgcaacgggttccttctatgataattcctcctatattcattcggtactcaactaaattagtaacgcgcctgcacaccgttctgggttgaacacatcccccccaacaacccgtgctctctatttaagagccgcttgatattctacaactatctccctaccttatatagagagcaagaatatctatcaattgttctcacaaaaatgcaactctctttcccacacacatatgtcttgcacacctcttccactccgttgcttaaatacacacccactttactgtgtgtgtctatacatacttccctcctcaataagtggccgccgctccctctagtgtcgcgatacaaacacacttttacatacaattaacagcatttatattacgtaaacaacctatctctataaataaggaatttaacataaagcatgttctcgcgcggcttttctttagtaaatattgtgccgtacacgacaccctttattgtctcttaatacttatttctcttcttactaatgtctataatctccgcccccccgctctccattgaaccaccccattttgtgggaaaaccacccacacttgtagcagcactcttatttgttcaatcatctactatttttattatatttagtgggtttcttcatcctgactcaataagatttggtgttgtcatcttcccccaaaaaaacaacaacccatcaaaataa

SEQ ID NO: 724982 - DNA, 732 bp, Homo sapiens
agcggagtgtgcggctgcggggccggcggcgaaggtccggggtggaatcgacgtcgctgcggctgccgacgacccacacccggacggccgctctccgcagatccacccttggccgctgctgtgcagggggcgcgcagagccccctgaggtgagtcgagttcccctgcgcgatggacagcttcggccggctttctcccgttcgggaggtccggctcccggctctccgtgatcccgcctggcgtcctcgccttgcggcggcggcggacgacagcgggcgcccaggaatggcttcggcgggcagcatggcatgcaggaggtgcgcgtgtcggtgctgacccccttgaagctggtcgggctgctgtgcatcttcctggcgctgtgtctggacctgtgggccggtgctgagcccggcctggggtcacatgctgaccaccagtactacctgtcgttcgtgggagtcctgccggatacccgcatagcttaggacatcttggcactgcaaattccacggatacagcaagcgatttggcagattgctactcttggcttttactccttgcgcgagcagctgccaatcattctcattgcattcactgagtccgtttagacatactaatcttgctcttggagatcttcgaaggaccctttcttatagaccctgttcgcggatcctgcattattgcagacaacatagtttttacaaggtttgacagccttgctccatttacccaa

SEQ ID NO: 724983 - DNA, 107 bp, Homo sapiens
  misc_feature (30)..(30): n is a, c, g, or t
ccacgggtccgcccaggagtccggggaagngtgcgccaaaagatcctcacttttcaatttgtcatgttactaaatggtgttacattaaagccctgtgttaagtgtca

SEQ ID NO: 724984 - DNA, 162 bp, Homo sapiens
  misc_feature (156)..(156): n is a, c, g, or t
ttttgaaataagcagggaagttgggtaagaaaataacatttgggccaggtgcagtggctcacacttgtaatctcagcattttgggaggccaagatgggaggttcagttgagctcaggagtttgagaccagcctgggcaacatggcaagaccttgtntctact

SEQ ID NO: 724985 - DNA, 291 bp, Homo sapiens
ggcattcagtttagttcatactaaaatataatacgctctacatagctcaaataatattcagcagtttacacggtaaacagcttgtttacctgtctcaagagaacactgcagtaatgtacctctgttagagagcaccttctcttctgtgcttatctcttcaagataaatacatggaaggatgtgaaaatcggaacaccaactatgtgtctcactgcatctaagtgaagcagccacagctgtgagagttttcaaagcagaaagatgctgatgtgacctctggaattcagacat

SEQ ID NO: 724986 - DNA, 2068 bp, Homo sapiens
ggcggtattccttccgtttcttagtcgcgcctatcggtctgtgatgccgcgcgatcgctcgaccagatgtggagtagatcgagggaccgtggcgtcttgactcgcgtgtcctgcaagctggtcgcaatgtgtgacggtctggcttggagatcaccacttcgttggctgcagcggtccacctgatcctgtactcagtgtcagcagagggcacaagtacgagggtgcacaagttagctcgtcgcagacgggatcgcaggtgcgcattagctcgtacgaacgtgtggtcgctcgcatcgtgggcgctgcgacgcctgtgggactgcctagtgtgtaagacagacctcgtggactgtctgagaggcctgtgtgatagagagtgaattgaacctacatagacaactgttgacaaggtagcgacctgatatgcacccccgcaggggttggcccagccatcggacttccaacacacctgcgcgcaccaccccttgaggacccactatgatcaaggacagcgttccgacttcactttgaggtgaccttatgagggtagtgtgacgatctctttatctaagaacggtagacgtgttcccttgggggacctgccataggttccagccaccttgcaaggcccgtacggctagctagctcgggttgagggaccaacagccacgtggggcaaaggtggcttgcctattcgggttagccacgagaagcccgttcaacaactctcggatcggcacatacggccgggaatgtcgcacccagggaggaccttatatagagtcacagcccacgcttccatcttagaagcccccggtactggacttcgacatagagttatcgaacctatcgagaggaatcccttttaggcccaacgttgttgacccgcgcatcccccgagtccaacgttactttcctttgagggcgtgaaccttccctttcgaaaatagcctattcttcagaacactaaccgaaatatccttaggggaaacacagccgccgtagtggacataccgactcatgtcaccgaccaaggaatttcggggcaacccccaccgcgtgttcgacgtccattgcccgaacagcacaccatatcctccttgggacattcttccaaacaccaaaacagaggcaaacgcactgataacccaacctccctctcggagcacatctatccctcaccaaacacacattatgacacgagtcacgccaacacttgcacattgcgtaggccccgttggttcttgttggcaccgcgacgaggataatgtgaccacgaaacaccactataccatcctctgcaacagaacaaagagacagtcgaacactcgcacagcggcgcgcgcatgacaacggggatatgaataacaccgatcgcgaaccacgaaccaacgcgcgcctaacaggacactaccaactagacccgctcgatagcaagcacatctgccaagagcaccgacaaccaaccgcgagtaagcgacaacagggctacacagattacagcggagcacttcaccggacagcaacgaacgcatcacatagtgaccacaccacacgcgacagcaagcgctgtacaagacacaaacactcacaccagcacagatgggagagtccgacgacagcaaaacacactacattcacaaatcaatgtgggcaacatgtcaccgcaagttcaactctcccggcccactcacccctgccggcctcgcaccacccagccgagccacacccagcgcaacacactaaacttagctatacaacttaatcatatgcaaatactaaaatatcatatcaaaacccgggtaagaacaccagacacagcactacagataaccactacacgagaacctcacctcctcacaccacacttcagcacacacccactacaaactaaccacaaccatacctgatcacaatcctacatataattagctgtacatccaactttatactatgcataacaccaacagaccttacaccaccactagtctaccaccccacttcacaccacgacatcaacagcaaaacacactcaatgcaatatactaacaaaactcatgtcattaat

SEQ ID NO: 724987 - DNA, 488 bp, Homo sapiens
acagctgaaggaatctgaggggaagactttagtgtcagataccaaatgaaggcctggaacttccagaggatgaagaagagaaaaagaagcacggaagagaacacaacacagtttgagaacctctgcaaactcatgaaagacatattggagaaacaagttgacacggtggttgtgtcaaaccgattggtgacatctccatgctgtattgtcacaagcacatatggctggacagcaaaacatggagagaatcatgaaagctcaagcccaaagagacaaacacaacaatgggttacaatggcagacaaagaaacacctggagataaaccctgaccataccattatagagaccttacggcaaaaggcagaggctgctaagaacgacaagtactgtgaaggatctggtcatcttgctttatgaaactgcgcttcctgtctaactggcttcagtctggaagatcaccagacacatgctaacaggatctacagga

SEQ ID NO: 724988 - DNA, 264 bp, Homo sapiens
tctctgtggcggccacgcatggtctgttcgcctttaggtcagaagttcaagatccagcctgtgtcacatggcatgacccccccctctactacaaatacaaaaagactagctgggcgtcatggcacatgcctgttttccccgtcttcttgcggaggctggggcaggatgcaggacaatcgcttgaacccgacaggcagaggttgcagtgagccgagatcgtgccactgcaactcttgactgggccatgagcgagactctgtctcc

SEQ ID NO: 724989 - DNA, 124 bp, Homo sapiens
gtaccagcggaacagcaaagaatgggacaataatatttgcaatgcacaaaaggttaatttccatgacactggcaggcatgggggctcatgcctgtagtcccagcatttggggaagcccaggtga

SEQ ID NO: 724990 - DNA, 299 bp, Homo sapiens
cccttcaacatctcatttctcgtccgggtgtctctgggtcctgctgcaggctgacttcatgtccaggcccctctctgttccagttctgtgggctgcccactgtgtctttgaccccaaagtgttttccaactttcttccatttccagatcttcatgtatttttttttttttggaaacgaattctcattcagtcgcccaggttggatttaaggggtgcactcttggtccatggcaagccccgctcctggggtccaccgcattctcctgcctcagcctcccgagtaactggacctagaggcg

SEQ ID NO: 724991 - DNA, 504 bp, Homo sapiens
ctttacacctactctgagaatcgtgtggaatttagacggcctgattcttaccagccgtgggcctgggaccagcttcgagttttgcgcttgctattgttaggaagccctgaatggcaaggaggtggcggctcaagtgaaggctccacttgtccttaatagactagagcagcgaactgcgactgatcacttagagaaccaggccgttaggaatccattctcactgtgtcgctctaaacaaaacagtggtaggttaagtgtgtccgaagtcggctgtccttactacttttgcggaacgtatggcaaagtcaccaactacccagaggatttctcaggcctacaaattgtgtctatacatttctaaagccttgtttgcagaattaaccagggcatttagccaaactaaaaactaaaaaccacacacacacgaatatcaaccccacacaactcacaaaaaagggggggccccgccaaaaaaacatcccccaagacgccccacctcattaa

SEQ ID NO: 724992 - DNA, 366 bp, Homo sapiens
  misc_feature (147)..(147): n is a, c, g, or t
actttcccgcccccctcccctgttcccacttcctcatctggcactatgcatgtctcactcaccctccacagcactcagtcccatcgacgttcactgaacattggctttctctttctgactcctgcctgttttagtccactatatatntgctgaattgcttaaatgctgaaagtaactgtaaaaatgtgaaatggtaattttaaaaagggctccattaaattttaagccatggcaattaacaaatttttggccctaagtgaatttttcaaggaaaaaccaattccttaactgaccaggaattggagggaaatggtagtaaccaagtaggtagcctcaattttacccattggtccaagggaaattgtg

SEQ ID NO: 724993 - DNA, 100 bp, Homo sapiens
aagatcacttgagagaggattatgatgcgactgtgagtgtattaaagggcagtaaccgaatgtttgactaagcgaatggtagaggtgatcttctgcacga

SEQ ID NO: 724994 - DNA, 327 bp, Homo sapiens
cctcagaagccatttctactaaaaacacaaaaattagccgggcatggtggcacacacctgtaatcccagctacttaggaggctgaggcaggagaatcgcttgaacccatgaggcagaggttgcagtgagcctagatcgtgccactgcactccagcttgacgacagagtgagactctgtctcaaaaaaaaaaaaaaaaattggcagtatagtttaatggtgtatggaatgggttaagaaatatttacatacgaaaatatggccctttacctggaaaaataccgggagaagacctggcctagggaagggggggtatcagaagaggggca

SEQ ID NO: 724995 - DNA, 690 bp, Homo sapiens
tttattccagggatgcaagggtgattcaacatacgcaaatcaatcattgcgacgcatcatataaacagatgaaaggacaaaatccatatgatcatttcaatggatgtcaaaatgatgttttcatcccttcatgataaaaatcctaaaaaaactgaggatagaaggatcttacctcaacatgatacaaaccatatatgactgaccccagctagtatcatactgaatgaggaaaaactgaaagcctttcctctgggacctggtacactacagggatgcccactatcaccactgttattcgacatagtactgaaagacttagatagagcaatcagacaagagagagaaataaagggcatccaaattggaagggaagaagtcagattatccttgtttgcagatgatattatcttttatttggaaaaacctgaagactcttagccaggcatagtgacatgtgcctgtagtcccagctacatgagagcctgagacagaaggatcatatgagcccaagaggtctaggctacagtgagctgagatcctgtcactgcattccatcctgggcaacagaatgagaccttatctcacaaaatataacccataggttcaaaaacgtccaaactccgaataacattaaaaaactcgagggggggccccggttccccaattgtccctttttgggaaccgttttac

SEQ ID NO: 724996 - DNA, 522 bp, Homo sapiens
  misc_feature (68)..(68): n is a, c, g, or t
ctttttgcctgttgtgtgaaggatagcccaccccaggtcctcctgcagtggggcatccccttggcagntgccgtcagccaggccagccccagggagtttaaaacaaacattccacagggcctgggcccctgggaggtgaggtgtggtgtgcggtttcccccagggcagaacaaggcagaattgcaggaaacccgcttccccttcctgacaggtcctgccaagccaaatgggtttcctgcgggtcacgccccccaggtattgaagggacccaaggccccccctgaagccagggataaagggtccctttttgctccccagcaggtcctgcccccaaggcctgactgtataaactgtcaaagaaactttgtttggggcaaggttcccttttttttcccccccagactttggcctttgagggaaatgtttttttttgccctgggggggttttttccttgagggttttttttttttttaaagacaccccgcccttcccccatgactcaataaacccttgtttttcca

SEQ ID NO: 724997 - DNA, 789 bp, Homo sapiens
atgaaaaaccctcgcaccccattggggccccctcccctctgcccacgcataattagttagtgcaacactcagtgagttggaacacccacacctcttcctgtctaacatgaaacattcaatctctcggtgttttttcgccccccacataagtttggtgtcatgtcatgacacacttcgccacaaaaatctctctcttaaacactctctctcttcatacaagtgtatacatagaaagccctcctcccccgcacacacactttactcccctctctaataatcagtataagaagaggtcctgattgtgacacttctaaacccgcacaatcataccaaaatatatcactctcataaataagaccatgatccaccttcagtgtgagccacacataatgaatatatttgtgtcaacatcccccctctccgagagataaatagaaaaaattatgtgtgtcagcactactctctttttattttgttgagataataacctatgtctatctatgatgtctatctaaatagaaacatatatctctaatacatattttgcccaactcccatcttctacagaacaagtgtaaatattttagtaggagttctcccgcctctctctccccacacagagagccttcaaaacaccattattgtctccccccccctctaatagaatagtagcacaaccctcggcgggagaggaatcaaatatattatgaacataacagaccgcccctcctaagaatataagaatatagataacgactatttattccctaaccacgacatgtaaaagaa

SEQ ID NO: 724998 - DNA, 109 bp, Homo sapiens
ggtactctagaggatcttaggcacggagagaactgggcacggagatgttactgtgtgcagcggtaggcaaggagagaactgaggcatcggaggaactgtggcagacgga

SEQ ID NO: 724999 - DNA, 1256 bp, Homo sapiens
  misc_feature (188)..(188): n is a, c, g, or t
  misc_feature (234)..(234): n is a, c, g, or t
gcgggatgcggtgcgcacgagctgtgaacctccttggctcgtgggtcgaagctgtgtggaccaagcaatgtcaggagtgtggccaatgtattcatggaggcatggctgacgcgcaggaggggctcgcacaagctgcatagcatgtctcgcacagccgagtactagaccgaaggaatgcgcgactcgtnttgactcgcgggatgccagttggacaaactacagcaactcgctcancaagccgcttgccggcctagcgcatgcagacggcagtgcatgtgtagcgcccgtgacaggattgtgacgcacagcaatgtatattgggcgcctgcacggcactgcaatgcacatgaggtgacggaaccgcatttcctgagagaaagccggggtccccagcagcacttggcggcacggtgagacgctgcggcagctgaacgacagcgtgttgtgaaactgcaggcctgacggacgacagctgcctgtggtgggtgggccacgtcatgattcacacggcccatgcccgcttgcaagcccttccatgtcctaggcgggcaggtcacgcgacggacgcacaagccatgcttcccccaggcctcctcgcgagtacaagtacgatacagcccagattgagcgatgctggtctctggaacgcatgacactggcagcgtactcaaacctaaagaggcacccattgaccgtgtcaaacgctggttaccggggacatgtccctggctgtgttatggctccgtgagacgacgacgggaagtttctggtggacggactatcgcttttgctgacctttgctccccagaagccagacccccactttgaccccagatacggttgggctactggtgttccgccctgggctgggtggccgtgtccgcgtctagctgttggggacccagtggctgtggctttggtgaccggctcaaattgtggcgcaacagcggacaccatgaattgccgcacaaggtctccacgaggtataccggcttgcaacccctcaactgccaaggagccccagaaagaaggggatctcctacaaacccgctgctctcgctgtcaaaaatctgccaaggggcaaccgcaggagtgcgtacaaaaactcgacagaagaaacccagtcagcaagccacaaatgccttccgaatactaacaggcatattcccaaaatactctctaaagaccacactactttagtcagacacagcacacaccattgtcaccaaccacgtgtatacgtataactaatagtg

SEQ ID NO: 725000 - DNA, 5678 bp, Homo sapiens
  misc_feature (29)..(29): n is a, c, g, or t
  misc_feature (60)..(60): n is a, c, g, or t
  misc_feature (127)..(127): n is a, c, g, or t
gctcggcgcgagctcgggagctgcccggnggccccggaccgaggcagccctcccctttanaagaagcggaggacaggattgggatccttgaaacccgaaacccagaaacagcatcggagcggaaacnagaggggaaaccttgaactcctccagacaattgcttccggggagttgcgagggagcgagggggaataaaggacccgcgaggaagggcccgcggatggcgcgtccctgagggtcgtggcgagttcgcggagcgtgggaaggagcggaccctgctctccccgggctgcgggccatggccacggcggagcggagagccctcggcatcggcttccagtggctctctttggccactctggtgctcatctgcgccgggcaagggggacgcagggaggatgggggtccagcctgctacggcggatttgacctgtacttcattttggacaaatcaggaagtgtgctgcaccactggaatgaaatctattactttgtggaacagttggctcacaaattcatcagcccacagttgagaatgtcctttattgttttctccacccgaggaacaaccttaatgaaactgacagaagacagagaacaaatccgtcaaggcctagaagaactccagaaagttctgccaggaggagacacttacatgcatgaaggatttgaaagggccagtgagcagatttattatgaaaacagacaagggtacaggacagccagcgtcatcattgctttgactgatggagaactccatgaagatctctttttctattcagagagggaggctaataggtctcgagatcttggtgcaattgtttactgtgttggtgtgaaagatttcaatgagacacagctggcccggattgcggacagtaaggatcatgtgtttcccgtgaatgacggctttcaggctctgcaaggcatcatccactcaattttgaagaagtcctgcatcgaaattctagcagctgaaccatccaccatatgtgcaggagagtcatttcaagttgtcgtgagaggaaacggcttccgacatgcccgcaacgtggacagggtcctctgcagcttcaagatcaatgactcggtcacactcaatgagaagcccttttctgtggaagatacttatttactgtgtccagcgcctatcttaaaagaagttggcatgaaagctgcactccaggtcagcatgaacgatggcctctcttttatctccagttctgtcatcatcaccaccacacactgttctgacggttccatcctggccatcgccctgctgatcctgttcctgctcctagccctggctctcctctggtggttctggcccctctgctgcactgtgattatcaaggaggtccctccaccccctgccgaggagagtgaggaagaagatgatgatggtctgcctaagaaaaagtggccaacggtagacgcctcttattatggtgggagaggcgttggaggcattaaaagaatggaggttcgttggggagaaaagggctccacagaagaaggtgctaagttggaaaaggcaaagaatgcaagagtcaagatgccggagcaggaatatgaattccctgagccgcgaaatctcaacaacaatatgcgtcggccttcttccccccggaagtggtactctccaatcaagggaaaactcgatgccttgtgggtcctactgaggaaaggatatgatcgtgtgtctgtgatgcgtccacagccaggagacacggggcgctgcatcaacttcaccagggtcaagaacaaccagccagccaagtacccactcaacaacgcctaccacacctcctcgccgcctcctgcccccatctacactcccccacctcctgcgccccactgccctcccccgccccccagcgcccctacccctcccatcccgtccccaccttccacccttccccctcctccccaggctccacctcccaacagggcacctcctccctcccgccctcctccaaggccttctgtctagagcccaaagttcctgctctgggctctctcagaaacttcaggagatgttagaacaagtctttccagttagagaagaggagtggtgataaagcccactgaccttcacacattctaaaaattggttggcaatgccagtataccaacaatcatgatcagctgaaagaaacagatattttaaattgccagaaaacaaatgatgaggcaactacagtcagatttatagccagccatctatcacctctagaaggttccagagacagtgaaactgcaagatgctctcaacaggattatgtctcatggagaccagtaagaaaatcatttatctgaaggtgaaatgcagagttggataagaaatacattgctgggtttctaaaatgctgccttcctgcctctactccacctccatccctggactttggacccttggcctaggagcctaaggaccttcacccctgtgcaccacccaagaaagaggaaaactttgcctacaactttggaaatgctggggtccctggtgtggtaagaaactcaacatcagacgggtatgcagaaggatgttcttctgggatttgcaggtacataaaaaatgtatggcatcttttccttgcaaattcttccagtttccaagtgagaaggggagcaggtgtttactgatggaaaaggtatgttgctatgttgatgtgtaagtgaaatcagttgtgtgcaatagacaggggcgtattcatgggagcatcagccagtttctaaaacccacaggccatcagcagctagaggtggctggctttggccagacatggaccctaaatcaacagacaatggcattgtcgaagagcaacctgttaatgaatcatgttaaaaatcaaggtttggcttcagtttaaatcacttgaggtatgaagtttatcctgttttccagagataaacataagttgatcttcccaaaataccatcattaggacctatcacacaatatcactagttttttttgtttgtttgttttttgttttttttcttggtaaagccatgcaccacagacttctgggcagagctgagagacaatggtcctgacataataaggatctttgattaacccccataaggcatgtgtgtgtatacaaatatacttctctttggcttttcgacatagaacctcagctgttaaccaaggggaaatacatcagatctgcaacacagaaatgctctgcctgaaatttccaccatgcctaggactcaccccatttatccaggtctttctggatctgtttaatcaataagccctataatcacttgctaaacactgggcttcatcacccagggataaaaacagagatcattgtcttggacctcctgcatcagcctattcaaaattatctctctctctagctttccacaaatcctaaaattcctgtcccaagccacccaaattctcagatcttttctggaacaaggcagaatataaaataaatatacatttagtggcttgggctatggtctccaaagatccttcaaaaatacatcaagccagcttcattcactcactttacttagaacagagatataagggcctgggatgcatttattttatcaataccaatttttgtggccatggcagacattgctaatcaatcacagcactatttcctattaagcccactgatttcttcacaatccttctcaaattacaattccaaagagccgccactcaacagtcagatgaacccaacagtcagatgagagaaatgaaccctacttgctatctctatcttagaaagcaaaaacaaacaggagtttccagggagaatgggaaagccagggggcataaaaggtacagtcaggggaaaatagatctaggcagagtgccttagtcagggaccacgggcgctgaatctgcagtgccaacaccaaactgacacatctccaggtgtacctccaaccctagccttctcccacagctgcctacaacagagtctcccagccttctcagagagctaaaaccagaaatttccagactcatgaaagcaaccccccagcctctccccaaccctgccgcattgtctaatttttagaacactaggcttcttctttcatgtagttcctcataagcaggggccagaatatctcagccacctgcagtgacattgctggacccctgaaaaccattccataggagaatgggttccccaggctcacagtgtagagacattgagcccatcacaactgttttgactgctggcagtctaaaacagtccacccaccccatggcactgccgcgtgattcccgcggccattcagaagttcaagccgagatgctgacgttgctgagcaacgagatggtgagcatcagtgcaaatgcaccattcagcacatcagtcatatgcccagtgcagttacaagatgttgtttcggcaaagcattttgatggaatagggaactgcaaatgtatgatgattttgaaaaggctcagcaggatttgttcttaaaccgactcagtgtgtcatccccggttatttagaattacagttaagaaggagaaacttctataagactgtatgaacaaggtgatatcttcatagtgggctattacaggcaggaaaatgttttaactggtttacaaaatccatcaatacttgtgtcattccctgtaaaaggcaggagacatgtgattatgatcaggaaactgcacaaaattattgttttcagcccccgtgttattgtccttttgaactgtttttttttttattaaagccaaatttgtgttgtatatattcgtattccatgtgttagatggaagcatttcctatccagtgtgaataaaaagaacagttgtagtaaattattataaagccgatgatatttcatggcaggttattctaccaagctgtgcttgttggtttttcccatgactgtattgcttttataaatgtacaaatagttactgaaatgacgagacccttgtttgcacagcattaataagaaccttgataagaaccatattctgttgacagccagctcacagtttcttgcctgaagcttggtgcaccctccagtgagacacaagatctctcttttaccaaagttgagaacagagctggtggattaattaatagtcttcgatatctggccatgggtaacctcattgtaactatcatcagaatgggcagagatgatcttgaagtgtcacatacactaaagtccaaacactatgtcagatgggggtaaaatccattaaagaacaggaaaaaataattataagatgataagcaaatgtttcagcccaatgtcaacccagttaaaaaaaaaattaatgctgtgtaaaatggttgaattagtttgcaaactatataaagacatatgcagtaaaaagtctgttaatgcacatcctgtgggaatggagtgttctaaccaattgccttttcttgttatctgagctctcctatattatcatactcagataaccaaattaaaagaattagaatatgatttttaatacacttaacattaaactcttctaactttcttctttctgtgataattcagaagatagttatggatcttcaatgcctctgagtcattgttataaaaaatcagttatcactataccatgctataggagactgggcaaaacctgtacaatgacaaccctggaagttgctttttttaaaaaaataataaatttcttaaatcaa

SEQ ID NO: 725001 - DNA, 2287 bp, Homo sapiens
  misc_feature (29)..(29): n is a, c, g, or t
  misc_feature (60)..(60): n is a, c, g, or t
  misc_feature (127)..(127): n is a, c, g, or t
gctcggcgcgagctcgggagctgcccggnggccccggaccgaggcagccctcccctttanaagaagcggaggacaggattgggatccttgaaacccgaaacccagaaacagcatcggagcggaaacnagaggggaaaccttgaactcctccagacaattgcttccggggagttgcgagggagcgagggggaataaaggacccgcgaggaagggcccgcggatggcgcgtccctgagggtcgtggcgagttcgcggagcgtgggaaggagcggaccctgctctccccgggctgcgggccatggccacggcggagcggagagccctcggcatcggcttccagtggctctctttggccactctggtgctcatctgcgccgggcaagggggacgcagggaggatgggggtccagcctgctacggcggatttgacctgtacttcattttggacaaatcaggaagtgtgctgcaccactggaatgaaatctattactttgtggaacagttggctcacaaattcatcagcccacagttgagaatgtcctttattgttttctccacccgaggaacaaccttaatgaaactgacagaagacagagaacaaatccgtcaaggcctagaagaactccagaaagttctgccaggaggagacacttacatgcatgaaggatttgaaagggccagtgagcagatttattatgaaaacagacaagggtacaggacagccagcgtcatcattgctttgactgatggagaactccatgaagatctctttttctattcagagagggaggctaataggtctcgagatcttggtgcaattgtttactgtgttggtgtgaaagatttcaatgagacacagctggcccggattgcggacagtaaggatcatgtgtttcccgtgaatgacggctttcaggctctgcaaggcatcatccactcaattttgaagaagtcctgcatcgaaattctagcagctgaaccatccaccatatgtgcaggagagtcatttcaagttgtcgtgagaggaaacggcttccgacatgcccgcaacgtggacagggtcctctgcagcttcaagatcaatgactcggtcacactcaatgagaagcccttttctgtggaagatacttatttactgtgtccagcgcctatcttaaaagaagttggcatgaaagctgcactccaggtcagcatgaacgatggcctctcttttatctccagttctgtcatcatcaccaccacacactgtagcctccacaaaattgcatcaggccccacaacagctgcttgcatggaatagcagagaataccgcctgctccctccggacagcacactcctgaaaacggggagagaggagccaaacatgctcggtttacactttccttatttactgaatgagtggagggcagagacaggcctggagttacgcacactgagtgccccaacatggaaagaaacatcaggagggacaggaaacgttccctccttaaccaacagttttcaagaccttactggaggcactttattggctacataatcactccatgcggtgggcatcaggcagaatcctggtgcagacccaactttgaggtggaggatttcacagtttctttattttgaacttcccccaggctcccactaattcctctccattctatcctcctccctttcccacaaaagaaaacagaaaggagcagcagtgtttgataccgtatcatccagaggcctggttctctcccattatagggcaaacaagccctggcaagatatttcactcccgccccatgccatgcattaaaaatccaaaattgcctatattccacctgccaagcaagagatgctttcattattgaagttccaaatgtatacctttgagaacagtgccttctcgtcttaaaagagaggtcctcattttgtgagttgggagcagagggaattaaagaaagccatgatgcagggatttggccattcaagccgggcagccttcagagaatgtcatccctaatgacacatgcccgaatgaaggagcggggctgagcttgtcctgccttcgtattgaatgttgcctgtctgcctccttaatagcgggcctctgtgtgagcatttgacaagacttaaaactattcattgaagaaaatggatgatcccccaacaggaagatgcaaccccatgggctgcctgcttgaccacagaagtgcttccagctccagttgctcatctgagaactccccccaccacttgctgttaaaattgttaaaattaaaggccatgttgattgatttttta

SEQ ID NO: 725002 - DNA, 1592 bp, Homo sapiens
  misc_feature (29)..(29): n is a, c, g, or t
  misc_feature (60)..(60): n is a, c, g, or t
  misc_feature (127)..(127): n is a, c, g, or t
gctcggcgcgagctcgggagctgcccggnggccccggaccgaggcagccctcccctttanaagaagcggaggacaggattgggatccttgaaacccgaaacccagaaacagcatcggagcggaaacnagaggggaaaccttgaactcctccagacaattgcttccggggagttgcgagggagcgagggggaataaaggacccgcgaggaagggcccgcggatggcgcgtccctgagggtcgtggcgagttcgcggagcgtgggaaggagcggaccctgctctccccgggctgcgggccatggccacggcggagcggagagccctcggcatcggcttccagtggctctctttggccactctggtgctcatctgcgccgggcaagggggacgcagggaggatgggggtccagcctgctacggcggatttgacctgtacttcattttggacaaatcaggaagtgtgctgcaccactggaatgaaatctattactttgtggaacagttggctcacaaattcatcagcccacagttgagaatgtcctttattgttttctccacccgaggaacaaccttaatgaaactgacagaagacagagaacaaatccgtcaaggcctagaagaactccagaaagttctgccaggaggagacacttacatgcatgaaggatttgaaagggccagtgagcagatttattatgaaaacagacaagggtacaggacagccagcgtcatcattgctttgactgatggagaactccatgaagatctctttttctattcagagagggaggctaataggtctcgagatcttggtgcaattgtttactgtgttggtgtgaaagatttcaatgagacacagctggcccggattgcggacagtaaggatcatgtgtttcccgtgaatgacggctttcaggctctgcaaggcatcatccactcaattttgaagaagtcctgcatcgaaattctagcagctgaaccatccaccatatgtgcaggagagtcatttcaagttgtcgtgagaggaaacggcttccgacatgcccgcaacgtggacagggtcctctgcagcttcaagatcaatgactcggtcacactcagtaagtccttgcagagtccatgggtttcttcgacaagtggcttcaaggaagggaattcccacccttgtcttccagcaaggccacacacatgaaaccagcagaaaagagtcttatttgctggaaagacccccagcaagggcatagtgagcccttacagtggttccagtcagaaaaggcaccacttgggtgggcacagccccatgggtgtccaacttggtaagcagagcaaggctggacttgagtccccgtcctccacaaaacacagagccacaagccccagccctgcagcagccctccggaagcagcggggcactggtttccttgtcccctgccatctaccgagtggctcactctcaggtgggagtgctggtgatggttaattaggactgcagaaacatgagcctccttaacaaagtattgggactcttaagggtaagtgtgaaaaaggaatggtctaaatgcattaatcttgaataaaccgaaaaccaaacc

SEQ ID NO: 725003 - DNA, 460 bp, Homo sapiens
  misc_feature (26)..(26): n is a, c, g, or t
  misc_feature (57)..(57): n is a, c, g, or t
ggtcgcttgtgtatgaacgcagtggnggacctgtgaggggatccgacttgccggcanaacttacgctgcgggaccccgggcactgttgctgctgcgggagactgtgggctgtttagtgccatgcaccctttacagatgtgttctccaagtgcaaaggtctctggggtgaggaccattggcctctgtgttcgttggctgtcgctgaggcatgtgcatgtggcagacatggatgtctctctagtatcactgtgtgccagtccagagagtgcagaaggatggagctcggaaggattacaggtccaggctggtgtgtgtggacccgaacgttgttctcatataattgttgtataacaaagtgcctcagctcctcaggagaagcctgatcttcagaagtggaagacccagcctccctatctcacgatggatgaagcttcttggaaggctacgagaaagagtctac

SEQ ID NO: 725004 - DNA, 364 bp, Homo sapiens
  misc_feature (103)..(104): n is a, c, g, or t
  misc_feature (106)..(106): n is a, c, g, or t
  misc_feature (129)..(133): n is a, c, g, or t
aaggcccactaaaatgtttttaatttcttttaaaatcagaagaaaatacataaacttttaggttgaagaaaatgctaatatattcaccgtttatcaatgcagnnanaaatatatatttctgtgtgtgtnnnnnatatatatatatatttgttactactattttgaatgtaggaaatggttcctcttctaactttcttctttctgtgataattcagaagatagttatggatcttcaatgcctctgagtcattgttataaaaaatcagttatcactataccatgctataggagactgggcaaaacctgtacaatgacaaccctggaagttgctttttttaaaaaaataataaatttcttaaatcaa

SEQ ID NO: 725005 - DNA, 356 bp, Homo sapiens
  misc_feature (26)..(26): n is a, c, g, or t
  misc_feature (57)..(57): n is a, c, g, or t
ggtcgcttgtgtatgaacgcagtggnggacctgtgaggggatccgacttgccggcanaacttacgctgcgggaccccgggcactgttgctgctgcgggagctcctcaggtgatccacccacctcaggctcgcaagcgctgggattacaggataggagacagcgtggtccaagagtgatcctgcgcgaaagcacttaggcgagggcttgcagagtggaggtggaataaccctgaaggtgaagggaggtatagaagaacaaggagatggaagaagaatggtgaaaaacgcaaggttgatgacgagaaaaagtatcagactaataaagaaacgggagatggtgagagagacaacggacg

SEQ ID NO: 725006 - DNA, 389 bp, Homo sapiens
aaaaggctcaagatccccgggagccttaccctggggccagtttttcttttcttttctatttcttttcttttttgagatggagtctcttgctctgtcacccaggctggagtgcagtggcacgatcttggctcactacaaactccgcctcccaggttcaagccgttctcctggctcagcctcccgagtagctgggactacaggcgcctgccaccacgcccagctaatttttttgtatttttagtagagacggggttttgccatgttggccaggctagtctcaaactcctgaactcaagtgatccaaccgcctcggactcccaaaagtgctggggattacaggtgtgaagcactgctaggggcctggctattctgacctcgggcttaggaat

SEQ ID NO: 725007 - DNA, 5549 bp, Homo sapiens
  misc_feature (29)..(29): n is a, c, g, or t
  misc_feature (60)..(60): n is a, c, g, or t
  misc_feature (127)..(127): n is a, c, g, or t
gctcggcgcgagctcgggagctgcccggnggccccggaccgaggcagccctcccctttanaagaagcggaggacaggattgggatccttgaaacccgaaacccagaaacagcatcggagcggaaacnagaggggaaaccttgaactcctccagacaattgcttccggggagttgcgagggagcgagggggaataaaggacccgcgaggaagggcccgcggatggcgcgtccctgagggtcgtggcgagttcgcggagcgtgggaaggagcggaccctgctctccccgggctgcgggccatggccacggcggagcggagagccctcggcatcggcttccagtggctctctttggccactctggtgctcatctgcgccgggcaagggggacgcagggaggatgggggtccagcctgctacggcggatttgacctgtacttcattttggacaaatcaggaagtgtgctgcaccactggaatgaaatctattactttgtggaacagttggctcacaaattcatcagcccacagttgagaatgtcctttattgttttctccacccgaggaacaaccttaatgaaactgacagaagacagagaacaaatccgtcaaggcctagaagaactccagaaagttctgccaggaggagacacttacatgcatgaaggatttgaaagggccagtgagcagatttattatgaaaacagacaagggtacaggacagccagcgtcatcattgctttgactgatggagaactccatgaagatctctttttctattcagagagggaggctaataggtctcgagatcttggtgcaattgtttactgtgttggtgtgaaagatttcaatgagacacagctggcccggattgcggacagtaaggatcatgtgtttcccgtgaatgacggctttcaggctctgcaaggcatcatccactcaattttgaagaagtcctgcatcgaaattctagcagctgaaccatccaccatatgtgcaggagagtcatttcaagttgtcgtgagaggaaacggcttccgacatgcccgcaacgtggacagggtcctctgcagcttcaagatcaatgactcggtcacactcaatgagaagcccttttctgtggaagatacttatttactgtgtccagcgcctatcttaaaagaagttggcatgaaagctgcactccaggtcagcatgaacgatggcctctcttttatctccagttctgtcatcatcaccaccacacactgttctgacggttccatcctggccatcgccctgctgatcctgttcctgctcctagccctggctctcctctggtggttctggcccctctgctgcactgtgattatcaaggaggtccctccaccccctgccgaggagagtgaggaagaagatgatgatggtctgcctaagaaaaagtggccaacggtagacgcctcttattatggtgggagaggcgttggaggcattaaaagaatggaggttcgttggggagaaaagggctccacagaagaaggtgctaagttggaaaaggcaaagaatgcaagagtcaagatgccggagcaggaatatgaattccctgagccgcgaaatctcaacaacaatatgcgtcggccttcttccccccggaagtggtactctccaatcaagggaaaactcgatgccttgtgggtcctactgaggaaaggatatgatcgtgtgtctgtgatgcgtccacagccaggagacacggggcgctgcatcaacttcaccagggtcaagaacaaccagccagccaagtacccactcaacaacgcctaccacactccacctcccaacagggcacctcctccctcccgccctcctccaaggccttctgtctagagcccaaagttcctgctctgggctctctcagaaacttcaggagatgttagaacaagtctttccagttagagaagaggagtggtgataaagcccactgaccttcacacattctaaaaattggttggcaatgccagtataccaacaatcatgatcagctgaaagaaacagatattttaaattgccagaaaacaaatgatgaggcaactacagtcagatttatagccagccatctatcacctctagaaggttccagagacagtgaaactgcaagatgctctcaacaggattatgtctcatggagaccagtaagaaaatcatttatctgaaggtgaaatgcagagttggataagaaatacattgctgggtttctaaaatgctgccttcctgcctctactccacctccatccctggactttggacccttggcctaggagcctaaggaccttcacccctgtgcaccacccaagaaagaggaaaactttgcctacaactttggaaatgctggggtccctggtgtggtaagaaactcaacatcagacgggtatgcagaaggatgttcttctgggatttgcaggtacataaaaaatgtatggcatcttttccttgcaaattcttccagtttccaagtgagaaggggagcaggtgtttactgatggaaaaggtatgttgctatgttgatgtgtaagtgaaatcagttgtgtgcaatagacaggggcgtattcatgggagcatcagccagtttctaaaacccacaggccatcagcagctagaggtggctggctttggccagacatggaccctaaatcaacagacaatggcattgtcgaagagcaacctgttaatgaatcatgttaaaaatcaaggtttggcttcagtttaaatcacttgaggtatgaagtttatcctgttttccagagataaacataagttgatcttcccaaaataccatcattaggacctatcacacaatatcactagttttttttgtttgtttgttttttgttttttttcttggtaaagccatgcaccacagacttctgggcagagctgagagacaatggtcctgacataataaggatctttgattaacccccataaggcatgtgtgtgtatacaaatatacttctctttggcttttcgacatagaacctcagctgttaaccaaggggaaatacatcagatctgcaacacagaaatgctctgcctgaaatttccaccatgcctaggactcaccccatttatccaggtctttctggatctgtttaatcaataagccctataatcacttgctaaacactgggcttcatcacccagggataaaaacagagatcattgtcttggacctcctgcatcagcctattcaaaattatctctctctctagctttccacaaatcctaaaattcctgtcccaagccacccaaattctcagatcttttctggaacaaggcagaatataaaataaatatacatttagtggcttgggctatggtctccaaagatccttcaaaaatacatcaagccagcttcattcactcactttacttagaacagagatataagggcctgggatgcatttattttatcaataccaatttttgtggccatggcagacattgctaatcaatcacagcactatttcctattaagcccactgatttcttcacaatccttctcaaattacaattccaaagagccgccactcaacagtcagatgaacccaacagtcagatgagagaaatgaaccctacttgctatctctatcttagaaagcaaaaacaaacaggagtttccagggagaatgggaaagccagggggcataaaaggtacagtcaggggaaaatagatctaggcagagtgccttagtcagggaccacgggcgctgaatctgcagtgccaacaccaaactgacacatctccaggtgtacctccaaccctagccttctcccacagctgcctacaacagagtctcccagccttctcagagagctaaaaccagaaatttccagactcatgaaagcaaccccccagcctctccccaaccctgccgcattgtctaatttttagaacactaggcttcttctttcatgtagttcctcataagcaggggccagaatatctcagccacctgcagtgacattgctggacccctgaaaaccattccataggagaatgggttccccaggctcacagtgtagagacattgagcccatcacaactgttttgactgctggcagtctaaaacagtccacccaccccatggcactgccgcgtgattcccgcggccattcagaagttcaagccgagatgctgacgttgctgagcaacgagatggtgagcatcagtgcaaatgcaccattcagcacatcagtcatatgcccagtgcagttacaagatgttgtttcggcaaagcattttgatggaatagggaactgcaaatgtatgatgattttgaaaaggctcagcaggatttgttcttaaaccgactcagtgtgtcatccccggttatttagaattacagttaagaaggagaaacttctataagactgtatgaacaaggtgatatcttcatagtgggctattacaggcaggaaaatgttttaactggtttacaaaatccatcaatacttgtgtcattccctgtaaaaggcaggagacatgtgattatgatcaggaaactgcacaaaattattgttttcagcccccgtgttattgtccttttgaactgtttttttttttattaaagccaaatttgtgttgtatatattcgtattccatgtgttagatggaagcatttcctatccagtgtgaataaaaagaacagttgtagtaaattattataaagccgatgatatttcatggcaggttattctaccaagctgtgcttgttggtttttcccatgactgtattgcttttataaatgtacaaatagttactgaaatgacgagacccttgtttgcacagcattaataagaaccttgataagaaccatattctgttgacagccagctcacagtttcttgcctgaagcttggtgcaccctccagtgagacacaagatctctcttttaccaaagttgagaacagagctggtggattaattaatagtcttcgatatctggccatgggtaacctcattgtaactatcatcagaatgggcagagatgatcttgaagtgtcacatacactaaagtccaaacactatgtcagatgggggtaaaatccattaaagaacaggaaaaaataattataagatgataagcaaatgtttcagcccaatgtcaacccagttaaaaaaaaaattaatgctgtgtaaaatggttgaattagtttgcaaactatataaagacatatgcagtaaaaagtctgttaatgcacatcctgtgggaatggagtgttctaaccaattgccttttcttgttatctgagctctcctatattatcatactcagataaccaaattaaaagaattagaatatgatttttaatacacttaacattaaactcttctaactttcttctttctgtgataattcagaagatagttatggatcttcaatgcctctgagtcattgttataaaaaatcagttatcactataccatgctataggagactgggcaaaacctgtacaatgacaaccctggaagttgctttttttaaaaaaataataaatttcttaaatcaa

SEQ ID NO: 725008 - DNA, 737 bp, Homo sapiens
  misc_feature (134)..(134): n is a, c, g, or t
cagtggacatctttttccaacggtcaccatatatatcatcaggcagcacatggtcctttcaggaaatgagcgtgggttcgaaggtagtcaccaaacgctttctgtctggatacaaagagcatagacgcctgagnaaagggtatgtagaccgtttacgtgtgagctcagctactcgttcatatcgatcatcgcatgatgtggcatcatctctgaaagtcctctgtgccaatacaggactagtgtttccagctgttggctagataatcattcagtgtgcttaggtacggtatggatggtaatgtctgatgatggcagctgagtcagtaatgtcatggcagcatttcgcagctcagggcacttgaatcaatcagcgccagtagtgctagaacagagtgtacaacatggtctgatcgtgttcgtattatcaatagtcgtatagcgtgcgcgtacagctagtagcctgtcatcaaaggtacatgctaggcttgtccagtacagattcttgatggcagccagtactgtgatacagtcagataagctttatcctaccgcctcggagcatggacatcggagagtagaactccgtctcatatcaaactggctcatagactgtatccagctatatcagtgtgtgttgtcattgattcaatgcaagctttcaagcaagtattcatactgtgtaatactacagtttgccatcgtgagcgctatagtctgccaacacctctgtgcctgag

SEQ ID NO: 725009 - DNA, 217 bp, Homo sapiens
tagacatcgtgttccccaatggtcgtgccgtagctatgggggcccgctatcggcagcagctgtaggtgtaccccatctactccaaactatcggccggggccccgggtgatgtccatatggcggcacttgatctatataccaccaatgtgtcatttatggggcgcccatatcgtctggtacgtagacaacacggatccacgtactgccctgcgagtgc

SEQ ID NO: 725010 - DNA, 5550 bp, Homo sapiens
  misc_feature (29)..(29): n is a, c, g, or t
  misc_feature (60)..(60): n is a, c, g, or t
  misc_feature (127)..(127): n is a, c, g, or t
  misc_feature (2848)..(2848): n is a, c, g, or t
  misc_feature (2850)..(2850): n is a, c, g, or t
  misc_feature (2853)..(2853): n is a, c, g, or t
  misc_feature (2862)..(2862): n is a, c, g, or t
  misc_feature (2865)..(2865): n is a, c, g, or t
  misc_feature (2870)..(2871): n is a, c, g, or t
  misc_feature (2875)..(2875): n is a, c, g, or t
gctcggcgcgagctcgggagctgcccggnggccccggaccgaggcagccctcccctttanaagaagcggaggacaggattgggatccttgaaacccgaaacccagaaacagcatcggagcggaaacnagaggggaaaccttgaactcctccagacaattgcttccggggagttgcgagggagcgagggggaataaaggacccgcgaggaagggcccgcggatggcgcgtccctgagggtcgtggcgagttcgcggagcgtgggaaggagcggaccctgctctccccgggctgcgggccatggccacggcggagcggagagccctcggcatcggcttccagtggctctctttggccactctggtgctcatctgcgccgggcaagggggacgcagggaggatgggggtccagcctgctacggcggatttgacctgtacttcattttggacaaatcaggaagtgtgctgcaccactggaatgaaatctattactttgtggaacagttggctcacaaattcatcagcccacagttgagaatgtcctttattgttttctccacccgaggaacaaccttaatgaaactgacagaagacagagaacaaatccgtcaaggcctagaagaactccagaaagttctgccaggaggagacacttacatgcatgaaggatttgaaagggccagtgagcagatttattatgaaaacagacaagggtacaggacagccagcgtcatcattgctttgactgatggagaactccatgaagatctctttttctattcagagagggaggctaataggtctcgagatcttggtgcaattgtttactgtgttggtgtgaaagatttcaatgagacacagctggcccggattgcggacagtaaggatcatgtgtttcccgtgaatgacggctttcaggctctgcaaggcatcatccactcaattttgaagaagtcctgcatcgaaattctagcagctgaaccatccaccatatgtgcaggagagtcatttcaagttgtcgtgagaggaaacggcttccgacatgcccgcaacgtggacagggtcctctgcagcttcaagatcaatgactcggtcacactcaatgagaagcccttttctgtggaagatacttatttactgtgtccagcgcctatcttaaaagaagttggcatgaaagctgcactccaggtcagcatgaacgatggcctctcttttatctccagttctgtcatcatcaccaccacacactgttctgacggttccatcctggccatcgccctgctgatcctgttcctgctcctagccctggctctcctctggtggttctggcccctctgctgcactgtgattatcaaggaggtccctccaccccctgccgaggagagtgaggaagaagatgatgatggtctgcctaagaaaaagtggccaacggtagacgcctcttattatggtgggagaggcgttggaggcattaaaagaatggaggttcgttggggagaaaagggctccacagaagaaggtgctaagttggaaaaggcaaagaatgcaagagtcaagatgccggagcaggaatatgaattccctgagccgcgaaatctcaacaacaatatgcgtcggccttcttccccccggaagtggtactctccaatcaagggaaaactcgatgccttgtgggtcctactgaggaaaggatatgatcgtgtgtctgtgatgcgtccacagccaggagacacggggcgctgcatcaacttcaccagggtcaagaacaaccagccagccaagtacccactcaacaacgcctaccacactccacctcccaacagggcacctcctccctcccgccctcctccaaggccttctgtctagagcccaaagttcctgctctgggctctctcagaaacttcaggagatgttagaacaagtctttccagttagagaagaggagtggtgataaagcccactgaccttcacacattctaaaaattggttggcaatgccagtataccaacaatcatgatcagctgaaagaaacagatattttaaattgccagaaaacaaatgatgaggcaactacagtcagatttatagccagccatctatcacctctagaaggttccagagacagtgaaactgcaagatgctctcaacaggattatgtctcatggagaccagtaagaaaatcatttatctgaaggtgaaatgcagagttggataagaaatacattgctgggtttctaaaatgctgccttcctgcctctactccacctccatccctggactttggacccttggcctaggagcctaaggaccttcacccctgtgcaccacccaagaaagaggaaaactttgcctacaactttggaaatgctggggtccctggtgtggtaagaaactcaacatcagacgggtatgcagaaggatgttcttctgggatttgcaggtacataaaaaatgtatggcatcttttccttgcaaattcttccagtttccaagtgagaaggggagcaggtgtttactgatggaaaaggtatgttgctatgttgatgtgtaagtgaaatcagttgtgtgcaatagacaggggcgtattcatgggagcatcagccagtttctaaaacccacaggccatcagcagctagaggtggctggctttggccagacatggaccctaaatcaacagacaatggcattgtcgaagagcaacctgttaatgaatcatgttaaaaatcaaggtttggcttcagtttaaatcacttgaggtatgaagtttatcctgttttccagagataaacataagttgatcttcccaaaataccatcattaggacctatcacacaatatcactagttttgntnggnaggtaggtntanggtannttgncttggtaaagccatgcaccacagacttctgggcagagctgagagacaatggtcctgacataataaggatctttgattaacccccataaggcatgtgtgtgtatacaaatatacttctctttggcttttcgacatagaacctcagctgttaaccaaggggaaatacatcagatctgcaacacagaaatgctctgcctgaaatttccaccatgcctaggactcaccccatttatccaggtctttctggatctgtttaatcaataagccctataatcacttgctaaacactgggcttcatcacccagggataaaaacagagatcattgtcttggacctcctgcatcagcctattcaaaattatctctctctctagctttccacaaatcctaaaattcctgtcccaagccacccaaattctcagatcttttctggaacaaggcagaatataaaataaatatacatttagtggcttgggctatggtctccaaagatccttcaaaaatacatcaagccagcttcattcactcactttacttagaacagagatataagggcctgggatgcatttattttatcaataccaatttttgtggccatggcagacattgctaatcaatcacagcactatttcctattaagcccactgatttcttcacaatccttctcaaattacaattccaaagagccgccactcaacagtcagatgaacccaacagtcagatgagagaaatgaaccctacttgctatctctatcttagaaagcaaaaacaaacaggagtttccagggagaatgggaaagccagggggcataaaaggtacagtcaggggaaaatagatctaggcagagtgccttagtcagggaccacgggcgctgaatctgcagtgccaacaccaaactgacacatctccaggtgtacctccaaccctagccttctcccacagctgcctacaacagagtctcccagccttctcagagagctaaaaccagaaatttccagactcatgaaagcaaccccccagcctctccccaaccctgccgcattgtctaatttttagaacactaggcttcttctttcatgtagttcctcataagcaggggccagaatatctcagccacctgcagtgacattgctggacccctgaaaaccattccataggagaatgggttccccaggctcacagtgtagagacattgagcccatcacaactgttttgactgctggcagtctaaaacagtccacccaccccatggcactgccgcgtgattcccgcggccattcagaagttcaagccgagatgctgacgttgctgagcaacgagatggtgagcatcagtgcaaatgcaccattcagcacatcagtcatatgcccagtgcagttacaagatgttgtttcggcaaagcattttgatggaatagggaactgcaaatgtatgatgattttgaaaaggctcagcaggatttgttcttaaaccgactcagtgtgtcatccccggttatttagaattacagttaagaaggagaaacttctataagactgtatgaacaaggtgatatcttcatagtgggctattacaggcaggaaaatgttttaactggtttacaaaatccatcaatacttgtgtcattccctgtaaaaggcaggagacatgtgattatgatcaggaaactgcacaaaattattgttttcagcccccgtgttattgtccttttgaactgtttttttttttattaaagccaaatttgtgttgtatatattcgtattccatgtgttagatggaagcatttcctatccagtgtgaataaaaagaacagttgtagtaaattattataaagccgatgatatttcatggcaggttattctaccaagctgtgcttgttggtttttcccatgactgtattgcttttataaatgtacaaatagttactgaaatgacgagacccttgtttgcacagcattaataagaaccttgataagaaccatattctgttgacagccagctcacagtttcttgcctgaagcttggtgcaccctccagtgagacacaagatctctcttttaccaaagttgagaacagagctggtggattaattaatagtcttcgatatctggccatgggtaacctcattgtaactatcatcagaatgggcagagatgatcttgaagtgtcacatacactaaagtccaaacactatgtcagatgggggtaaaatccattaaagaacaggaaaaaataattataagatgataagcaaatgtttcagcccaatgtcaacccagttaaaaaaaaaattaatgctgtgtaaaatggttgaattagtttgcaaactatataaagacatatgcagtaaaaagtctgttaatgcacatcctgtgggaatggagtgttctaaccaattgccttttcttgttatctgagctctcctatattatcatactcagataaccaaattaaaagaattagaatatgatttttaatacacttaacattaaactcttctaactttcttctttctgtgataattcagaagatagttatggatcttcaatgcctctgagtcattgttataaaaaatcagttatcactataccatgctataggagactgggcaaaacctgtacaatgacaaccctggaagttgctttttttaaaaaaataataaatttcttaaatcaa

SEQ ID NO: 725011 - DNA, 170 bp, Homo sapiens
cccatgtgttttaacgttccggtaatactttactttaggcaccccccctgttgcaagcacccttttgccctatttccaatccagtgttttcagtagaaaatgttcttttgttacatgaaaaaaatgttaagggtgcattgtaaaattaaaaaccccaccttgcggaccca

SEQ ID NO: 725012 - DNA, 4868 bp, Homo sapiens
ctggtgagcttgttattactgatggcttttcagggcagcccctgagcccagtgaaggcctcatattcccctgggttctgaatataactagagccccttagccccaacggctttcctaaattttccacatccaagcctaacagtctccccatgtgtttgtgtatttgctgtgttctcagctggcccggattgcggacagtaaggatcatgtgtttcccgtgaatgacggctttcaggctctgcaaggcatcatccactcaattttgaagaagtcctgcatcgaaattctagcagctgaaccatccaccatatgtgcaggagagtcatttcaagttgtcgtgagaggaaacggcttccgacatgcccgcaacgtggacagggtcctctgcagcttcaagatcaatgactcggtcacactcaatgagaagcccttttctgtggaagatacttatttactgtgtccagcgcctatcttaaaagaagttggcatgaaagctgcactccaggtcagcatgaacgatggcctctcttttatctccagttctgtcatcatcaccaccacacactgttctgacggttccatcctggccatcgccctgctgatcctgttcctgctcctagccctggctctcctctggtggttctggcccctctgctgcactgtgattatcaaggaggtccctccaccccctgccgaggagagtgaggaagaagatgatgatggtctgcctaagaaaaagtggccaacggtagacgcctcttattatggtgggagaggcgttggaggcattaaaagaatggaggttcgttggggagaaaagggctccacagaagaaggtgctaagttggaaaaggcaaagaatgcaagagtcaagatgccggagcaggaatatgaattccctgagccgcgaaatctcaacaacaatatgcgtcggccttcttccccccggaagtggtactctccaatcaagggaaaactcgatgccttgtgggtcctactgaggaaaggatatgatcgtgtgtctgtgatgcgtccacagccaggagacacggggcgctgcatcaacttcaccagggtcaagaacaaccagccagccaagtacccactcaacaacgcctaccacactccacctcccaacagggcacctcctccctcccgccctcctccaaggccttctgtctagagcccaaagttcctgctctgggctctctcagaaacttcaggagatgttagaacaagtctttccagttagagaagaggagtggtgataaagcccactgaccttcacacattctaaaaattggttggcaatgccagtataccaacaatcatgatcagctgaaagaaacagatattttaaattgccagaaaacaaatgatgaggcaactacagtcagatttatagccagccatctatcacctctagaaggttccagagacagtgaaactgcaagatgctctcaacaggattatgtctcatggagaccagtaagaaaatcatttatctgaaggtgaaatgcagagttggataagaaatacattgctgggtttctaaaatgctgccttcctgcctctactccacctccatccctggactttggacccttggcctaggagcctaaggaccttcacccctgtgcaccacccaagaaagaggaaaactttgcctacaactttggaaatgctggggtccctggtgtggtaagaaactcaacatcagacgggtatgcagaaggatgttcttctgggatttgcaggtacataaaaaatgtatggcatcttttccttgcaaattcttccagtttccaagtgagaaggggagcaggtgtttactgatggaaaaggtatgttgctatgttgatgtgtaagtgaaatcagttgtgtgcaatagacaggggcgtattcatgggagcatcagccagtttctaaaacccacaggccatcagcagctagaggtggctggctttggccagacatggaccctaaatcaacagacaatggcattgtcgaagagcaacctgttaatgaatcatgttaaaaatcaaggtttggcttcagtttaaatcacttgaggtatgaagtttatcctgttttccagagataaacataagttgatcttcccaaaataccatcattaggacctatcacacaatatcactagttttttttgtttgtttgttttttgttttttttcttggtaaagccatgcaccacagacttctgggcagagctgagagacaatggtcctgacataataaggatctttgattaacccccataaggcatgtgtgtgtatacaaatatacttctctttggcttttcgacatagaacctcagctgttaaccaaggggaaatacatcagatctgcaacacagaaatgctctgcctgaaatttccaccatgcctaggactcaccccatttatccaggtctttctggatctgtttaatcaataagccctataatcacttgctaaacactgggcttcatcacccagggataaaaacagagatcattgtcttggacctcctgcatcagcctattcaaaattatctctctctctagctttccacaaatcctaaaattcctgtcccaagccacccaaattctcagatcttttctggaacaaggcagaatataaaataaatatacatttagtggcttgggctatggtctccaaagatccttcaaaaatacatcaagccagcttcattcactcactttacttagaacagagatataagggcctgggatgcatttattttatcaataccaatttttgtggccatggcagacattgctaatcaatcacagcactatttcctattaagcccactgatttcttcacaatccttctcaaattacaattccaaagagccgccactcaacagtcagatgaacccaacagtcagatgagagaaatgaaccctacttgctatctctatcttagaaagcaaaaacaaacaggagtttccagggagaatgggaaagccagggggcataaaaggtacagtcaggggaaaatagatctaggcagagtgccttagtcagggaccacgggcgctgaatctgcagtgccaacaccaaactgacacatctccaggtgtacctccaaccctagccttctcccacagctgcctacaacagagtctcccagccttctcagagagctaaaaccagaaatttccagactcatgaaagcaaccccccagcctctccccaaccctgccgcattgtctaatttttagaacactaggcttcttctttcatgtagttcctcataagcaggggccagaatatctcagccacctgcagtgacattgctggacccctgaaaaccattccataggagaatgggttccccaggctcacagtgtagagacattgagcccatcacaactgttttgactgctggcagtctaaaacagtccacccaccccatggcactgccgcgtgattcccgcggccattcagaagttcaagccgagatgctgacgttgctgagcaacgagatggtgagcatcagtgcaaatgcaccattcagcacatcagtcatatgcccagtgcagttacaagatgttgtttcggcaaagcattttgatggaatagggaactgcaaatgtatgatgattttgaaaaggctcagcaggatttgttcttaaaccgactcagtgtgtcatccccggttatttagaattacagttaagaaggagaaacttctataagactgtatgaacaaggtgatatcttcatagtgggctattacaggcaggaaaatgttttaactggtttacaaaatccatcaatacttgtgtcattccctgtaaaaggcaggagacatgtgattatgatcaggaaactgcacaaaattattgttttcagcccccgtgttattgtccttttgaactgtttttttttttattaaagccaaatttgtgttgtatatattcgtattccatgtgttagatggaagcatttcctatccagtgtgaataaaaagaacagttgtagtaaattattataaagccgatgatatttcatggcaggttattctaccaagctgtgcttgttggtttttcccatgactgtattgcttttataaatgtacaaatagttactgaaatgacgagacccttgtttgcacagcattaataagaaccttgataagaaccatattctgttgacagccagctcacagtttcttgcctgaagcttggtgcaccctccagtgagacacaagatctctcttttaccaaagttgagaacagagctggtggattaattaatagtcttcgatatctggccatgggtaacctcattgtaactatcatcagaatgggcagagatgatcttgaagtgtcacatacactaaagtccaaacactatgtcagatgggggtaaaatccattaaagaacaggaaaaaataattataagatgataagcaaatgtttcagcccaatgtcaacccagttaaaaaaaaaattaatgctgtgtaaaatggttgaattagtttgcaaactatataaagacatatgcagtaaaaagtctgttaatgcacatcctgtgggaatggagtgttctaaccaattgccttttcttgttatctgagctctcctatattatcatactcagataaccaaattaaaagaattagaatatgatttttaatacacttaacattaaactcttctaactttcttctttctgtgataattcagaagatagttatggatcttcaatgcctctgagtcattgttataaaaaatcagttatcactataccatgctataggagactgggcaaaacctgtacaatgacaaccctggaagttgctttttttaaaaaaataataaatttcttaaatcaa

SEQ ID NO: 725013 - DNA, 171 bp, Homo sapiens
agtgacatcgactcgtggtactggaggatctctagagtcgacaggctccatgtaaacgtgatactggagggccgtatgatagctcacgttgtcgagcggaacttgtacagtgtaggcatgcacctggcgtggtgaatacacgtcgaactggctgcatgtttgcgttattgg

SEQ ID NO: 725014 - DNA, 4310 bp, Homo sapiens
ccagttttcattgctggcagaagccatatcacaggaacatcaagaacttaaagccagaaccacaaatatcggatatttgtggttctggcccctctgctgcactgtgattatcaaggaggtccctccaccccctgccgaggagagtgaggaagaagatgatgatggtctgcctaagaaaaagtggccaacggtagacgcctcttattatggtgggagaggcgttggaggcattaaaagaatggaggttcgttggggagaaaagggctccacagaagaaggtgctaagttggaaaaggcaaagaatgcaagagtcaagatgccggagcaggaatatgaattccctgagccgcgaaatctcaacaacaatatgcgtcggccttcttccccccggaagtggtactctccaatcaagggaaaactcgatgccttgtgggtcctactgaggaaaggatatgatcgtgtgtctgtgatgcgtccacagccaggagacacggggcgctgcatcaacttcaccagggtcaagaacaaccagccagccaagtacccactcaacaacgcctaccacactccacctcccaacagggcacctcctccctcccgccctcctccaaggccttctgtctagagcccaaagttcctgctctgggctctctcagaaacttcaggagatgttagaacaagtctttccagttagagaagaggagtggtgataaagcccactgaccttcacacattctaaaaattggttggcaatgccagtataccaacaatcatgatcagctgaaagaaacagatattttaaattgccagaaaacaaatgatgaggcaactacagtcagatttatagccagccatctatcacctctagaaggttccagagacagtgaaactgcaagatgctctcaacaggattatgtctcatggagaccagtaagaaaatcatttatctgaaggtgaaatgcagagttggataagaaatacattgctgggtttctaaaatgctgccttcctgcctctactccacctccatccctggactttggacccttggcctaggagcctaaggaccttcacccctgtgcaccacccaagaaagaggaaaactttgcctacaactttggaaatgctggggtccctggtgtggtaagaaactcaacatcagacgggtatgcagaaggatgttcttctgggatttgcaggtacataaaaaatgtatggcatcttttccttgcaaattcttccagtttccaagtgagaaggggagcaggtgtttactgatggaaaaggtatgttgctatgttgatgtgtaagtgaaatcagttgtgtgcaatagacaggggcgtattcatgggagcatcagccagtttctaaaacccacaggccatcagcagctagaggtggctggctttggccagacatggaccctaaatcaacagacaatggcattgtcgaagagcaacctgttaatgaatcatgttaaaaatcaaggtttggcttcagtttaaatcacttgaggtatgaagtttatcctgttttccagagataaacataagttgatcttcccaaaataccatcattaggacctatcacacaatatcactagttttttttgtttgtttgttttttgttttttttcttggtaaagccatgcaccacagacttctgggcagagctgagagacaatggtcctgacataataaggatctttgattaacccccataaggcatgtgtgtgtatacaaatatacttctctttggcttttcgacatagaacctcagctgttaaccaaggggaaatacatcagatctgcaacacagaaatgctctgcctgaaatttccaccatgcctaggactcaccccatttatccaggtctttctggatctgtttaatcaataagccctataatcacttgctaaacactgggcttcatcacccagggataaaaacagagatcattgtcttggacctcctgcatcagcctattcaaaattatctctctctctagctttccacaaatcctaaaattcctgtcccaagccacccaaattctcagatcttttctggaacaaggcagaatataaaataaatatacatttagtggcttgggctatggtctccaaagatccttcaaaaatacatcaagccagcttcattcactcactttacttagaacagagatataagggcctgggatgcatttattttatcaataccaatttttgtggccatggcagacattgctaatcaatcacagcactatttcctattaagcccactgatttcttcacaatccttctcaaattacaattccaaagagccgccactcaacagtcagatgaacccaacagtcagatgagagaaatgaaccctacttgctatctctatcttagaaagcaaaaacaaacaggagtttccagggagaatgggaaagccagggggcataaaaggtacagtcaggggaaaatagatctaggcagagtgccttagtcagggaccacgggcgctgaatctgcagtgccaacaccaaactgacacatctccaggtgtacctccaaccctagccttctcccacagctgcctacaacagagtctcccagccttctcagagagctaaaaccagaaatttccagactcatgaaagcaaccccccagcctctccccaaccctgccgcattgtctaatttttagaacactaggcttcttctttcatgtagttcctcataagcaggggccagaatatctcagccacctgcagtgacattgctggacccctgaaaaccattccataggagaatgggttccccaggctcacagtgtagagacattgagcccatcacaactgttttgactgctggcagtctaaaacagtccacccaccccatggcactgccgcgtgattcccgcggccattcagaagttcaagccgagatgctgacgttgctgagcaacgagatggtgagcatcagtgcaaatgcaccattcagcacatcagtcatatgcccagtgcagttacaagatgttgtttcggcaaagcattttgatggaatagggaactgcaaatgtatgatgattttgaaaaggctcagcaggatttgttcttaaaccgactcagtgtgtcatccccggttatttagaattacagttaagaaggagaaacttctataagactgtatgaacaaggtgatatcttcatagtgggctattacaggcaggaaaatgttttaactggtttacaaaatccatcaatacttgtgtcattccctgtaaaaggcaggagacatgtgattatgatcaggaaactgcacaaaattattgttttcagcccccgtgttattgtccttttgaactgtttttttttttattaaagccaaatttgtgttgtatatattcgtattccatgtgttagatggaagcatttcctatccagtgtgaataaaaagaacagttgtagtaaattattataaagccgatgatatttcatggcaggttattctaccaagctgtgcttgttggtttttcccatgactgtattgcttttataaatgtacaaatagttactgaaatgacgagacccttgtttgcacagcattaataagaaccttgataagaaccatattctgttgacagccagctcacagtttcttgcctgaagcttggtgcaccctccagtgagacacaagatctctcttttaccaaagttgagaacagagctggtggattaattaatagtcttcgatatctggccatgggtaacctcattgtaactatcatcagaatgggcagagatgatcttgaagtgtcacatacactaaagtccaaacactatgtcagatgggggtaaaatccattaaagaacaggaaaaaataattataagatgataagcaaatgtttcagcccaatgtcaacccagttaaaaaaaaaattaatgctgtgtaaaatggttgaattagtttgcaaactatataaagacatatgcagtaaaaagtctgttaatgcacatcctgtgggaatggagtgttctaaccaattgccttttcttgttatctgagctctcctatattatcatactcagataaccaaattaaaagaattagaatatgatttttaatacacttaacattaaactcttctaactttcttctttctgtgataattcagaagatagttatggatcttcaatgcctctgagtcattgttataaaaaatcagttatcactataccatgctataggagactgggcaaaacctgtacaatgacaaccctggaagttgctttttttaaaaaaataataaatttcttaaatcaa

SEQ ID NO: 725015 - DNA, 5808 bp, Homo sapiens
  misc_feature (29)..(29): n is a, c, g, or t
  misc_feature (60)..(60): n is a, c, g, or t
  misc_feature (127)..(127): n is a, c, g, or t
gctcggcgcgagctcgggagctgcccggnggccccggaccgaggcagccctcccctttanaagaagcggaggacaggattgggatccttgaaacccgaaacccagaaacagcatcggagcggaaacnagaggggaaaccttgaactcctccagacaattgcttccggggagttgcgagggagcgagggggaataaaggacccgcgaggaagggcccgcggatggcgcgtccctgagggtcgtggcgagttcgcggagcgtgggaaggagcggaccctgctctccccgggctgcgggccatggccacggcggagcggagagccctcggcatcggcttccagtggctctctttggccactctggtgctcatctgcgccgggcaagggggacgcagggaggatgggggtccagcctgctacggcggatttgacctgtacttcattttggacaaatcaggaagtgtgctgcaccactggaatgaaatctattactttgtggaacagttggctcacaaattcatcagcccacagttgagaatgtcctttattgttttctccacccgaggaacaaccttaatgaaactgacagaagacagagaacaaatccgtcaaggcctagaagaactccagaaagttctgccaggaggagacacttacatgcatgaaggatttgaaagggccagtgagcagatttattatgaaaacagacaagggtacaggacagccagcgtcatcattgctttgactgatggagaactccatgaagatctctttttctattcagagagggaggctaataggtctcgagatcttggtgcaattgtttactgtgttggtgtgaaagatttcaatgagacacagctggcccggattgcggacagtaaggatcatgtgtttcccgtgaatgacggctttcaggctctgcaaggcatcatccactcaattttgaagaagtcctgcatcgaaattctagcagctgaaccatccaccatatgtgcaggagagtcatttcaagttgtcgtgagaggaaacggcttccgacatgcccgcaacgtggacagggtcctctgcagcttcaagatcaatgactcggtcacactcaatgagaagcccttttctgtggaagatacttatttactgtgtccagcgcctatcttaaaagaagttggcatgaaagctgcactccaggtcagcatgaacgatggcctctcttttatctccagttctgtcatcatcaccaccacacactgttctgacggttccatcctggccatcgccctgctgatcctgttcctgctcctagccctggctctcctctggtggttctggcccctctgctgcactgtgattatcaaggaggtccctccaccccctgccgaggagagtgaggaagaagatgatgatggtctgcctaagaaaaagtggccaacggtagacgcctcttattatggtgggagaggcgttggaggcattaaaagaatggaggttcgttggggagaaaagggctccacagaagaaggtgctaagttggaaaaggcaaagaatgcaagagtcaagatgccggagcaggaatatgaattccctgagccgcgaaatctcaacaacaatatgcgtcggccttcttccccccggaagtggtactctccaatcaagggaaaactcgatgccttgtgggtcctactgaggaaaggatatgatcgtgtgtctgtgatgcgtccacagccaggagacacggggcgctgcatcaacttcaccagggtcaagaacaaccagccagccaagtacccactcaacaacgcctaccacactccacctcccaacagggcacctcctccctcccgccctcctccaaggccttctgtctagagcccaaagttcctgctctgggctctctcagaaacttcaggagatgttagaacaagtctttccagttagagaagaggagtggtgataaagcccactgaccttcacacattctaaaaattggttggcaatgccagtataccaacaatcatgatcagctgaaagaaacagatattttaaattgccagaaaacaaatgatgaggcaactacagtcagatttatagccagccatctatcacctctagaaggttccagagacagtgaaactgcaagatgctctcaacaggattatgtctcatggagaccagtaagaaaatcatttatctgaaggtgaaatgcagagttggataagaaatacattgctgggtttctaaaatgctgccttcctgcctctactccacctccatccctggactttggacccttggcctaggagcctaaggaccttcacccctgtgcaccacccaagaaagaggaaaactttgcctacaactttggaaatgctggggtccctggtgtggtaagaaactcaacatcagacgggtatgcagaaggatgttcttctgggatttgcaggtacataaaaaatgtatggcatcttttccttgcaaattcttccagtttccaagtgagaaggggagcaggtgtttactgatggaaaaggtatgttgctatgttgatgtgtaagtgaaatcagttgtgtgcaatagacaggggcgtattcatgggagcatcagccagtttctaaaacccacaggccatcagcagctagaggtggctggctttggccagacatggaccctaaatcaacagacaatggcattgtcgaagagcaacctgttaatgaatcatgttaaaaatcaaggtttggcttcagtttaaatcacttgaggtatgaagtttatcctgttttccagagataaacataagttgatcttcccaaaataccatcattaggacctatcacacaatatcactagttttttttgtttgtttgttttttgttttttttcttggtaaagccatgcaccacagacttctgggcagagctgagagacaatggtcctgacataataaggatctttgattaacccccataaggcatgtgtgtgtatacaaatatacttctctttggcttttcgacatagaacctcagctgttaaccaaggggaaatacatcagatctgcaacacagaaatgctctgcctgaaatttccaccatgcctaggactcaccccatttatccaggtctttctggatctgtttaatcaataagccctataatcacttgctaaacactgggcttcatcacccagggataaaaacagagatcattgtcttggacctcctgcatcagcctattcaaaattatctctctctctagctttccacaaatcctaaaattcctgtcccaagccacccaaattctcagatcttttctggaacaaggcagaatataaaataaatatacatttagtggcttgggctatggtctccaaagatccttcaaaaatacatcaagccagcttcattcactcactttacttagaacagagatataagggcctgggatgcatttattttatcaataccaatttttgtggccatggcagacattgctaatcaatcacagcactatttcctattaagcccactgatttcttcacaatccttctcaaattacaattccaaagagccgccactcaacagtcagatgaacccaacagtcagatgagagaaatgaaccctacttgctatctctatcttagaaagcaaaaacaaacaggagtttccagggagaatgggaaagccagggggcataaaaggtacagtcaggggaaaatagatctaggcagagtgccttagtcagggaccacgggcgctgaatctgcagtgccaacaccaaactgacacatctccaggtgtacctccaaccctagccttctcccacagctgcctacaacagagtctcccagccttctcagagagctaaaaccagaaatttccagactcatgaaagcaaccccccagcctctccccaaccctgccgcattgtctaatttttagaacactaggcttcttctttcatgtagttcctcataagcaggggccagaatatctcagccacctgcagtgacattgctggacccctgaaaaccattccataggagaatgggttccccaggctcacagtgtagagacattgagcccatcacaactgttttgactgctggcagtctaaaacagtccacccaccccatggcactgccgcgtgattcccgcggccattcagaagttcaagccgagatgctgacgttgctgagcaacgagatggtgagcatcagtgcaaatgcaccattcagcacatcagtcatatgcccagtgcagttacaagatgttgtttcggcaaagcattttgatggaatagggaactgcaaatgtatgatgattttgaaaaggctcagcaggatttgttcttaaaccgactcagtgtgtcatccccggttatttagaattacagttaagaaggagaaacttctataagactgtatgaacaaggtgatatcttcatagtgggctattacaggcaggaaaatgttttaactggtttacaaaatccatcaatacttgtgtcattccctgtaaaaggcaggagacatgtgattatgatcaggaaactgcacaaaattattgttttcagcccccgtgttattgtccttttgaactgtttttttttttattaaagccaaatttgtgttgtatatattcgtattccatgtgttagatggaagcatttcctatccagtgtgaataaaaagaacagttgtagtaaattattataaagccgatgatatttcatggcaggttattctaccaagctgtgcttgttggtttttcccatgactgtattgcttttataaatgtacaaatagttactgaaatgacgagacccttgtttgcacagcattaataagaaccttgataagaaccatattctgttgacagccagctcacagtttcttgcctgaagcttggtgcaccctccagtgagacacaagatctctcttttaccaaagttgagaacagagctggtggattaattaatagtcttcgatatctggccatgggtaacctcattgtaactatcatcagaatgggcagagatgatcttgaagtgtcacatacactaaagtccaaacactatgtcagatgggggtaaaatccattaaagaacaggaaaaaataattataagatgataagcaaatgtttcagcccaatgtcaacccagttaaaaaaaaaattaatgctgtgtaaaatggttgaattagtttgcaaactatataaagacatatgcagtaaaaagtctgttaatgcacatcctgtgggaatggagtgttctaaccaattgccttttcttgttatctgagctctcctatattatcatactcagataaccaaattaaaagaattagaatatgatttttaatacacttaacattaaactcttctaactttcttctttctgtgataattcagaagatagttatggatcttcaatgcctctgagtcattgttataaaaaatcagttatcactataccatgctataggagactgggcaaaacctgtacaatgacaaccctggaagttgctttttttaaaaaaataataaatttcttaaatcaaaaaaaaaattgctgggacagcgaaatggaggggtgtgtgtctaacctaatggtctgaacctggctaacgcgggaagcggacagtgacgggaaaaccgggggaaaacccggcgacaaaaggacgagcaaacgttgccggggcgcctcgacacaaaagagaaaatatgacatacaatggacaacacacaaaggagaggcgccacagagaggggcggaaaaagccacgaggagagggcacacctagagacaccgaggaccgc

SEQ ID NO: 725016 - DNA, 5711 bp, Homo sapiens
  misc_feature (29)..(29): n is a, c, g, or t
  misc_feature (60)..(60): n is a, c, g, or t
  misc_feature (127)..(127): n is a, c, g, or t
gctcggcgcgagctcgggagctgcccggnggccccggaccgaggcagccctcccctttanaagaagcggaggacaggattgggatccttgaaacccgaaacccagaaacagcatcggagcggaaacnagaggggaaaccttgaactcctccagacaattgcttccggggagttgcgagggagcgagggggaataaaggacccgcgaggaagggcccgcggatggcgcgtccctgagggtcgtggcgagttcgcggagcgtgggaaggagcggaccctgctctccccgggctgcgggccatggccacggcggagcggagagccctcggcatcggcttccagtggctctctttggccactctggtgctcatctgcgccgggcaagggggacgcagggaggatgggggtccagcctgctacggcggatttgacctgtacttcattttggacaaatcaggaagtgtgctgcaccactggaatgaaatctattactttgtggaacagttggctcacaaattcatcagcccacagttgagaatgtcctttattgttttctccacccgaggaacaaccttaatgaaactgacagaagacagagaacaaatccgtcaaggcctagaagaactccagaaagttctgccaggaggagacacttacatgcatgaaggatttgaaagggccagtgagcagatttattatgaaaacagacaagggtacaggacagccagcgtcatcattgctttgactgatggagaactccatgaagatctctttttctattcagagagggaggctaataggtctcgagatcttggtgcaattgtttactgtgttggtgtgaaagatttcaatgagacacagctggcccggattgcggacagtaaggatcatgtgtttcccgtgaatgacggctttcaggctctgcaaggcatcatccactcaattttgaagaagtcctgcatcgaaattctagcagctgaaccatccaccatatgtgcaggagagtcatttcaagttgtcgtgagaggaaacggcttccgacatgcccgcaacgtggacagggtcctctgcagcttcaagatcaatgactcggtcacactcaatgagaagcccttttctgtggaagatacttatttactgtgtccagcgcctatcttaaaagaagttggcatgaaagctgcactccaggtcagcatgaacgatggcctctcttttatctccagttctgtcatcatcaccaccacacactgttctgacggttccatcctggccatcgccctgctgatcctgttcctgctcctagccctggctctcctctggtggttctggcccctctgctgcactgtgattatcaaggaggtccctccaccccctgccgaggagagtgaggaagaagatgatgatggtctgcctaagaaaaagtggccaacggtagacgcctcttattatggtgggagaggcgttggaggcattaaaagaatggaggttcgttggggagaaaagggctccacagaagaaggtgctaagttggaaaaggcaaagaatgcaagagtcaagatgccggagcaggaatatgaattccctgagccgcgaaatctcaacaacaatatgcgtcggccttcttccccccggaagtggtactctccaatcaagggaaaactcgatgccttgtgggtcctactgaggaaaggatatgatcgtgtgtctgtgatgcgtccacagccaggagacacggggcgctgcatcaacttcaccagggtcaagaacaaccagccagccaagtacccactcaacaacgcctaccacactccacctcccaacagggcacctcctccctcccgccctcctccaaggccttctgtctagagcccaaagttcctgctctgggctctctcagaaacttcaggagatgttagaacaagtctttccagttagagaagaggagtggtgataaagcccactgaccttcacacattctaaaaattggttggcaatgccagtataccaacaatcatgatcagctgaaagaaacagatattttaaattgccagaaaacaaatgatgaggcaactacagtcagatttatagccagccatctatcacctctagaaggttccagagacagtgaaactgcaagatgctctcaacaggattatgtctcatggagaccagtaagaaaatcatttatctgaaggtgaaatgcagagttggataagaaatacattgctgggtttctaaaatgctgccttcctgcctctactccacctccatccctggactttggacccttggcctaggagcctaaggaccttcacccctgtgcaccacccaagaaagaggaaaactttgcctacaactttggaaatgctggggtccctggtgtggtaagaaactcaacatcagacgggtatgcagaaggatgttcttctgggatttgcaggtacataaaaaatgtatggcatcttttccttgcaaattcttccagtttccaagtgagaaggggagcaggtgtttactgatggaaaaggtatgttgctatgttgatgtgtaagtgaaatcagttgtgtgcaatagacaggggcgtattcatgggagcatcagccagtttctaaaacccacaggccatcagcagctagaggtggctggctttggccagacatggaccctaaatcaacagacaatggcattgtcgaagagcaacctgttaatgaatcatgttaaaaatcaaggtttggcttcagtttaaatcacttgaggtatgaagtttatcctgttttccagagataaacataagttgatcttcccaaaataccatcattaggacctatcacacaatatcactagttttttttgtttgtttgttttttgttttttttcttggtaaagccatgcaccacagacttctgggcagagctgagagacaatggtcctgacataataaggatctttgattaacccccataaggcatgtgtgtgtatacaaatatacttctctttggcttttcgacatagaacctcagctgttaaccaaggggaaatacatcagatctgcaacacagaaatgctctgcctgaaatttccaccatgcctaggactcaccccatttatccaggtctttctggatctgtttaatcaataagccctataatcacttgctaaacactgggcttcatcacccagggataaaaacagagatcattgtcttggacctcctgcatcagcctattcaaaattatctctctctctagctttccacaaatcctaaaattcctgtcccaagccacccaaattctcagatcttttctggaacaaggcagaatataaaataaatatacatttagtggcttgggctatggtctccaaagatccttcaaaaatacatcaagccagcttcattcactcactttacttagaacagagatataagggcctgggatgcatttattttatcaataccaatttttgtggccatggcagacattgctaatcaatcacagcactatttcctattaagcccactgatttcttcacaatccttctcaaattacaattccaaagagccgccactcaacagtcagatgaacccaacagtcagatgagagaaatgaaccctacttgctatctctatcttagaaagcaaaaacaaacaggagtttccagggagaatgggaaagccagggggcataaaaggtacagtcaggggaaaatagatctaggcagagtgccttagtcagggaccacgggcgctgaatctgcagtgccaacaccaaactgacacatctccaggtgtacctccaaccctagccttctcccacagctgcctacaacagagtctcccagccttctcagagagctaaaaccagaaatttccagactcatgaaagcaaccccccagcctctccccaaccctgccgcattgtctaatttttagaacactaggcttcttctttcatgtagttcctcataagcaggggccagaatatctcagccacctgcagtgacattgctggacccctgaaaaccattccataggagaatgggttccccaggctcacagtgtagagacattgagcccatcacaactgttttgactgctggcagtctaaaacagtccacccaccccatggcactgccgcgtgattcccgcggccattcagaagttcaagccgagatgctgacgttgctgagcaacgagatggtgagcatcagtgcaaatgcaccattcagcacatcagtcatatgcccagtgcagttacaagatgttgtttcggcaaagcattttgatggaatagggaactgcaaatgtatgatgattttgaaaaggctcagcaggatttgttcttaaaccgactcagtgtgtcatccccggttatttagaattacagttaagaaggagaaacttctataagactgtatgaacaaggtgatatcttcatagtgggctattacaggcaggaaaatgttttaactggtttacaaaatccatcaatacttgtgtcattccctgtaaaaggcaggagacatgtgattatgatcaggaaactgcacaaaattattgttttcagcccccgtgttattgtccttttgaactgtttttttttttattaaagccaaatttgtgttgtatatattcgtattccatgtgttagatggaagcatttcctatccagtgtgaataaaaagaacagttgtagtaaattattataaagccgatgatatttcatggcaggttattctaccaagctgtgcttgttggtttttcccatgactgtattgcttttataaatgtacaaatagttactgaaatgacgagacccttgtttgcacagcattaataagaaccttgataagaaccatattctgttgacagccagctcacagtttcttgcctgaagcttggtgcaccctccagtgagacacaagatctctcttttaccaaagttgagaacagagctggtggattaattaatagtcttcgatatctggccatgggtaacctcattgtaactatcatcagaatgggcagagatgatcttgaagtgtcacatacactaaagtccaaacactatgtcagatgggggtaaaatccattaaagaacaggaaaaaataattataagatgataagcaaatgtttcagcccaatgtcaacccagttaaaaaaaaaattaatgctgtgtaaaatggttgaattagtttgcaaactatataaagacatatgcagtaaaaagtctgttaatgcacatcctgtgggaatggagtgttctaaccaattgccttttcttgttatctgagctctcctatattatcatactcagataaccaaattaaaagaattagaatatgatttttaatacacttaacattaaactcttctaactttcttctttctgtgataattcagaagatagttatggatcttcaatgcctctgagtcattgttataaaaaatcagttatcactataccatgctataggagactgggcaaaacctgtacaatgacaaccctggaagttgctttttttaaaaaaataataaatttcttaaatcaactcttttttctggttgtctgtttgttataaagtgcaacgtattcaagtcctcaatatcctgatcataataccatgctataggagactgggcaaaacctgtacaatgacaaccctggaagttgcttttttaaaaaaaataataaatttcttaaatcaactctt

SEQ ID NO: 725017 - DNA, 663 bp, Homo sapiens
gcttcgcaataaatcttgctgctgctcactctttgggtttacactacctttatgagctgtaacactcaccgcgaaggtctgcagcttcactccaagccagcgagaccaggaacgcaccaggaggaacaaacaatccagacatgccacctttaagagctgtaacactcactgcaaaggtctgtggcttcactcctaaagtcagtgagaccacgaacccaacgaaagaaactccggacacatctgaatatctgaaggaacaaactccagaacaccatctttaagaactgtgacgactcaccgcaagggtctgcagcttcattcttgaagtcagcgagagcaaagaacccaccagaaggaaccaattctggacacattatggtggaccacgaaggcactatgtagtcgtagttcactaagcgaatcaaggacatcatattgacagatggtcttacaaacggaaacccagaggagctcaactaacaacttctaccgaggacccctggaacgaaccactggcctttcactggcctagagagttcccctctggaggacactacaactgcagggcccttctttagccctgtacagcaggaagtagctagagcagtcattgccaattcccaaaagcagatggggtgcctgtttagaggcgggatgagaggg

SEQ ID NO: 725018 - DNA, 1505 bp, Homo sapiens
ctgggcacgctgtccttgctgttctgtgccagctgtgccagacagttcctgcagctgcttacctgcctgtgcctctcgtgttcctgctgtgctgcacctgtgagtggacacgcactgtctgctgtgctgtgctgtgcacacagctgaccgacgaactgaccgtgtgtggacagccctcgacaaacatgtgacgacactgaccctctgattgcaagactgcaaaccttgaagactcacttttgtgaatacttattacactacttgtacacactgtacggtgaccgacacacacgaccgttgcgcttgacttccattattgtgacggatgcacagccctacgaaatgtggacttgagcatttgggttgtcagtatgggacaatcgccttgacttcctttctcttaaacctaagcagagactgacaaacgaattacttatagatggtgcttatcctttatatggttcaccatggttgtggccagctgagccctcaatattaaccgcgttggaagcacacggccttggaccaaattgtatatcacacgagagccaatttatcgatatttggggagcttacactttggaagtgggccacgagtagaccatatccaacacaatttatatgagagtagggacgggacacctcttatggtcacggacaaagggaccaactattgtaacttatacggctaccaaacagcatttacaaccacgcaaactcacttattgtacacagggcgacgaatccatagttctacttacactttggacacagtagccccgttgcttactttatattggcagatccccggatagatatatatttacttcccttggagataccattatggcttagagcgacttctgtgctacacttgttttgaacatcttgccccatgaggcaccccaatatacaaaactttggtgttttggcattacgtaggttagatatggacacaacaatcttaattgggtacacaacgctgagtcaaccaatccaaggatggaagctgaaaaaggaatttgggttaccccattccaaagggttaggctcgtacacacaagacagtatggggagcagattggttacgtagctatgcatcataaataatatttggtacagagatccagttttattggtacccgattggtggcagtgtttgggtcactacatcggtgcaagcattgtgatctcccgagaaccacgagtacaataggtaacaattgttaccagggtgaaagtggtgagactcacggagccaatatctgttgatgtcgccaaaacacgacctggcactagcgactcataatctatttaaactaccgggacgacgacacaagacacgaacaacacatgtgttatacccccagtggtatccaccgtggatactggcacagcagggagtgactatcgaatagcaagcagatatacaccacaaggacagctaccggacattgatacgtcatatagccactgtgttggtaccacgacctactcgaggaacc

SEQ ID NO: 725019 - DNA, 190 bp, Homo sapiens
tgaacgcacgcctgctgagtagctgggactataggaacccaccaccatgcccggtgagtgttttttttgactatgtttttttgtttatgtatttttagtagagacagggtttttcaccgtgttagccaggatggcctcaatctcctgacctcgcgatccgcccgcctcggcctcccaaagtgctgggatt

SEQ ID NO: 725020 - DNA, 611 bp, Homo sapiens
  misc_feature (62)..(62): n is a, c, g, or t
  misc_feature (79)..(79): n is a, c, g, or t
ctcagggtgaaacgaggtttctgaaagtcatccgaacaggaaagagacagaaaaaggcctgnaagagaatggtgaccanagtctgtttcgtaggagacggtttcacccgcaaaccgcccaaatatgagcgcttcatcagacctatgggtatgcggtttaacaaggcacacgtcactcaccctgaactgaaggccacattctgtttgcccatcctgggtgtgaagaagaacccgtcctcctcgctgtacacaacactcggggtcatcacgaagggaacggtcatcgaggtcaacgtcagcgagctcggattggtcacacagggcggaaaggtcatctggggtaaatacgcccaggtgacgaataacccaagaaaatgatggctgtattaatgccgtgttgctggtttaacggagaccctgaaaggtttattattgaactgtgcccccgagtacagctggaaagtgcttttctctggaaaacccccatcatcatcgtcattatccagggaatattgaaattgcaaaagaagatttgaagacctctgatggagttttgtttcacctttgcattcggattcacgtggatcagaaataaagtgctgtttattttca

SEQ ID NO: 725021 - DNA, 186 bp, Homo sapiens
gctctccgtgccttaagggaaaagcgggacagctccccccaccctgctgggggccagttttccccaaccccagggcagaaagacgctggagccaggcccggctttcaaagcgtgttttgccttagacccccgtgagggctctcggaaaaagtgtgtgtattccttttttaataaagtgtgggctga

SEQ ID NO: 725022 - DNA, 211 bp, Homo sapiens
taatgcgtgtacaaggggagactgagagtagtagatggcttaggtttggcttgggtgtcagaggtagagataaagaggtgtcatgacatgatggacttacgagggccaggagaaccaggaccaggaaaaacgaagcctctaaagtgggctagggttccttcaggggctggtgccagaagaaaaccgagtgtagaaagactggggagtaggc

SEQ ID NO: 725023 - DNA, 171 bp, Homo sapiens
tagagctctagccgggtaactctgtctattcccactgtctctactaacaatacaaaaaattagccgggcgtggtggcgggccctgtagtaccagctactcgggaggctagaggcatgagacacggcgtgaacccagagcagccagacgcttgcagtgacgctgacactggc

SEQ ID NO: 725024 - DNA, 376 bp, Homo sapiens
ctaatgtgagtagaggggtgcgcgggacacaggccgtcgtgctagaggtgatgataggccattctccgtaatgtgattattacatattgaatacctgtatcaacatattacatgtaccccataaatatatacacctatcatataccctcaaaaattaattttttttttttggagagggagtctggcggtcacccaggcgggattgcaggggtgcgatcgcaactcacggtaacctcggcctcccaagttcaagagattctccggcctcagccttctgagtagctgagattacgggcacgtgccaccacacccagctaattttggtatttttagtagactgggggttccattggctatggaaacttctaaaactagg

SEQ ID NO: 725025 - DNA, 212 bp, Homo sapiens
catagaattacgtgctctgttagtgtgttcaggaagagctaacagaaaggagcgtcgtgagtgggtagtgtcctggggggaaggggttgttcagaagttttgtgcgtgaaatgggtgggaggtacttgaagttggaagcatttcgtgggatctggagatctggattttctttccagatttgttactgattcgctcggtggcatcgataaaca

SEQ ID NO: 725026 - DNA, 860 bp, Homo sapiens
gccaagctactttcgtgtcccaacggtgccatcatcgctgggttgggaataagaaggatctctcggaatgatgagcacacgaaaggcgggaggctagccaagatgaagcaggagccggtgaatacctgaaagataggcagagatatggcaaacaggattggggcttttgggtacatggagtgttcagcaaagaccgaaagtatggagtgagagaggttatagaaatggttacgagagctgctctgtaagttagacgtggtgaagaacaaatctgggtgccttgtcttgtgaaacctgactgcgaagcacaggccttatgcggttaattttgaagtgcgggtttataaatcttagtgtatgataaactgcgcgccgtcgtcattcatcatatagatttacctaagattacaaatcagaagtcatctgtgcctaccaagtatttagaagccaaagctatgattatgacacgatgtccaacccgtctggcccaccagggtcctttttgacactgctctaacagccctcctctgactcccacctgaacaccaggcgctaattcaaggaatttcttaaccttctttgcttctttctagaacgagcacacagttggtaactttggtgaatcaggctgtaactactttattactaaacatggtctgctattatctgtcagtgcaggtaacctggtgaagtcccacttcaggcttactccggaacagatttgtgggtagcttggggggagtttggaaatggtcaaccgaaagccagtcatgcacgttgaaagaacgcgcgggtcagtagacctattcggtaaggcctatgttcaaaaattttcccaaatgtttgagcctgcccaaatg

SEQ ID NO: 725027 - DNA, 192 bp, Homo sapiens
tagggagaccctgtctcttaaaaaataaataaataaataaatgtatgtctgtctaatttggatttttaactgttatttgacccatttttttagggaccatgcagagtgccctgtgtctcaatgcacgtgtaatgtatgcagtcggatacaccaggtgatctggtacccgcagtagactgtccagccataaaa

SEQ ID NO: 725028 - DNA, 400 bp, Homo sapiens
gcgctgatgttttttgctaaagtgatgtttttgcatatgaaaagaaccaaatgtactatgtgagactgactgccatttgtgcgctgagcgtagccaggcgtttataatccggcgtttgcttcgcagagatgtgaccccatgctcaaggccctgtgccaaagcttgtgtcttgccctgtcactgacggcaagtgcgcagccggcttcggtggtgttcctcaaccctgggctgtccaccgagacgttctggaccagctatacccgcttcatgcaggccgccgcggatgagctgtgcatgaccctgcgggtggagtacagcgagcgccgcgccgacctggcgctgagccatgcccgtgcgattctgggtgagacgcagacgccagactacctagtgctgccat

SEQ ID NO: 725029 - DNA, 421 bp, Homo sapiens
aactgctggactcagcgtgagccactgcatccggcccttatgccccttgttaatacggggtttccgaacacgtgcagagcaactgtaactggtgccctgacagctcaccttccatagaagcagaggttccgctcctcctggcgtcccacagaggtcccctgatacccgcacatcttttggagcttgcggggatgaggacacgcggaccccatcagtgccacatgattcgaccgactcctggcggtggcaggggcgtgcattgagggcaagcccagatatcctcaccaaaatgcggtttctcggaaagaccacatggggctccactcgccccacaaatcctcttctttctccatcctgcaccggccatacactttgtatcccgtggctcgctccagatctcgcatctctaccggtgtcatga

SEQ ID NO: 725030 - DNA, 189 bp, Homo sapiens
gtcgtggaaatgtggaggtggtagagcagtaggtgcgggtggtgtcccgggcacgatgaggcagaatgatggctgtacgggagcggggctcacaagctgcagggcggtaccggcccgaattcccttagcaccagcacgaattcccttagcaccagcacgaattcccttagcaccagcacgaattccctt

SEQ ID NO: 725031 - DNA, 146 bp, Homo sapiens
gagctctttacatatctgagtgacttacatctgcactttgtgctcttttagcttcttctaacaacatctcagctctggcgaatgtcagcagcactatgctggaagaataacctctacttgagaaaggctttcaactcgtatcacgt

SEQ ID NO: 725032 - DNA, 150 bp, Homo sapiens
gttatcttctcatggaatctgcacatctgatctctgcatagcctgcacactccttgagggcaggaactgcgtcatgcaaatctaaccacacgtagatgctggaaggctctttccagtagttagctgggggctgaacgagaatgcattgga

SEQ ID NO: 725033 - DNA, 232 bp, Homo sapiens
gcgcgactggttccaacgatattctcgaactggtcgcccgtgcctacctggcgccggggttgaacgcggtgttcagtgaacatgcctttgcgatctaccccatcgtgacccaggcggtgaatgccgaggcccgtgtggctccggccaaggacttcgggcatgacctggcggcgatgctcgcggccatcgacgaaaacacccgtgtggtgtttgtcgccaacccgaacaaccc

SEQ ID NO: 725034 - DNA, 510 bp, Homo sapiens
gagcaaggttgaaagaggggctgcttctcagtccccgcctcatagggggtgcctcaccccctgcgatgggtgtcttaatagccagcggggggagaggggctggctgtcagtcccggcctcctggggtgtgtctccccctcctgcgatgggggtcctaatagcccgggggggagaggcgctggctctcagtccccgcctcgtggggggtgcttcccccccgccatgggtgacctaagagctagtgggggaagagggcctggctccggtagattgcaaatgacctgctttctttctgatcccgagctgtgttcggacccctgtcggatagtaaatctaaagtaacgtcggcagatctgagctttcttcttgggcacctaataccccagtcctccaggtgggtcctaaggatcttaggatccgcgatgggggtcctaagccagcgggggaagaggggctggctctcagtccccgcctcgcggggggtgcctcccccccttgcgatgggggtcg

SEQ ID NO: 725035 - DNA, 80 bp, Homo sapiens
catggatttgctggtgcagtacaactaggcttaatagggaattacctcagctatgacaagatgaaaaggcagaaacgaaa

SEQ ID NO: 725036 - DNA, 960 bp, Homo sapiens
taggctcgctgtgtcgtcagattatgcgctgctgccggggtattgccgggtgtctgccgtggttccgcgccgtttgcgtcgtgtggtgctcagtgtgattgccgcccgcgacccattggtgtgccctggcatcgcagctgccgatggtcggggcacagtagcggggcgcctcgtgcggggatgtggacggttcccgcgcttagaattggggtgagaaactgtgtccgctcgtcctgagtgtgtgggttctacgggtgcgttcgctgctgccacgccacggcgtttcttctttcgtgaaatgtctctcggcccccccctgtagtgtatactgaggggggtctgccgccgacgaccgccaggggtgtgtggcctcgccgttttgtgggtttgtcacggcttaattatcgtgtccggtttgtggccaccacggctcgcctgtgtagtagaagtctgttgtacaacgtagtctgaattgttgtgtaggtgttctgccccgcatgcctgaatgtcccagctggggggcctttccgtctcttccacgtgtcctggcgtgctggcggtgccctcgcttgttgtagagtgcatcacacgagggagtcggccgaccatcgtggtctgcttctcgttgtcaattcctccacctcattctgtggggcgccgttcggttgcggtcagacttcaaccgtgcgccccgcttgtgttctcagtgtcgcatttctgccgccaccagcggtgtacaaccgccgctcttcttgtgttctatcagtaccccacagttatttctcgggtgtcgtgggccaccccctagtaatttcgtacgccatcctcgcggacggtccgctcggcgcggaggacatcccttgttgcatcccccgcgggggcggtgcgtgccccggcgcgcctctggcgtccccccccccccccctggggccccgacccacaccccccttccacaaaaca

SEQ ID NO: 725037 - DNA, 815 bp, Homo sapiens
agataatagcagcctagttctttaggatttgacgattcaaatttttttttggtttggtttggttttttttggagacagagtctggctctgtggcccaggctggcgtgcagtggtgtgatctcggctcactttcagcctccgcacctcaaggcagttcaagcaattctcttgcctcagcctcccgagtagctaggactacaggcgtgtgccacctctcccggctaatttttggtattacagtagagacgggttcaccgtgttagccaggatgatctcgatctcttgacctcgtgattcacccccttcggcctcccaaagtgcttggaattactgggtgagccacaatggccagctcaattatgtttagaacatatcatgtgtcctcctcctctgaagatttgacaagtattgggccaagtactacagtagtctgctcagtactgtgtttccactttcacatgggttcttatagcattaattacgaagcactgcttatggttgatcccaaacagatgtcagcttgaccgtgggtgttaaacttacacaaccttaactttgcgtggaccttttccataatgtggcctggtcatggaatatcagggttcaagaaactgtgttgcctgatcaatgtttttcatagaattctataattacattggtggtgccctggccccaactggttttaatgtggcaaagtggaacaatgttccacaggctccggtgtgactgcgaaacctttatgacaacttggaaatgttgaccggaaaaagggacacgatacttaatggccccgtggaaacttaaaacataataaa

SEQ ID NO: 725038 - DNA, 109 bp, Homo sapiens
ttggctgcgttacacatgcggcttacgggctgtccccgcataatctacccaccagccatctgtgcatgccagcgtgtgatcccagccgcccctgtccctgtcgctgtcc

SEQ ID NO: 725039 - DNA, 1049 bp, Homo sapiens
ggaggccaagatggcggtgctgtcagctcctggcctgcgcggctattccggatccttggtctgcgctccagcgtgggcctggctgtgcaggcacgaggtgtccatcagagctgtggccaccgatggcccaagcagcacccagcctgccctgccaaaggccagagcccgtgggtcccaaaacccagcaagccggggcgagtatagtggtggccaaggctgaatgacctccgtaaacttggggcccggcggaagatactctgtgggcccattgacctatcggccatggaccttgttgcgccggtgagcattgatggcacaattggaaaggcaccacgctacggacattgtgaccccgccatatgggaggtggacgactaccccggaagcacagacaccgtgcgcacaagatcacggacgggtccatggactcggatgggacacgggaacacacatcaaccaaagcagaagaatggcgcccacaaaagatgcataccagacaacgagggcatcatagcagacccaagaagtgacccggaagcccgcgcgacacacgagtaggaacccacacagtgggcaagcctgcagcccaaacagagaagaggcggggcaaaaaaaccaaataatcactaaacacggggtggcacgacgcggcgctcggcgacacaggaatatgagtggccactgggaacatcaacgatccccaaggtgatgggccaaccataacgggcagagggcacttgagacaacagggcactcgtgcagcgtgcaaaggacgaaccaggcgggcacggagaggactgaagaccagggaccaggaaggaggcgcagcgaggcaccgaccggacctgttcgagcaggtcccaagcaggacatgagtccggtgagggtgaaataccagcggccgggtagagcaaaaagacagcaaacagagtggcagcggcgacaagagagaacaaggtagcgcgagggaagagacagctgcgagaggaggggtaaccacaggggcgtagcgtcccgccacacagagacaagagaacaacgaggaaagg

SEQ ID NO: 725040 - DNA, 945 bp, Homo sapiens
  misc_feature (196)..(196): n is a, c, g, or t
  misc_feature (450)..(450): n is a, c, g, or t
  misc_feature (462)..(462): n is a, c, g, or t
  misc_feature (475)..(475): n is a, c, g, or t
  misc_feature (531)..(531): n is a, c, g, or t
  misc_feature (537)..(537): n is a, c, g, or t
  misc_feature (542)..(542): n is a, c, g, or t
  misc_feature (550)..(551): n is a, c, g, or t
  misc_feature (558)..(558): n is a, c, g, or t
  misc_feature (600)..(600): n is a, c, g, or t
  misc_feature (602)..(602): n is a, c, g, or t
  misc_feature (648)..(648): n is a, c, g, or t
  misc_feature (658)..(658): n is a, c, g, or t
  misc_feature (680)..(680): n is a, c, g, or t
  misc_feature (709)..(710): n is a, c, g, or t
  misc_feature (751)..(751): n is a, c, g, or t
  misc_feature (760)..(760): n is a, c, g, or t
  misc_feature (841)..(842): n is a, c, g, or t
gagcttaaagggtcatgaaacttactcatattatgggcctctgaatttacttaccttcaatgtgggttatcataatgaacatcatgatttccccaacattcctggaaaaagtcttccactggtgaggaaaatagcagctgaatactatgacaacctccctcactacaattcctggataaaagtactgtatgatttngtgatggatgatacaataagtccctactcaagaatgaagaggcaccaaaaaggagagatggtgctggagtaaatatcattagtgccaaagggattcttctccaaaactttagatgataaaaattagccgggcgtggcggcacatgcctgtaatcccagctacatgggaggctgacgtgggagaattgcttgaacccaggaggcggaggcagaggctgcagtgacccaagattgtgccactgcacttcaccctgngcaacagagcangaccccatctcanaaataaataaatatatataaaaaataaaaagctatttctacgttatgtcactatanacgtcntgctntaattacnnaagctantaacagctatgaatcacagtgtattagtacttcgtacattgntngaatttactatcgttatactatataatatggtaacttgggtaccgngggaccttanaatttcatctgcaaaatacttntaagaagcttgaggtatgatatagcatannagaatgagatgaaatatacttccttgtagctgaatactcantaaaaactntacttctatatggaacccgattagacactgctgaatctgtcaagctactgataataagtactactgaattcaccatcaaannaaaaaacaaaaaattaaacgtcgactggaaacttggtaccacttatcctgacaaatcccttcagtgctgatacaaaggcgacgaggctttaacatggcacgag

SEQ ID NO: 725041 - DNA, 374 bp, Homo sapiens
aactcctgccttcaggcattcctcccatgttggcctctgaaagtgctgggattacagatggagttttgctgtgttgcccaggctggagtgcagtggcacaatctcagctcagtgcaacctccacctcctgagttcaagcgattttcctgcctcagcttcctaagtagctgggactacaaatgagtacctgcacgcctgtctaatttttgtatttttagtagagacagggttccaccatgttgcccaggctggtctcaaactcctgggctcaagtgatatgcccatctcggcctcccaaagtgcttagattacaggcatgagccactacgcccagcaatccctttacctttaaaaaaataaataaataaaccttt

SEQ ID NO: 725042 - DNA, 783 bp, Homo sapiens
  misc_feature (196)..(196): n is a, c, g, or t
  misc_feature (446)..(446): n is a, c, g, or t
  misc_feature (585)..(585): n is a, c, g, or t
  misc_feature (703)..(703): n is a, c, g, or t
gagcttaaagggtcatgaaacttactcatattatgggcctctgaatttacttaccttcaatgtgggttatcataatgaacatcatgatttccccaacattcctggaaaaagtcttccactggtgaggaaaatagcagctgaatactatgacaacctccctcactacaattcctggataaaagtactgtatgatttngtgatggatgatacaataagtccctactcaagaatgaagaggcaccaaaaaggagagatggtgctggagtaaatatcattagtgccaaagggattcttctccaaaactttagatgataaaatggaattttgcattattaaacttgagaccagtgatgctcagaagctcccctggcacaatttcagagtaagagctcggtgataccaagaagtgagtctggcttttaaacagtcagcctgactctgtactngcgtcagtttcacttcacagggaaaactttggtgaactctggtggtatctaatccgtcattgaggatgtttcactcatgtctgtcattttataagcatatcatttaaaaagcttctaaaaagctatttcgccgggcacngggttggggcttccaatggcccctaataaatcccccagcaacttattggggaaggcccaaggttgggtggatcacctgaggtcaggagttcgagaccagcctggccaacacggtgaanacccatctctactaaaaaatgcaaaaattagccgggcgtggcggcacatgcctgtaatccccaaggcttttaaaaccaaa

SEQ ID NO: 725043 - DNA, 140 bp, Homo sapiens
tgtgtggtggaattcgaagctgaaggaggctgagacccgagcagagtttgccgagaggtctgtggcaaagttggagaaaaccatcgatgacctagaagatgaagtctatgcccagaagatgaagtacaaggccattagcg

SEQ ID NO: 725044 - DNA, 785 bp, Homo sapiens
  misc_feature (773)..(773): n is a, c, g, or t
tggagcaagcttgaagggttcaagccccgcactacagtgtcaagatggggaaaacaagtaaggagtaaactaagatgcatcacttttggcagtagcttcctctcctgtcaagttccaggctcatttccataaccaacaagcctgatggctgcagccttttaatatatgttttcgcctttggctgtgactgggttgtgggcagctatgcagcttctagatttgtaaagaggcatcgtagggatattgctcaggcaccactatcaggaaggcctgccatgcatgtggccaactgatttcaactggagcaagaaagagatctcataggatcggatgggagcgaaataggttatccctcgcaagcttgaggttacgtgtgttaactgctgatcagctattcagacatctccatggtttctccatgaaactcgtgtggtttcatcatgtccttgcttagttgacctgcacagcgttggttagacactagatttaaccactaaggtaagatgcatggggtatagaacgctaagaattatcccccaaggactcttgcttccattaagcccttcgtggcttcagtttatgggtcgttcacttaaaagtgataagcctaactttgtcggcgagtcctcagggaggaacctgtcaccacaaagtgtgctatcagtgtgagagacagtatctgcacaaccccctcacttttgtggggattgagaacggggtgagtagaggcttgagactgtcctgttgtgtggtaggacttggaggagaatgcncctggctgttac

SEQ ID NO: 725045 - DNA, 634 bp, Homo sapiens
gtacacacgtgttcatatattttgtggggttttagttgttgtttttgaggcggagcctcgctctgtcacccaggctgcactgcaatggcccaacctctgcctcccgggttcaagtgattctcctgcctcagctactcgggaggctgaggcaggagaatgcctgaacctaggaggcggaggttgcagtgagctgagattgtaccactgcacgtccatccagcctggcaacagagaagactctgtcaccaaaaaaaaaaaaagaacaaaagagtacagccaatcagaaaactaccagggaaaagggacaacacggccgcgagacaagcccgacagaacactgtagaggaagcacaaaaggagcggcgatgcgaactaacacgtgaggggctccaggaggctcccagaaccgaagcccggaaccaaaaattggctgaaagacccccagaatcgatcgtgaatgcagcgaactaggcggaaaagaaaacgagtgggggcacaatgcttggcgacgggggtggcacgagataagaaccgcagggggaaaagacgcagaagagaacagagaaggcagcgtgacgacagatccgcgtgagaaacgccggggggagaaaagggggacaccggaaagggggag

SEQ ID NO: 725046 - DNA, 603 bp, Homo sapiens
tgcgcagcatatgattctcctacctcagcctcctgattagctgagattacaggcgcccaccaccacgcctggctaatttttgtatttttagtagagatggggtttcaccatgttgaccaggctgttctcaaactcctgacctcaggtgatctgcccgcctcggcctcccgaagtgctgggattacaggcgtgagccaccacgcccggcagggaccacacaatttattaaccaaccaggttaataaattcttttttttttgggagacggagtctcactcttgtcacccaggctgcagtgcggtgacacgatctcggctcactgaaatctccgcctcctgggctcaagcgattctcctgcctcagcctcttgagtagctaggataacaggctcttgcaaccacacccaacacttttttggtattttaagtagagacgggaatttcgccatgtgggccaggctgatcttgacctcttgatctcaggtgatcggcccgcctcggccctcccctaagtgtgggcactacaggcgtgagccaaccatgcgtggcccaaaccaaaaatggtctctgaggggaaaaatgcctggacgggaaaactgactct

SEQ ID NO: 725047 - DNA, 762 bp, Homo sapiens
aaggagcagcccctgtgatgagtgagctgaaagacgcctttcagcaacgcctatttggagctggtggtggcctacgtgagaacgagtcctagtgtttctgccacctctttcttgccagatgaacagttatcctgaatgggttccagttttgacactgacgatgtgaatttccctatctgataatctgtgctttgttgtggctacatctccatgattgaccctccacgggcggcctgttcctgatgcctgtgggcaaatgtcgaagtgctggaattaatgtgtcatcatggtcacagtgagaccatccaatcacatgctaaatgctatttgccaaatggtgttggagcatcatctcagaacggcaatagatgacctgtggaacgacattgctagccctgcactcaacatcccagtcatgccatggtagaaccccagggatgccaaggcctgctgtagtacacggcagtgatctaaaggacatagacctccgcagcagctgtgctgacattttcgaagtaccacactgacgataagtgtttgccagtgacctacccctcagcatgaatgctcatccattgtgtgaaggctgccaaagacagggagctatccgtggcctgtgacttggtgaccggattgaaatgactcctccaggctttgcagaacaccagacctttgggcgtttgcccatggcggattgggtgctcacattgtgctccaatcaagccagctgcactgcatcctctggcttccacacttcgctca

SEQ ID NO: 725048 - DNA, 330 bp, Homo sapiens
ggtgatctaaggatctgtatatgctgtctcagcatgataattgggtttgggcaccatcaggaactggagaagcagtcagaacttctgagttgacacgaaaatactaactcttcattgagcaagtgacatctatgagaaagtctgatttccataagatagccaccagtttaaaagaaaaaaaaaggtttacgttaattagtggtatagatactcctgaaaacataggtggaggtttaagtataatcttggacatactaaaaagaccacaaagttgaattggtttgaatgtaccactttttttttttcttttttttgggaaacagcatatca

SEQ ID NO: 725049 - DNA, 360 bp, Homo sapiens
aatggagaccgacatatgtgtatgaactaactgtgtggaaaaaggtcattgttcatactagtggagaaagggtggattatttagtaagtgatgctgctacacttgactatttatatgtaattctgaatattacaaactaaacatacagaatatgtatcttatactagaaattacaggataatattgctatattattgtcatggatatgttttaaactctggtcatacagagacataagctataatctttgaatgagacgattgctgcattcacccttgttatagtaattactaactgttcactttgaaaaagattccttacataaagttaacttgtgaaaagacttgtgtaagaactgtt

SEQ ID NO: 725050 - DNA, 181 bp, Homo sapiens
gcgggcggtgttcccctactgagacagttcctcaggtcagaaaagagaaacatagcacacaagctaggaatagagcatataaggaaacctccaaaaggaatgttaactttctcacagaagatgtggagcgctgtttctgcctatatgccactgtctgctaccacgtgtgctgagtacaact

SEQ ID NO: 725051 - DNA, 152 bp, Homo sapiens
gtggtaatgtcttccctgagtcaatcactgttgacaggatcatttcctgagccatctggagtggtgggtacctagaacagagtggaggctctgtcaggaaggaaggagcaggaaccagaggccgggaaggttcccagaagtgcgcctgggtg

SEQ ID NO: 725052 - DNA, 356 bp, Homo sapiens
  misc_feature (9)..(9): n is a, c, g, or t
  misc_feature (129)..(129): n is a, c, g, or t
  misc_feature (344)..(344): n is a, c, g, or t
ggggcagtnctggaacaggaatttgtaccacctgactcttttaaagagacggggtctcgttttgtcatccaggctggagtgtagtcacattcatggctcgctgcggccttggactcccgggctcggcgnatcctcctgcctcagcctcccaggtggctcggactgcaggcgcgtgccaccacacctggctggtttaatttaaaatttttttttgtggagatgggggctcgccatgttgcccgggctggtctcggactcctggggctcgggcggtcctcctgccttcggccttcccaggggttgctggaagttgcaggagtgagccaccataaccccagcccctntttgattcttta

SEQ ID NO: 725053 - DNA, 418 bp, Homo sapiens
  misc_feature (309)..(309): n is a, c, g, or t
tatcttaaatgtttattacatatgctgtacttagggagactccagctgtttgacaccagagttgacaggcacactcagcacggactgggttaagccaatgctcgcttctccttgtaggtcgccatcatcttcttgatttcccgcaatcgctttccccggattcagacccttggggcaaggtctgtgtgcagttcatgatggtgtggcagcggtagacagagaaggggtcctgcagcttggccacggcgttcctctgtgaagtcgtctctggaagtcgatcatccagcgataggcctgcatgagaactgnaggccccaggtactttgtctccgttccaccaagtaagctggggcaagctggtgcttgaagcaaggcaacacaaggaatgcactccgtacaagcccgttcaacttcttcc

SEQ ID NO: 725054 - DNA, 518 bp, Homo sapiens
ccctcttccgtgtataccaaaaaccctagattttgctaatagttggtgatgtgcacacatacatctgtcagtaaagctaaagcactttgtcctacacaataggtttcgcaaaatatactccatcagccgccttaagttgtgcatggatggtgcaaataacgtcaggttatgtggtatatttacaatcaagtgatgattgcgcacaacttaccatgtttgtgacagccctttccagtttgtctttctttaacgaagccccttttagtttattgacttatacgatgtccccctttgttttgtaaattactgtgccgccaagttgttaatgttctgttaaaagagagggtcctacaaaataattattttttaaaccacaaaggtgttctgccctccgacttcagtggaaagcccctgggtaacacaggtccatctgggccttacctaggagtgacacttagatttgtcgactctttttggccacacccaccgtaagccgcttattgacatgagcaaatatc

SEQ ID NO: 725055 - DNA, 254 bp, Homo sapiens
ctgcgacagggctgggcggcttcccttcctgtgatcctcaggaaagatcaggatcacatcataacaaatgaccggaagacacgggaggtggctgagctgggggtttctgctggagctgctccctgggcccttgctggcaggggctggctgttgacagtcagtgtatgttatgccggtagaattctcatttggctgttgtttgtgtgtgcctgtttttatcccttgtaattaaaacatttatttggccttcgcaa

SEQ ID NO: 725056 - DNA, 785 bp, Homo sapiens
  misc_feature (785)..(785): n is a, c, g, or t
cccgcctccaggcctcgccttcctcagctgtagaaggggctgcttgcataaggagcagatggactctgctccaggcttgagtatagctgggtgcctccatcccaggccccaccagggaggctggctggggcgtggccgcactcatccagaaccctgctctgcctgcagccacagttccacaatggcgagtctgaggagagccacgagcagttcctgaaggcgctgcagaacgccgtcaccaccttcgtgaaccgcatgaagagtaaccacatgcggggccgcagcatcaccaatgactcggccgtgctctcactcttccagtccatcaacggcatgcacccgcagctgctggagctgctcaaccagctggacgagcgcaggcgtaggtgcccgcgccacggggcctcggctcaggggcagccaggtgttgtgagcgccatcctgggccagggcctcccctgagggtgctgagctcttgtgagtccttcattggggccgtggcttcctccagagagtgtcaacaggaggtggtctcagtgatgaccatgccctgccctgccctgccctgccctgccctgccctgcccaggaccctctgcctgcctcccccagagcccagcaccttcagagccctctgcagaaggttgggcacagggcggccatctgcgtgtccgttccacccaggagcttctcggcactgtgccggagtggtcagggttgctctgtcatctgcccacagtgtactatgaggggctgcggacaagctggaccgatccgcgatgccgn

SEQ ID NO: 725057 - DNA, 103 bp, Homo sapiens
tcgtcccggataaggcggcgagcgagagaacgcggcgcccactggatagcgcgtcgggatgcaggtcggcatgcccgcgacgtggcgcatgccggcgagcctg

SEQ ID NO: 725058 - DNA, 561 bp, Homo sapiens
aatgggcgtcctccgtcagtgagtgtccagcccatgtgcttgtggatgtacccacccacagtatctatggtttgtgtggtttcgctcttttgtgtttttgtttaaatgcaggaaacacccttaaagcccgacttttctctgaggtgctcaattacatttaaaaccgtttcctgtacaaacagatcacaaatactttaacaactgcacattctccttccagcttacctgtgagctgttttgctctccaatgctatgggtatctgtctcagaagctctgttgggatcttgtggtgtctgcgagcgaggtgggcttggcgatgtgaatagaatgggaaaaacagaacatcatgtgaacattctatcattagaagctcaaaccccaaaggcagtgaaccgcctccgtgatgaggggctctaccctgtcagggtacgcgtcttcccttccatccagcacctgcacagtagcaaactcttcctcagccctttggggtggcacgacaggagtgagctagccagtcttccagagaagacgcaggggcaactggcaagcagctggctttg

SEQ ID NO: 725059 - DNA, 1331 bp, Homo sapiens
tgggaattaatcatttatcacaaaatgaacaatttcaattcttaaacatacaactcacttttttctcatactaacctcaaaagtggagttaaacagaaattttattcaaactttacaaatatcatttacttttagcccgtggagaattaacacttgagaaaagttcaaccgtgaagttagaccttcattgtgcccagtttaagccattctgtgaaaattaaagcgtgaaaatgtgaacattacattcattcaaaacaaagacatttccaatgtgaagttcgtggcaagtgaattgtgtgaccacaaaacgtgaactttaatttgtgcctcgtggtctccacatgtgaattctttcagagagccataagaagttccccgtggtttttataatatacatgtgagctggaacaaattattcgtgccacaatgtgattaaatgtgcattagaagggttattgacccagtatgtcgcaaaatttttatagttctcaaccattttttcttatttagcaaggcgtgcatataaagggtgcacccccttttaatacacaaaacaaacaaaaaacaaacacagaaaaaaaaaaaaacagaaacaacaaagacgaaaaaaaaaaaacacaaacaaagaaacaaaaaaaacaaacaaaaaaacaaaaaggagggggggcgggggagcaccccaacaaaaagaaaaaacacctaccagcagagaggagcgccaaaacaaaaaaatagagacgtacacccaacagtatatttataaaaaaaaaacaggagtgcagccccacaaaaaagaagagaagatacataaatataaagaaaagagaaggagcgcgcaacaataaaaacaaacagcatggagacgacggagaaacaaaaagcatcgtcacgatgacgcaaaaaatctgagcgaggaagaccacccaacacactgcgagagaggggagggaacaaaaatcacgagagaaacccaacaccacaacaagaataaaataggccccgacgagaaaaaaaaaaacacaccgagtcatgataggaggagtcaaaaaccagcaacaataactgcctacgaagaaaaacacacccgcaccgagagatagtaataaagaaaacaaaacaacgagggacgggagcaacaaaaaaccaccgacgaccaacacagagacgaggcaaaagaaaagaggaagagagaacgagcaagggcacgcgagaaagacgacctaagcaagcccaaccacgcaacaaacgacaagaagacacacagagaacaacaaacaaccacaaccaatcgaaaaaagaaacaaaagaactaaagaaaaaaaacaagaaag

SEQ ID NO: 725060 - DNA, 516 bp, Homo sapiens
  misc_feature (6)..(6): n is a, c, g, or t
  misc_feature (41)..(41): n is a, c, g, or t
  misc_feature (47)..(49): n is a, c, g, or t
  misc_feature (81)..(81): n is a, c, g, or t
ccacanaacagtcaccaagatgtcccaagacttttcaaagnctcagnnntgttagaaagactacacagaaatctactacancatacttataatatgcttgatatttcaaaaagtacacaagccaatgacgacaacctataataaaacttcagcaaacaagcactagggaaaactcagcggtgtccttggtatttagaacacccagttctaaaggtttggagtgaagagaccattccaaatcccagtttctccactcacaagttctatgactttgggcacgtcatctcttagctatttcagtccctgtttagtggagctaacatacctatgcatacataaagctcagtgcttgacactcaatgtgaagcagaagctcagtaaagtcttcttccccacctaatgcgctgtggtctgtacctgcaaacatcctttctcctccaataaccctagcagaaaaatgaaccgttggctcctcatttgccccagctgcccaaactacatttccttcactctgac

SEQ ID NO: 725061 - DNA, 497 bp, Homo sapiens
  misc_feature (483)..(483): n is a, c, g, or t
cagttttggtgtcccgtgtagatccggattcccgaaaaaacacaataaatgaaataataaagcgaacaacatcaggaggagaatggccccagatactagttttcccagaaggtacttgtacataatcgttcctgtatgattacttttaaaccaggagccttcattccaggagttccagtgcagccagtcctcctcagatacccaaacgaggctgaaactggtgacctgggccatggcaagaatatacattcattcagctttgtatgcttactttctgccagctcttcacaaaggtagaagttgagatgtttctgttcttttgggaaggaagcagcaagcattgtttaaaaatatcttccttcttttgcattttttctcttcgaagatttaaaagaagaattacacaaagaactagaactgcacatttgttaagattgtccttttaaaattcctctctgttgcaaggaaaaaataaaagttagntaatagtgtcaaaa

SEQ ID NO: 725062 - DNA, 628 bp, Homo sapiens
cagtactgcggactccatctcctctactaacctcgctctcgcggactacctttacccgcccgactgctcggagaccagaacaccttccaccatgaccacctcagcaagtacccacttaaataaaggcatcaacgcaggctgctacatgatcccatgacctcagggatgagaaagtccaggaccatgatatatctggactcgcatggtactggagaaggacatgcgctgcaagacccggaacccatggacagatgagcccaagatgtgtggaagagatagaccatgacgatggaacttatcgactggactccagataccttatacagctcatgagggattaccaacagatgaacagtgatagtcatcgatgacctgcatgcacatgatatatcgggacccactaccgataaaggacacctaaaccacagctagggtggtacgatagtagaaagtattaacacagtaacaacatcgcgctggccaagacaagaacgacccaacataacgacggcacacacgtgcttaaacaggactaaaaggcaccaatgggatgaggcaaacgcaagccaccaccatgggttaggcaaatggaagcacggagatatacacctccaagggggccacgaca

SEQ ID NO: 725063 - DNA, 148 bp, Homo sapiens
aaaaaagggggggggggggggggggcccccccccgccaaaattttagggtgggaaacccccctcattgttttggcccgggggttttttcccttttttgggggggggggccctttttgaattttataaaaagaaagggccttttttcca

SEQ ID NO: 725064 - DNA, 319 bp, Homo sapiens
cagaagaagaggaagaggaggaggaggaagagcagccgcacagccacagccttccacccttcccgtgaggagaagaagaagattcagattcagacagcgatgacgtttttaggtgacgcgcggcacatcattagaatccaagcaagatttgattattaatttgcgttccaggcccttcacgtgcctcagtctctttcgtgccatctgtactagagagtgaaagagtaccttatgtcatgtgtctaacagtacagtcaagttgagtgttgttcctgtaacacactgacgaatctgcgacggattgtctgggagacatcac

SEQ ID NO: 725065 - DNA, 136 bp, Homo sapiens
  misc_feature (53)..(53): n is a, c, g, or t
  misc_feature (123)..(123): n is a, c, g, or t
gggcagaccgcgctgggttgccgctgccgctgccgccatcgtgccagcccctncggtctccgtgaggccggttgacctccagattggagacaagccattttggagcagattgatccactttcntccatactacctt

SEQ ID NO: 725066 - DNA, 166 bp, Homo sapiens
agatccccttttcatcacaaactgagaagtcctgctccatgcccacccctactgctctggacctggtggatcgaccaggacgcgcctctattggtggctccttcaaagctccccagggtcagactgacggtgtgacgtcaggtgctctctcatccgttcccagcct

SEQ ID NO: 725067 - DNA, 315 bp, Homo sapiens
  misc_feature (36)..(36): n is a, c, g, or t
  misc_feature (267)..(267): n is a, c, g, or t
  misc_feature (289)..(289): n is a, c, g, or t
tgcggcaataatgccgttcagattatcgcgcagtcntggttaaaatgacgatcgtggatgatgacatttgcttcgagattcagtgacaaactgagcggatcgagattactggaccctactgtcgcccagtgatcgtccatcaatgccactttgccgtggagcgggcggcggcggtactcaaaaacctgaacgccgcctttaaccagatagttatacagcaagcgcgcaccgactctgacaatcggcatatccggttcgccctgaatnatcagtttgatccgcacccggngccgtgccgctttacgcaaggcgtgt

SEQ ID NO: 725068 - DNA, 305 bp, Homo sapiens
aacagagatacactgcactcatatcttatgtaccttaaaacttacacagcttaaaacttaaataattcgcatcaaagaaacacataaataaactattttacttaggaacaatgcagatcacatttttgctatcactagaaaaatgttatgaataagagagtatttaacgtgagatcaatgaaactgcatatttcatttgtatttgtattgttactacacttgttaaatccttgtaacatgactgacaaagaactcccaggagccgaaatctgagctctttcattatcctactatgtagggagctt

SEQ ID NO: 725069 - DNA, 464 bp, Homo sapiens
cggtccggtatgagatgtctagcagaggagtaattgcagaatcgacggagaaggcaaagaaatcagcaagaagacaagacaacaaataatctcattacaaagtgggcaaaggacatgaagaaacaattctcaaaacgtacaaacagccaacgagcacttgaaaaaaaatgttcaacatcactaatcatcagggaaatgcaaattaaaaccacttattcccgcaagaaaaaaaaggccgtaattaaaaagtcaaggccggcacggtggctcacgcctgtaatccccgcactttgggaggccgaggcgggcggatcacgaggtcagaagatcaagaccatcctggctaacatggtgaaaccccgtctctactaaaaatacaaaaacattagccgggcgtggtggtgggcgcctgtagtcccagctcctcaggaggctgaggcaggagaatggcgtcaatctgggag

SEQ ID NO: 725070 - DNA, 307 bp, Homo sapiens
gaacgggaggactcccggtacgagcacagttgctggggacatcaatggtgaagggtgggactcactggcccaggggagaaatggcatgctcaggcctaaattaaagcaacgcaaggccgggcacgggggctcacgccatataatcccagcattctgggagaccgagacaggtggatcacttgaggtcaggagttcaagaccagccggaccaaaagggcgaactcccgtctctactaaaaattcaaaacattagctgacgtgtggggagtgagcgccgtgtaatcccagtctactgtgggaggctgac

SEQ ID NO: 725071 - DNA, 320 bp, Homo sapiens
gctgggtgactctagacggatccccttatatggctcgtctcaagggaaataagcatctctagaggaaagccctgactatccggaaagtcttccttcgggaactgtcagggtctatctagaacagctcaagaataggaggttccctgaaaacaaaaaaagtaaacataaaaccctctttggggggggaaggacttggtctcattctctttttctctctctctcaatctctctgggtcggtcggtttctctctctctctctctcacacacacacacacacacacaccataaaagctctaaagatgaaaactaaaacagagaa

SEQ ID NO: 725072 - DNA, 1000 bp, Homo sapiens
gggcagtatttgaagcttctatgtctcgtgacctgtgttgcatgctgatgttggtgctactactggttcttcatgggttatctctgtgatagcgctgtctcaaccgaagactgacagggagctactagaaccactacacccgagcataagatactggcatggttaggccagctaccggtctccgtggctgtagttctctagttgccatgtccctccatgctcgcgtggttcgcttgcgccgtgtctcgtcgcttggggtcccaccagtctcactagtcttcttcagcagatagtgaggttagcatccacgtgcacccgactgtgactctcgtatgcgcgttcgtttgggcatgcaggttatagcaccttcggttgtcgcgttgtcgttttcttctgctcctgtgtccatggttaataggctgttcccggtgtcgagcgtgggaggccacgtttgggttccccaggtgcgcagaactgttgctcatctctctctcccaggatcacgtcgacgccgttcgcgtgagtcctggtgaggccctgctagttgatctgttggtctttcgttgcccatcgcccccatggcctgacagcagccgtgggggcgtgcgtacctgagtctgctaatgtccacgcgtgtgtacagaccaggcttgggtgttcacatcgtctgtccttatctgcatcacgtcctgcgttccatcgttgtctcgggcatgccactgctgtgtggtctggaacgcccgcaggccaagggtgagaccgtgtctgctatatgggttacctgcttagcccgtgtcccgtgtgcggtttgtactcctgttgttgccactgtttgtcggtgcctgcccgtgtgcacaggtggtttggctcctctttgtgtataaacctccttaagctgtgagggattgactggttggacctgcttggcctaccgtggcgggtttgtgtgggccacatggttttcggcacgggtttggtttgccgcgtggttgcgggttcg

SEQ ID NO: 725073 - DNA, 123 bp, Homo sapiens
gtggctgctggctgcgctgccattgtagacgtttccagcacgctttaaaacgcaccgacacagcgcagggctccactcttctgtcgggcttcagtaactccttgcagctgtcaagcccaatat

SEQ ID NO: 725074 - DNA, 283 bp, Homo sapiens
gagttaaattaggctgggcgtgtggctcacgcctgtaatcccaacactttgggattgctgaggcgggcggatcatgaggtcaggagatcaagaccatcctggctaacatggtgaagccctgtctctactaaaaatacaaaaaattggctggatgtggtgtgttgggcccctgatggtcccatgctactcgtggaggctgacggcacggagacatggtgtgaacccagggaggcagattcttgcagttgcggctgaggcagtgagaatatgggcgtacgtggga

SEQ ID NO: 725075 - DNA, 244 bp, Homo sapiens
aaaaaaaaaaagggggggggggggccccccccttttctttcccccttggaaaaggcccctgggggggccccccggggggggccgggagggggggttttcaaaaggggggttttttttttttttttgggggcccttgtcccaatttttttttttttggtaaaaaaattttttttttttttttttttttttttaaaaatgttccctataaaaaaaaaaaaaaaaagtccttttaggggggggttta

SEQ ID NO: 725076 - DNA, 114 bp, Homo sapiens
ccgcaccggttacgagtgaagtgatacaatcacagacccactgcagctatcaaccgttccaggtacaaatcagtcttcctgcctcagcctcccgagcagccgaccacaagcatg

SEQ ID NO: 725077 - DNA, 319 bp, Homo sapiens
  misc_feature (24)..(25): n is a, c, g, or t
  misc_feature (232)..(232): n is a, c, g, or t
ggtgcctagatatcccaagctttnncgcctcaccggggctcacttttctcacactatgactacgaattacctggagatttaaaatgcatattccttgcctatgcatatatggacaaaatgcataaaatgcagatttcctggcctcatccaccagatagttggtttaggcaaatcagagacagaatataagcatcggctttttttttttttttccctagcacccggggaaatnctgatcttgtctagagccagatccacccgtggggtaaaagcttgggtcccggagctcgaattcgataactctgtggctcattagctt

SEQ ID NO: 725078 - DNA, 234 bp, Homo sapiens
tcagttgattcctccgtgcctgggctcccaaagggcggggactacaggcgtgagccaacacgcccggccggtgtcaaggtttttaaagatacatgatttagaactggatggctagatttagagtgaaaaagcaggtctgaggctaagcaaggaggtttatattttaggagcagagctggcactaaaggaatgggttcagaacgggaactccagaggataaatttaacagcaaaa

SEQ ID NO: 725079 - DNA, 198 bp, Homo sapiens
gctgagattaggcgatgatgggattaggtcaccggttgcaggcctggtggaagagaccaggacagtgtagccgtgatgtggtcatttgtcctgatgccagcttgaagatgcaaaaaaaagagggaccatatgctgtggtggttctaccatggaggtaatctggggcgcacagaatttatctagagtctggctgctgtg

SEQ ID NO: 725080 - DNA, 115 bp, Homo sapiens
actccccctgtttacagggaggaaggtctaagcagtgggctcgccaagtcaggccaacctccagtttcaaccacgagaatggtgggctgaggaccaagagaaggccattattcag

SEQ ID NO: 725081 - DNA, 272 bp, Homo sapiens
acttaacgcaatataacaccttaacagctatgatctaaactacgtctgactaaccagagacaaagagatggatcgacataataagaacatgccatgccaaaatacctctaattcatatattcacatcacacatctttatgcagtgtctaccctatgccaggcatcctgctcggtgctagggggaaggcagacattcatcaaatgaggtaacaaatgtcaaagcacaaccactgacagtagggacaccctgctacgaagtatacagcgttgag

SEQ ID NO: 725082 - DNA, 174 bp, Homo sapiens
gagccggctaccaaattaaaccaaacattccatgtttaagatgtggggattgggaaccactagttctttcagatggtagttcttcagactatagaaggggcttccagttgaattcaccagtggtacaaaattgacggagacaagcaggtgaaacaaagcttttttactggtgac

SEQ ID NO: 725083 - DNA, 185 bp, Homo sapiens
aggcggctcttcaagcccggaggagctcccagtgcgccaggagccgccggtaacaggggccgccggccagggccccttttccagtcatagctctgtacgttgctacataaatttcttgtaattgttttgctactaagataatttcagaagttcagtctattttttcagcggatactgccgccacc

SEQ ID NO: 725084 - DNA, 266 bp, Homo sapiens
  misc_feature (15)..(15): n is a, c, g, or t
cctccaggtttttgntgactccggcctggtgaaagggagccccatggtcctggctgttggggtcccagggagaggtttttttttggacaaacacaccctcccagcccccagggttgtgcaaacacatgcccctgccataagcaccaacaagaactttttgcaggtggagtggctgttttttataagttgttttacaaatacggaaacagtccaaaatgggatttataattttttttttgcattataaataaagatcctttgtaaca

SEQ ID NO: 725085 - DNA, 262 bp, Homo sapiens
acccactactggctatcatcacccgatgaggcaaccagccagaacgcctgaacgcaagcacatactttctattctacaccctagaagggttcctttccctacttattgcactaatttacactcacaacaccctatggttactaaacattctacccctcacaattatgggaagccaacgccacttattcagtgaaccactatcacgaaaaaaaactttacctttttatactaattttcctacaaatcttcttaattataacat

SEQ ID NO: 725086 - DNA, 429 bp, Homo sapiens
gctccaacttccaccactgcctcctgtgattaagatgtgagccactgcgcccacctgggtagctattcttatatcagacaaaacagactttaaaccaacaacaatcaaaaagggcattatataatgataaagggttcaattcaacaagaagacttaactatcctaaatatacatgcacccaacattggagcatctagattcattaagcacgctcttagagacctaccaagagacttagataaccacacaatattagtgggagacttcagcactccactgacagtttcacagatcatcaacgcagaaaactaagagagacatctagaatctaaacttgacacttgaagaaaacagacctaacagacagcgacagaatgctccacctcagaagagaatattcattgttctcatggacacatggcacatatg

SEQ ID NO: 725087 - DNA, 247 bp, Homo sapiens
cccggggcctgagaacccgggggaaattttaggggttaaaagggggggtttttttcccgccctttatttggaaatgggccttttttttggaaaaattttgggaaaccctttttaggcgggggcccttttggggcccttttggtttagggaagcccctttttttttttttttaaaacccctttccggaaaggggggtttttttttagggggccccattttttttattaatttggttggttaaacccca

SEQ ID NO: 725088 - DNA, 287 bp, Homo sapiens
tacagagtgaaggtcgttagcattttaggaatcactggcagacagagtgaatgtgatgagctgcgcaggggtggcatccagatggtcgccgcagatctggtgaacgactcaatcgatcaacttgccaaggtcttcgcacgcttcgataccgtgatcggctgcgcgggcatgatcgcgggccgagaaaccccgatgaagctggcaaccgccgcactcaaatccggcgtgaagcgctacttcccctggcagtttggcgtggatttcgaagtgattggccggggcagccc

SEQ ID NO: 725089 - DNA, 107 bp, Homo sapiens
ggcaagcctacggtgtggaggaccctgagtatgccgtcacccagcctagctcaaccaaccatgtggatcagagcctcggcaaactctctctggacaagtcttccggg

SEQ ID NO: 725090 - DNA, 794 bp, Homo sapiens
agcggggggtcgcggaggcggcgcggcaccagtgagcgtcgtctccctggtgcgcatgctcgcccccgctgcgggctagctgttgtgttttttgtttttttcccccgggcgggcccgggcggttggcgtactgggctggtgggacggggaagtgaacgccccaagcgacgcggttgcagcggggccgtgaggagcagccagcgggaggcggctggcgagctcggtgagcagctgggaagagcagaaccgggggcggagcacctgcaggcgcgggcgcgggccccaccagggcgattcggcaagaaaaggcaccaaggagcccccagtgctggagccacagaattcgtcctgcaggaatcacggcgggacatcgtctcctgtgtggcagatggatctctccggctggggctcagtgttggaggatacgggcaaaagcttcatatcattttgggtaactcttcagtacaagtgtcaccctcccagcaatagaagaacaagctactgtgattcagggtccctttataactagtggcattcaaagatttggcatacggtggcttcgtacttgctagtggcggataatatatcatgccgaaattcaagagtatatgtgggaatacagttacaaggcgatgtgcatttctccagaaacaaaccacatgcaggtttaaaggactcgggtccagcttaagggcgttctaccttttgggcctgtgttggggggcacattcgcttctcatctctgaacacttagcttctcagaacccaagttatcttatggagcgtttatccca

SEQ ID NO: 725091 - DNA, 542 bp, Homo sapiens
tacttttccacaggaggtgttcgtacagaatactttagaaagatgtcacgcactttagacgtaatactaagaaggccagaaggaacatgaaggtcactagcactcaatatttggtaaattgcactatcaaatgttggctcgaaattaccgagcagcagaatcgtactgccatgtgtagtaaaacacactttatatttccactgcttaaagcagctgaaaccagactgaaaaaatttttaatggcaggggtgaaggtgaaaacgcaaacatgtaaaatgatgagtctgattaagacacaggctttttaaatgtcttttccttttctttgacctatttgatattgtctagtttatctgaaaagtaaattaactactttgtttagttatgataaaagcacattttgaaaaacagtgagtggtattgtgaaattccatggacagttttaattttaacaatcacaaaggtctaggtctaaatatatgtgctgcaatgctacccaaatatgtagcaccaaatctacctggtggtggcccctgtggaac

SEQ ID NO: 725092 - DNA, 285 bp, Homo sapiens
gtgtctattagtttgctatgatgaagtttatgttaagtgtattttaccacaatttttaaaaaatgaggggagggatggcattctaaagtacctgtcacagttttgtcaactgggctaggctatagaatgtagctacttaatcaaaaactactctagatattgctgtgaagatattttgtagatgttgtttacatctacaactgattttaagtaatgtcaatttaaagctttgctttaagtaaagattatcctaaagtggatgggaaggccttaagagcacaaaaa

SEQ ID NO: 725093 - DNA, 127 bp, Homo sapiens
cgtataccaagccggcacagtgtggcacgctcgttatcgtgaacaactatactgcggatcggatcaacttcagtctggctcgcggggacgctggcccgggtgctgaatggcatctcgttggacaatg

SEQ ID NO: 725094 - DNA, 666 bp, Homo sapiens
  misc_feature (653)..(653): n is a, c, g, or t
ttttgttgggaacgggggtttttttttaaaaaatgctttgtttagagataaagccttgtctgagttgttgttgagggaatggctggtgtataatatagttattgggggttttatgataattaagacccatgttggtaaggaacaatttgggcggcttaagtaaaaatatatataagtaaatcttttgatgtagtaagggaaggcagtactcatggagtagcggtcgataatcttagttgttcattttggttatttggattggacattttacagcatttatttaatgattttcgttctcatgagcaatgtgggtttgttactagttttgggtaaattattcagtctgtttattccttaagtttgaagacatagattttatgtggaaaagacctgcattttttggatgttatgatggtaattttctggaagtttatcaaacttttggtagcatgataaagatcgctgttgtggtatacatgttataggagttgtgtgcatgagagctggtttcattagcaccgcctaattgtgtccagatatattttggttttcgtaaatcgttaatagaggttgggcttcaaaagacttatataacgctccctctatatctatatctatctctctctctctatactctcctcgtgccgaattcnctgcagcccggag

SEQ ID NO: 725095 - DNA, 157 bp, Homo sapiens
cccctctatcatgcttagttggctttgcatttttaagtaatcagaaagattctcttacccccatgcccttgagccatttgctagcggcgatcgtcattccagaagatagtgccctaagaacttgtcagattcagactgtatctttttcagcattcta

SEQ ID NO: 725096 - DNA, 387 bp, Homo sapiens
  misc_feature (13)..(13): n is a, c, g, or t
  misc_feature (267)..(267): n is a, c, g, or t
  misc_feature (303)..(303): n is a, c, g, or t
  misc_feature (347)..(347): n is a, c, g, or t
gcacttggccatngtctcttacatctccttacccagtttttacagggccgtgttagagccttcacccatggaacagtacaagacatgatgctactccgagaataccgacagctccaggaacagcagtccctactacccagcctctccccccaaccatcgcccctattcagcaagaaggcagccagagggacaacgggcgcccctcttctatttacctattaaaaggctgggaatgttagggaacaagtttgcaccaggaaccccttncccaccccaatggcagctgttccctttaccctggantattctggcagctggcatttcgggggggccctttttttaggggngcttacaggcaagggttcaccagattttgcttttacaggc

SEQ ID NO: 725097 - DNA, 1399 bp, Homo sapiens
gggctacgttcctctcgagaatcggcgcctcgccctgctgtgcgtctggagctgggctaaatgcctgggcgcgctcccgcgcagcggcgccatgaagctgctcggggactctgcgggtgctctcgggaccctgagacttgccttcaggcgtgcagcaggcagcgaggtcctgggacagcatggtggagcggggaaactcaggacgggaccgagtcctgtggcagacctggactggactgccactttgcctgcatccttgagaacccccgttggacggtatgccccacatgctgctaatcgccgtcgggaggggtccggcggcggagttagagcggaggctggccgggccgggcagacctccccgtttggaacgcgtactatcatggccgatggccagcgcgtgcctggcgactgattgctggatgtggcgagaagtgggcttggccacagaagtagtggggccgcgagagagtggtatgccattgggatgaatggtaccaggtttgtgagaaaaggagacccaggaaacggtgtaatgtatcccggttgcctggttgggagaaagcaccagacagtctaaggatgagacaactgtggtgacggtagagcatacagcgaaagggaccggaacgttgaaacagatagagatgacgagagcgaagccgggaacagtgtacaccagtagataccgggaagagggaacccatgtacccgatgggactacaggcgacgaagacagacaagcgggatagacacgacgaccacaagtagttgggtagagttagattgccgagctccccgtggacgcattcgatgaagatagcgcgccaaggactgagtgagagacaacagccgtaaggacaagacccagaggggcacattgatgtagcgcggcaagaagaaaagcagaagttacaaggtagaagatgggagaacctagtggtgtcaccacttgtcaaactttagaggaggcagcgatgacagtggcaccagtaccggttagcaagaaagcgaaccgctcagaatttcaccgtgtggggtaggcacacgagaatgtggacaagcgctaacagcattgaggaccatagggatgatagaccacacagataggcaaacagtccaattctatgagaacaccgcaaggtgcagagcgcgaaaaaagttagaaatcagttggagaatagcacccacatatagagccagtttgggatctcatcatgcacagttaacgaggataaaagacagacatagacaataccaattgagatcgagaatagggtgaacagaacaattagaggaaaaatttacgaggaaaagccataggatcacacgagagggagcagaatagcagtgggagtacgagtatagaccccgcgacaagtaggcagaccaaaatatg

SEQ ID NO: 725098 - DNA, 203 bp, Homo sapiens
agctcggatcccccacacccggccttcgtttttcttttgacacagggttttgctctgtcacccagtgttggagtgcagtggtgcagtcatagctcactgcagcctcaaagtcctgagttcaagcaatcctcttgcctcagcctcccaaggtgctaggatctcaggcgtgagccactgcacctggcccgaaaccaagctttctc

SEQ ID NO: 725099 - DNA, 170 bp, Homo sapiens
aggctctgacggttctcctcctcctcagggggctgggatgagcactcggccagacgatcttccagcagattccgctcctggctcagctgggaattcgtggtcttccaggagcagcaggatcctcttcaacattgtcttcagtggggggcctcgtggtgcgatccccgttc

SEQ ID NO: 725100 - DNA, 1325 bp, Homo sapiens
  misc_feature (9)..(9): n is a, c, g, or t
  misc_feature (13)..(15): n is a, c, g, or t
  misc_feature (17)..(17): n is a, c, g, or t
  misc_feature (23)..(23): n is a, c, g, or t
ggcgggaantgannntngagatncccatcctgaaggacgtggcactgtggccttctgcgacgcgcagccacgcaggagatccatgagaaggtcctgaacgaggctgtgggggccctgatgtaccacaccatcactctcaccagagaggacctggagaatgttcaaaggccctccgcatcatctgtcctggatatgggcatgtggtttttgacaacatctgacatcaacgtcgtgccggggattaaggcatttgcctgtctgcaacagtgcccagcggcgtcttgtggaggagacaggcctgactcgacgctgtgcccacatcctgaacctgtaccggcgggccacctggctgcaccaggcgctgcgggagggcacaacgagtccagagcgtcagagcaagatccaggccgaggatggcgtaccggacgctagacagggatccgccggggacgacctatggagcatcatcggaccaatggccgccgtgggggcaggccaagtgtgcagcatgcgggccccaaggcacctacggtgactaacaacgattgcacttacaacggacccattaacatgtacggcggatgcgcgtggcagccgtgtcgctggggacagcaagcaggatgtcaagcaaccacatgacaggacctggacacatataccaacaaagaagacaacaggcactagaacccatagagacagggcgggaccaacaacggaagccaacacaacaacccaagctccaatcacccacgagccacacacccggccacagcccggaccagacagacacaaggggagccgtacccatagctagacacaacagacaccgcggagataggaccaagagatggacaatcaacaagaacaaggcaaggctatgagtcccaaagagcaccgcaaagcagaagagaccgagaggcccaccgcaaggcacagagcaagagccgcaaagaccccattcagcgaaaaggcaagacaccgacgaagcacgacgaccggaccgcgtgccaccacaacataccgaagcgaaaagaggcccggaacagtgggcaagggagcacatgccgccacaccgacacacagacgaaacaggcaacccgaccacgacccaatcagacgagacggacagagcaaaaacacacggccagacgacgaggagacagaaaacaaacggaagggaagcgcagacaccaggaagaacagcgaacgtcggcgaacacaaccgcgcagagagacgagaccaccgcacagcacgggccaacagcgagagcaaagcagcagtgaacgcgacagggagcaagaaggacggaccccggacacgaaaa

SEQ ID NO: 725101 - DNA, 263 bp, Homo sapiens
tgtggctgattagaggatccccgcgcagatttgacaggtcgcgcgatgagcagtgccccctcggggcggtgtgtcgggcgaagttgacgagcagcccggcggcggttgcgagctcgaagttgccgatggacgagcccggatagaacagcacgggtggggcgtggggccgctcgctcagcacgggatgcaggtcgagcggctcctcgaagtcggtcaccacgcctacgcactcgatgtcggaccgcgcgggggtcccgaagctc

SEQ ID NO: 725102 - DNA, 245 bp, Homo sapiens
  misc_feature (134)..(134): n is a, c, g, or t
  misc_feature (167)..(167): n is a, c, g, or t
  misc_feature (177)..(177): n is a, c, g, or t
  misc_feature (195)..(195): n is a, c, g, or t
gacgggtatgttatgtatatattatcacaattaataaaatatcatttgtgtcttaggaaaatagtattacttgtattatctagacattaaaatagaatgagaatacttaggtgtttattagaacataagctacnccgtgacaactatattaaaatgacagatgcaanaagagcatanacgggaagccattcatgngggcatgtacttgggtgaaaagctgtgcccgtcaaatacttcactccttg

SEQ ID NO: 725103 - DNA, 508 bp, Homo sapiens
cgcaacagagactcggtatcaaagaaagaaaaacatcgttgtgccaagccagactataatttaatgccatctggtacttagggaacatgtaagataggtaatacactatcataatctgtgataaataatatacatggtaaattcaagtcttgtactacattagggatttattttagtgtcagtaggttcttcctaagattagagttactgggtcaaaggtggagaataagggtctacgagtgtacgttgaccaattgtcttccgtaaagactgtacgaacgtccagttccagtgatatgatactggtggtctcagtagaatcttctccaacactgagggtattagtagtaactttattagatggagatatcaggtgctaataccaattaagataggttaatcaacagggcttgaggttaaaatatatcgtagaggacaggtaaagtcaaatttagacttcataggtcatcggcgtcctcactcctgtgcatattctgtaggaagcaca

SEQ ID NO: 725104 - DNA, 756 bp, Homo sapiens
cacaggcctgccttctcccagagcctctgcaggaaccgtactaccaggcaccctacacgctcgtttggagctcaccggcgtcctcttgcatcctgagtggtcgctggccactggctggaggttataagaagcgcccaggcatcgagatcttgttccaccagctgtgcccctttatatgaaattgtcatcttctacgatcgagtagactggctatgactgctgtttccagctcattgatagatgtggaccccctatggcttcatctcctaccgcctattcctgggacgccacaagatacatggaatggacaccatgttcaaggatatttcatgtctgaatcgggacccagcgtcgagtagtagttgtgggactgcagagaaggagagcctttccgcctgcaggccctagtagacggcgttgccctgcggccctgggacggcaaactctgatgaccgggtcttgtcggatctgtctgccttcctcaagaccattgcactgaatggtgtggaggacgtgcgaagccgtgctggagcactatgccctggaggatgacccagactgtcggctttacaaacagcgggtaaagccggctagagccaggaggtagcagctagtcgccttggtccgagctctccaagtcccaacaagcagtaacctctttccttggctccctcaccagcccgttgttggctcgactccatacagccctgaactcctggggctcctcaaactcagtgctgggtccagggccccagt

SEQ ID NO: 725105 - DNA, 353 bp, Homo sapiens
tcctatcaggctagcagtccgcactcctagagcacggatatacagaacgagtgggtgggtgtcggctgcgtgtgtgtggcctgatgctccacggaggtacgagacggggggctcgtagtcggtttccttctccagccagccgccagggcgtcgcctgatgatgagttttctgacttcgtcatatactccgatgagaagagagtaggggaaggcacagaatcaccaggtaggtaagaggggatacatcctaagagacaacaaccattccagggcagtaggacaggaaagcagccaggactgtctctacaaagaggccaaatatcaagatctagatcttcatcccctgctggaag

SEQ ID NO: 725106 - DNA, 280 bp, Homo sapiens
  misc_feature (218)..(218): n is a, c, g, or t
  misc_feature (233)..(233): n is a, c, g, or t
  misc_feature (246)..(246): n is a, c, g, or t
ggcgctcaatggaattctcgtgtgagagagtatagacggagcttggctttaaccatatgcaaatttaaagagacacagttatagagcagaatctgagctgttggtttctgcctcttctgcagacagttctctaccgtgatgccatttgcagagtcagctggaaattactgacagaatgaatttacaaatggctgtcaaaacctctgagaaaacattgntttaaaaaaaaacangaaaaaacacatnataataccgtaattaaaacagagtaccttaagga

SEQ ID NO: 725107 - DNA, 1011 bp, Homo sapiens
gtagcggcccaagcctgtcctttccagctgctgtaagtcctgcgacaccaagttctaggggactgccgatatcccggtagtcaggaaaggcttccttgaggaggtcacatttaaccaaacttcaatgatgttataactggagcaaaggagatgcggtcggggacgatagaagattaccccagaaagtgtggtgtggcactaccgaagaggtgccatggggagcgagaaaagagtaaccaggtccagacgagaatacagaaacaaagaatttgggtcctccgcggcctttgaactcagcttggctctcaaaccaattgtttgattgagcgcctcgacggaccctgggcgtgttgatttaaacagtcgtcccttaggtggtggtcctgaggaacatggccgtggtcacttcaatacgaagccggtggggatgaccgccaccggaagaaagaaatagccggccggggtaacatgctacgtacctttgtaaagaagcatctagatggagtcagacaatgcgagcattaagtggggctctattacaaagaaggggcctcaaagcagccttgtagaaaatcaattatgctcccgcggctggtggtttatatccttgtgtggcctccaattcatggccagtaagggattaagaaaaccactacttttgaaacttcggcgattgagaacctggaaagaccatgggggcatacaaaaagtggtttcaaggaccacagctccatggaggagtgctcttgaaagggaagtcctgtaaggaggagcgcgtccctggctgtgaagtagagggagtgaatgccagccgcgtacattgagtcttgaattctgcgctcatccaaaagagaaaccgccatcttgacacaggacggcagatgcctgagcccagtgtaaatgtactaccactgaaggatggtggcaccacacgttgagtccttttgcgccaaaagggagtaagggaagaaccatccgacatatgggaagatgcgccataaactgacaacg

SEQ ID NO: 725108 - DNA, 144 bp, Homo sapiens
ccgcgtgcagggatgcgtcccagcatttattcccatgcacagagtgggtcgtcccactgcctgcccacgcacagaagtggtggccgctgcggcacaccctccctggcctcactcaggctgtgccccagggcgggggcgtaccct

SEQ ID NO: 725109 - DNA, 365 bp, Homo sapiens
acagggcccaagacattctgtagatgctttgggggcagaaaggatcctggggctagggcattgggtaggagctcatgctatcttgttgtttcccagcttacactctagactagattttcactgggccttttccaagatcttgtgctaacagctgagatttttatactagctccgttctctctccgtgcccgccccacgccctccgctttccctcattctctgcatgcctggctttgtgttcttccgcccctcgcaggggagcctgggctcgcgcacaccctctgacatggagctgggggcatcgtgcgggccccaagctctgcccctgagctacatggatggagccaggtgaggaaaaggggcag

SEQ ID NO: 725110 - DNA, 780 bp, Homo sapiens
cctgtcacatatagagaaacttcgaacctcaatgatagatgatctaaatgcaagcaagttttctataagaaaaggatagaagagctagggcagagactccaggagcagaatgagctgattataactcagagacagcagattaaagactttacctgtaatccattaaacagtatcagtgaacccaaaggaaatcctttagcctggcaggctttgaatctcagccagctgctccagctgtgcctatgaatgccccagccctgcacactttggaaactaaatcaagtctgccaatggtgcatggaacagggcattctcggttcggacattatggaacccattgaaagaacatcttcacgaagaggagagaaaccagggcggggaatgtgacacagaatattaatataacaacaaagtgcatttaagggaaagctttgaagagtaactcctccctcactaggggactaagaacaatggtggagcagaacttgatggagaaactggaaaccttggggattaatgcagatatacgtggcatttcaagtgatcagttgcatagagtactaaaaagtgtggaatcagaaagacataagcaagaaagagaaatacctaactttcatcaaattcgagaattccttgaacatcaagtcagctgtaaattgggagaaagcactactctcttcagatcaggcaggtttctcaaatggtacctttcaactggggagtccccaaatgattcaattccttcaaaaacgacatggttgacaaaagtggtctaaggtg

SEQ ID NO: 725111 - DNA, 504 bp, Homo sapiens
gagagggtcccccatttcctcggtaaggagggtgacctcctcgctccaatcagggactgagctgagctgaggacaagctgccctttcggtgagcctatctctgtgttgcttgtttctaggaactaatcctccaggaaattaacagacagtttgctgtggacaactagagccctccccttccttagccctgagcgaggtaaacaattctgctctgccttccggaagtttcaaattagctcttcaaccagcgttttcacgcagcttccagtcctgccacagtcttgaagaagagatcagctttcgcgtcttcattcttgccaagattagctgcccttcgaatctcccgtgtgtcattaatcccagcacgaacaagcacttgggaactgcgggctgcagatggtctgcttatcctacggaaccctcctcttttgaggcttaacccctttagtctttgttgcttctgtagctttctgatgccattaaagagatgatttttaaaaaaaa

SEQ ID NO: 725112 - DNA, 501 bp, Homo sapiens
cagcacggttcagtaggcagaggccacttctactacccggctaaggaaaagatgggcagagcctgctctggatgacgctgtgttccagccggcggagagggtcccccatttactcggaactaatcctccaggaaattaacagacagtttgctgtggacaactagagccctccccttccttagccctgagcgaggtaaacaattctgctctgccttccggaagtttcaaattagctcttcaaccagcgttttcacgcagcttccagtcctgccacagtcttgaagaagagatcagctttcgcgtcttcattcttgccaagattagctgcccttcgaatctcccgtgtgtcattaatcccagcacgaacaagcacttgggaactgcgggctgcagatggtctgcttatcctacggaaccctcctcttttgaggcttaacccctttagtctttgttgcttctgtagctttctgatgccattaaagagatgatttttaaaaaaaa

SEQ ID NO: 725113 - DNA, 476 bp, Homo sapiens
  misc_feature (22)..(22): n is a, c, g, or t
  misc_feature (47)..(47): n is a, c, g, or t
  misc_feature (125)..(125): n is a, c, g, or t
  misc_feature (131)..(131): n is a, c, g, or t
  misc_feature (162)..(162): n is a, c, g, or t
  misc_feature (242)..(243): n is a, c, g, or t
  misc_feature (249)..(249): n is a, c, g, or t
ccccaagccgactggagccgantagcaagccgctttaaaacggattncatgcatagctgcagaacctgatggtagggaccttttggttttgttttgttttgttttgtttggtttttggttttacnagaagngtttttattacaagaaaaaattccgtgattntgcagaatgctggtttttacaccatcctaagaaaaactttacagggtgttttggagtagaaaaaggttataaagttgganncttaantgtaaattaaccattgagtgtcaaagttctaaagctgaactcattttgtgcaatgaacataaggaaagactactgtataggttttttttttttctccttttaaatgaagaaaagctttgcttaagggttgcatacttttattggagtaaatctgaatgatcctactcctttggagtaaaactagtgcttaccagtttccaattgtatttagcttctggttggaattc

SEQ ID NO: 725114 - DNA, 397 bp, Homo sapiens
ccggagaagtaacttctcaagctaattttctcacagctgaaatgagaataagctcatctacctagacaaacccttaacctgggtttaagtgatgtatcagaggaacaataaataatagttacaattactagcatatccctcctaactcagattcccagtatcaagcatggagtcatgcctgtagaggggctttctcaacctcagccttactgacattttgggctggataattctcccttgaggggctgttgtgtacattgtggggtgttcagcagggtcccgggcctctactctctagatgccagaagcaaccctctccttaattgtgacaaccaaaaatggctccagacgttgccaaatgtcccctggggaacaaaggggtcccccagctgagaac

SEQ ID NO: 725115 - DNA, 235 bp, Homo sapiens
  misc_feature (6)..(6): n is a, c, g, or t
  misc_feature (15)..(15): n is a, c, g, or t
  misc_feature (23)..(23): n is a, c, g, or t
  misc_feature (49)..(49): n is a, c, g, or t
  misc_feature (56)..(57): n is a, c, g, or t
  misc_feature (154)..(154): n is a, c, g, or t
  misc_feature (194)..(197): n is a, c, g, or t
gcacgngggccccanccctagangggcccaaatgagagaatggtacttngggatgnnaaacggcgcctggctagagacttcgggtgtgtgtgtctgtctgtgtgtatgcatacatatgtgtgtatatatggttttgtcagttgtgtaaatttgnaaattgttccctttatatatgtatgtatatatatatatgnnnntatatatatatatgaaaaataaagcttaattgtcccag

SEQ ID NO: 725116 - DNA, 108 bp, Homo sapiens
ctgcggatggaaatcagattcaaggagtggttcgaggaaatgtacttgttctgatccgggatgttgcaggtaacctactgaagagcttaaatggtttggttgaccagg

SEQ ID NO: 725117 - DNA, 323 bp, Homo sapiens
gcgagaagccactgtctatccatcgaagtgttgtgtaaaggctacccttccgaatatgccacatacctagaatatctgccgttccttgcgtaatgacgacaagcctgactactcgtacctgcggcagttttccggaatctgtcccatcgccagggctactcctaatgactacgtgttcgactggaacatgctcaaattggtaagtcgcactgccagcacgttcgctgagtgtggtgtgcgggggatggcttgtcagtgagaggccggcggccgccttgtagagagctatacgctccccaagaagattatgaagtatgaccctt

SEQ ID NO: 725118 - DNA, 673 bp, Homo sapiens
  misc_feature (361)..(361): n is a, c, g, or t
attttaagtgatgactgtgccaccctaggcacccttggcgtcattcctgaatctgtcattttattgaaggctgatgaaccaattgcagattatgctgcatggatgatgtcatgcaagtttgtatgccagaagaagggtttaaaggtactggtcttcttgacactaatctttgatacatgctgactgctaagaaatgaccagaggggaagaggagtttgacatgttagggcattaaagcaaaggtggatttaagaattaaaccattacatgccccttccagcagattgcactgatggacatcagacttgaaggaaatgtttccaattttatatttaaggggggtggtgggtgggagagggcnagttaaggccgtacaagtttagtagcagtaattggtaatcatgtttacatatgaaacttatagtcgcggtaagggaattaaagtctgttatatttccttggtcgagttcataccatatgcgttgttccataaaggattgtttcaagtaaatggtacaacaatctgcttttaacgaaatgtattttagcgaccataccttgtttaccaatgcctgtttttgatttataattctacctttaaatatagccttgaaggtgatcaaatattcatctttcgctcttttcccttctctacttcactctttttcctacc

SEQ ID NO: 725119 - DNA, 1487 bp, Homo sapiens
ggctcacacttgtaattccaagtgcattgggaaagctagaggcggaggggatggatccgccttgagagccgacggagattgtacatcactcagcactggtgtcgacatgtagcgacgcacccgtgatatctacaaggactaaaatacatacgcaactgcgtacaagaatgacagaacatgagatacctggtgcctgtttcatgtgatgtgagcgtcctgaatctgtccccacaagttggcttagatagtggtaatcgtgtgtcggttgtggagcatgttaatcgaatgcatcttccagtagaatagataggtgtgcttggttacgaggactctctagggcgggtctacggtctgaaagataggagaatttttgcttcgaataccacttgtagaatgcaagcatagatcgccctgcacgtcgtaccatataatttctctacccacatattgtgagtgctttgaacaggaaaggatggcctggaggattggttcgcaccattggtcgtgagtgagtcttttaggggcatcaacgatgggtgaacaccatctcaaagccgttcccctagggcgtctccactcactttgtgttgagtctcgcccaaggctcggctcttttcatggatcggaccccaaggaagttacgcggaggggaggatccccctcacggacccaatcaggaaatgttccaagaatgatcctcaaaaaggtcttggcggccgatttgagttggaacctacctggcgaccacttggctgaggatcctacggaggtcctcaacctttttgcgtgaacgacggcatttgatggggccaggcggaaggaagttccgacttcttggcaaaggatcgttgcgtcaagggcagggaatgcggtttggccaagttcgagaggccccgcagagaaattttgttgcctcacatcatgtgggtacctctcctaaggactcgtgggtccctaacaggtacagcaggaaggaactccgcggagatcttttcagaaaaaggaaaacacgattgttcggcaaaagcaaagaaaaacgctgtggctgggtaaccagcggacacactgtgacacctatcacacattatgcaccacgttgttgtgtgcgtgctgtgcgtgccatgggaagacccttcttcgaaagaatatcgtcgtgttcttgtaaacaaaccctctcttgtaagtgggtgcgcgcggcgaggtccccaaagaagtgcttcttcaggcaccgggttgcagcaatcggggctggggcccacacaggggaaaaacccgggtggcgcaccagagacgtctgtgtgagcgtgcgcagccatatcgccgacccaggaaaaaatgaggaacgccccgcggggagggggacaatcgcagagagcgctcagtcggagagagagaccccgcaaagagaggggttgcagcggggcagcaaacagcggggaatctcttgccaacgtgcagggttcaagggcagtggccaagtcatagat

SEQ ID NO: 725120 - DNA, 403 bp, Homo sapiens
  misc_feature (246)..(246): n is a, c, g, or t
ccgctctaaggatggatgggggccatgagcaaggagtgaagatggcttctacaacaggaaaagacaaggtcacagattctgccctagagcctccagaaggaacatagtcctgccaacaccttgattttagcccagtgagatgtgcctcagactctggcctccagaactgtaagacaataaatgtgtgttgttttcagccaccaagtctgtgggtaactttattaacagtagctgtagggaaaccantacaggaaaggaggcaagggggagacctgttctattatgttttttcacaacggcatctactttaggcagtgcttatggatttctgggtattccttttggggggggaaaattttaaaaggcccaaaaacagggacccaggaaggcacttttcaggagt

SEQ ID NO: 725121 - DNA, 219 bp, Homo sapiens
ccctagcacttcctgtacctgggtctataggtgggcgtcaccatactccgctagtgtgtgtgtgtgtgtgcgtgtgtgtgtgtgtgtatgtgtgtgtgtgtgtgcgcgcagagatggggtcccactgtgtgtatatgtgcgtgtgtgtgtgtgtgtgtgtgtgtgtgtgtgtaggggtaaaacatgtctctgtcgcgcaagatgtatctcacatattgt

SEQ ID NO: 725122 - DNA, 1255 bp, Homo sapiens
ggacgcgtgggtcgacccacgcgtacggagcgcggctcagatgtggcttctgcccagcttcccaacttcaggcatgctcttgctggtgttcgggggcctccagggctctggcaacgctggagcggcatgctgaccccaatcctggcaggctgcgctgaacgccagcctgtcctcgtttgaccctgctacgctcaactacgctgctcgctggcccacgcggctacgcccgctacccaactccgccaccgcgcacgcgacaccgccacctccctcactgctacccctgcgcaccggccgcgtgcgcacgcgccctcggccccctccacctccaacggcgactgcgcgctcgcccccgcgcccaccactccgtgtacacacgctctcctcacaggggcgcccccgcaccgcgcagccgctctccacgcgtgcaaagcccacggtccacgctcgcagacaacccacacgcgggccgcctctcctcgacccacgccgcgtccacccctctgccgccaacctggtcacccgtgccccaacccacgccaccctctgctccctccccaccgacaccatcgacgcacacccctctctaccctcaccctccccccgcgcgccatcgcacatcagccgcaccaccgctccttccaccctcgcgcgctcttcacatcctcctccaccctctgagcgctgcccccgcaccgctgcacctcgagccaccctctgcacctcgcctgcccatgcccctcggccgccccacgcgcactcgctcgctgcgaccaccaccacgcacgtccacgccccccgcacacgacccagcccctcacactcgccctcctcgcaactgcgcgccacccaccgaacgccgccgctccaccctcccgcactgcgccctccactccaccccgcctcgcccttgcgcgcccttcaccctaccctccccgcaccctcacccctcgccccacctgcctgcccctcccacgctcccgccccccgcaccaccccgatgtcggcgccctgcccacctcccccccgccccctcaccctgcccacccccagctagcgcatcccccctccagccctccggccccgcggccccccccccacgctccccttgcccaccgccgcgctcacctcaccccccgcccacctcctcccggccgccctccccgcctcgcccccccacccccgccccccccgccccgccctcccgcgccacccgcgccccccccctccctccccccaccccccccgcgccctc

SEQ ID NO: 725123 - DNA, 314 bp, Homo sapiens
  misc_feature (29)..(29): n is a, c, g, or t
  misc_feature (144)..(144): n is a, c, g, or t
  misc_feature (196)..(196): n is a, c, g, or t
  misc_feature (250)..(250): n is a, c, g, or t
caaaagtgcactcttctatatctaccaanagcgtattaggaagtaagaaacgatgaataattaaaacaggaaaagatactaaaagtgctagaggtaggcgggtcaccatgttaaaaccttactcgaaagatgacatcgaaccanacacttgaaagaggtagagaacttttccatggggatgtaagtgggaagagcnttccaggcacagagaacagccagtattgaggcctaaagtggttgtctacaaggncagtatggtgagtggacagagagagtagatatagaagagtgcactttaagggatccgctaggtc

SEQ ID NO: 725124 - DNA, 310 bp, Homo sapiens
gaaaatatttggagagatttattctaagccaaatttgagtgactataacccatgacacagccctcaggagaccctgaaaacatgtacccaaggtggtcagggagcagctgggttttatacattttagggagacatgagacttcaagtacatttaagaaatacattggttctgtccagaaaggcaggacaactcgaagggcggggaggggaggatacctccttttccatcatcttttagatcatttaattctagatatttctttatttttcacaaatgtatgtatttcttccctcttcatatacaagtctt

SEQ ID NO: 725125 - DNA, 295 bp, Homo sapiens
agctgactggggagagtaaagggaatcaggatatatgtcaggcatagggctgtccagtcatgctgacaacagaggtcctgggagtgaaggacagagaaaaataaaaaaactcccccaatctttaacagtactgtaacagctcctgtaatttcatgtgtcagacagtaatctctgctaccccttcttctggcaacccccacagcctccagcagggcaggcacctggtagaggcatatacagatggctagaatgaaacaaactctctggcgcaataaacctccaggctctgtggaaa

SEQ ID NO: 725126 - DNA, 142 bp, Homo sapiens
atggtcatacctgttcatgtaaaacgacggccagtgcatgcccatacctgttcatgtcaaacgatggccagtgactgccaatgcctgttcgtggatgtcgacggcaaatgactgccaatgcctggtcatggctgtcgatggc

SEQ ID NO: 725127 - DNA, 892 bp, Homo sapiens
aaagcacaccataaatccactatgatcaagtggggggactctggtgccgggttctgaatatctccctcttcatccctcccgaaatctggaatacttatctattgagcctattacatccaggtttcacacgaccattcctcgttgtcatgtttaatacaattcatattaaattctcaacgaataactcattttaaatataatgctacagggtttgcccggcccgtggaaaaaaacttacaggtggcgccgttaataggtatcaattttaggagcttctatttggtgcatttacatcgcaactggtaatctgctagaatccactttgcctgtgtaagtgaaagaatatagactgttatctatgtatggcccttatcgaatagttcctgcacttttcattataatacgtctttaaccttcattaaattacttatctaggccaaaggtgttcatggtctttagcagcttcagttgcattcttattcctttcctcttcctgttcattttatgcttctcaatgtctgaggaccatatgagggttagaatatattatctctgaaaaatctacgaaaaaattgtgtatagagcgaaccattacttcaaaagttggactggccacaattctccactgatggttatttttcagtactcattcataatcgtgtcaccctccaacttaaatgaagtttggtatgatccagtgctattcttccggaataggttgtctcgcgggttgggggtaattactaccctcgtaatacggtgccaaattcctgcctggggtgcccggggaatttaactgttaggcatacacatgttgcactgggcgaatacactaagccggttcggtgaaccacaacaaaaagtgggggcgaataaccagggggcggagaat

SEQ ID NO: 725128 - DNA, 849 bp, Homo sapiens
gagacagagccaggaccctggaaggaagcacggatggcagccggcaacacgcagttggagcctgggctgctggtcctcagctctgctgggcgggcacgtacgtagcgtgctcacacacatcacagcccggcattggcgacgccactggctgctcgaagtgtaacgggggcccccaagcaaaccaccccagcggcctggacatggaaactgaacacagtgccggacagcaagcttggcaaggtcctgtctccccagggagcgaggcccctgggcaccagtcgctggctcgctgtccttcccaacggctccctcttccttccggctggtcgggcctcccggctgacgcgcggattctccggtgtccccgccctgtgacacgccactggcccccggaccccgctccccactcctcgcgatctcgtgtttctcaccatcatcccgtgcccccccacgcaagctgcaccattctcccctgctgatcctcggccgcccggttgttccccactcgccggcgcccgctcctctgctgctccgcaccgcagcctccccctgccagccgcctctctgcctgccccccttggactgggcaccgccccctgcgctgccctaccctccccccccccgtctcctgtgccccacacctaccatgaccactcccccttccacatctccccttctccccttccacacccccaccacaactgcctaaccctaatccccgcgcccacaccatcatcaccaaactcaaacattactacttaaacctaccacaccaatccccttacctcccaacacctgcccccgacacaccacacccacttccaaaccgccaatcacagacaccctatt

SEQ ID NO: 725129 - DNA, 207 bp, Homo sapiens
ctgcaggtagacagaccattcgagaaggtctagtgaaagacataattacctgcaccagaataacacaagcctaaccttgacaacgaggcaaagggaggggtgctaaacagttattacaattaactgcatgtttatctttggtcctgttatcctctaacacaggtgggtaggtagaacaggcggccgtatttcagggccagagtacaa

SEQ ID NO: 725130 - DNA, 1172 bp, Homo sapiens
tgtggcagggcagccaggcctggcgatgcggggctgtgtctgcgatgcctggagctggcatgtgcagacaggtggttggtccacccccctggctgcttgctcacgtgtgtgtggactcatttcacacctgaactcgcgcacacggctttggacaaccagcaatgcgtgctttgcttgcgtgttgccatctctgcgcggctcactggccacaaagcacaaactactctgcactgtactcgtaacagcttctctgccagttccattctctgcactgacacgcactgcacacaaagcaccgactctcctgctactgcgctctcctcaaggcactcactgcatctcacttcctcgcgcaacacagcacttgctacctgcgcacacctgctctctcacacgcacacacgactcaatctgtcctatggggtaaatacgctatctacgctactggaccttgtgtttaccccaccaccatgcgacccccttaacaccctcaccatccaacccacacctcgacacacctctcgccccactctcaccccgacacccctccactttgccccacaccgcctaccctggctccccctaaccctctccccgctcacctctcgggctcccttcaactttctgactcgcttgactctggccccgcccgtgcactcccttctacgcgcggcccttggccccctttacacccatcgcaacacgcccgccttcaccaatgttctatatctcacgccttggctggcaacccgtccaacatcggtctccccacttggcaacttggcactcggcgctctacccctttcccctcactcactcccctcgtctccgctatctgactcccagatttcttctgggcagacaacgaccgcggtgtgccaaccccgatctgctcggcgccgcaccttctttggcgcatcggcccacgaactgcctgcgacaccgccctttgggcgcgtcgggcaaagccgtttccttggtcgcacgcgttccttgggcgaacccagcctcctcctctgtctcttcactctcgtacacgcgagcttgtatctgtcccagtctctctcgatgccgatcctcgtagaacgctgtctgctttggtcgctgaccactactgtactccccttggggtctgcacccccccagcggactaggggacagctttccacgcc

SEQ ID NO: 725131 - DNA, 1223 bp, Homo sapiens
aagaagcaaaatttaatccaagagcaacttttagtgaatttgcagccaagcatgctaacagattcaagcattccaaagcaattgcaaacagcatgcaaagcaccgcagcacagcctatggtttcaatgcagctttggtggcccgctgctcacggaagcaacagcagaacagcaagcattcgcaagacccagcaggtgcagcaagcattaacatcggcatttctttgcacactattcatcgtcaatccatccacttgagacagtccagtcatcgcatggcagccaacagtaacacagcaccaacagtagcaaagtgcatcccacgttcacaacagccagtcagaatagttcatccaagtgcagcagaaagcaccatatttccaacaccagtcaccatatgcaacacaacatcagcaccaagcaatttcagcactccagcaacacacagcaacacaggcagcttgcaacaggccaagcccggccattggaggcccaagccattcgcagcaacagcagcacacagggcagggtctcagacacaaggacgctggtctcaggcacccacacacccacaccagcacacatcagcatcagcagcagcagcagccagcagcaacaaacacgcagcaaggcaagctcatccagcaatttcaaacgctacttctggtctgaccatggctacgttcgttcacgatgtgtccatggtctagatactcgtaggaccctccgaaacagatcaccgctgggaatctggatccttattggacccgacgacgagaacagagcagcctacttacactgccacaccttgaatgcaccttaccaaaaaaccagcacagagcactattcagcaaccttctggactgaaacttcctgcatatcctttacatccacgtgcacagaagtcacacacacatcactcaacgcgagaaccatcgacgggcctcaaaagaaccaccacacgaggagcaggaacaaacaacaaagacaacatggagcacacactccaaggaaaagacacatacacagacaccaggtaactaacggacagccctggacccaacccgccggagcaacacagcaccaaaaaaacgcaaaaacgcgaccaccgtacacaacaaaattcaagcaaacggagcaagcccagacacgacagcaacgcacaaacgagagcaaacagaaagaacaccaaacgaagccagagacaaaacaaccggtaacaca

SEQ ID NO: 725132 - DNA, 871 bp, Homo sapiens
  misc_feature (2)..(2): n is a, c, g, or t
  misc_feature (197)..(197): n is a, c, g, or t
  misc_feature (263)..(263): n is a, c, g, or t
  misc_feature (265)..(266): n is a, c, g, or t
  misc_feature (272)..(272): n is a, c, g, or t
  misc_feature (275)..(275): n is a, c, g, or t
  misc_feature (277)..(277): n is a, c, g, or t
  misc_feature (281)..(281): n is a, c, g, or t
  misc_feature (305)..(306): n is a, c, g, or t
  misc_feature (317)..(317): n is a, c, g, or t
  misc_feature (346)..(346): n is a, c, g, or t
  misc_feature (349)..(349): n is a, c, g, or t
  misc_feature (352)..(352): n is a, c, g, or t
  misc_feature (373)..(374): n is a, c, g, or t
  misc_feature (376)..(377): n is a, c, g, or t
  misc_feature (383)..(383): n is a, c, g, or t
  misc_feature (385)..(385): n is a, c, g, or t
  misc_feature (392)..(392): n is a, c, g, or t
  misc_feature (398)..(398): n is a, c, g, or t
  misc_feature (401)..(401): n is a, c, g, or t
  misc_feature (403)..(403): n is a, c, g, or t
  misc_feature (405)..(405): n is a, c, g, or t
  misc_feature (410)..(410): n is a, c, g, or t
  misc_feature (415)..(415): n is a, c, g, or t
  misc_feature (417)..(417): n is a, c, g, or t
  misc_feature (423)..(423): n is a, c, g, or t
  misc_feature (432)..(432): n is a, c, g, or t
  misc_feature (471)..(471): n is a, c, g, or t
  misc_feature (478)..(478): n is a, c, g, or t
  misc_feature (488)..(488): n is a, c, g, or t
  misc_feature (507)..(507): n is a, c, g, or t
  misc_feature (519)..(519): n is a, c, g, or t
  misc_feature (538)..(538): n is a, c, g, or t
  misc_feature (549)..(549): n is a, c, g, or t
  misc_feature (557)..(557): n is a, c, g, or t
  misc_feature (572)..(572): n is a, c, g, or t
  misc_feature (588)..(588): n is a, c, g, or t
  misc_feature (594)..(594): n is a, c, g, or t
  misc_feature (611)..(611): n is a, c, g, or t
  misc_feature (641)..(641): n is a, c, g, or t
  misc_feature (663)..(663): n is a, c, g, or t
  misc_feature (670)..(670): n is a, c, g, or t
  misc_feature (718)..(718): n is a, c, g, or t
  misc_feature (722)..(722): n is a, c, g, or t
  misc_feature (725)..(725): n is a, c, g, or t
  misc_feature (743)..(743): n is a, c, g, or t
  misc_feature (762)..(762): n is a, c, g, or t
  misc_feature (867)..(867): n is a, c, g, or t
cntggtattggggtaagggggtattgcaggtaaaaagaggtgaagcagattctggctttcagtttcttagctcagaaattccagcaatccctgtagttctttgcatcccctcaccacctctggaatagagagcagggtcttataaatatgctgaacaatgtcatctagtttttctaactccttgtcagagcgccgangttctcctctaggatatttctatggctctggaacttgatcatgagttttccttctcatttttcatntnnaggaanatnantctnagtttgtccacctcctgagagagnnaaactttctcntggatccaattggaggccataggctggcngtnggngtccagctggcctgccagggnntnntggagnantttggtntatgtntcngnangccgnagtgngngggtanggtgggtcncctcctctctaaggcttaatgagctcgccactcatgaanaactgtnctaggatctnctcaattcatgctgctgtntcacttcctggngcaccttttcattcttgtngcgcagcccanggccaggnacagcatcactatgnctgcttcttttgcctnactggnactatcctgatgctgtncttcctgggcctgcagcctagcttgcagcncacaaatttttcgctgcagagncctggangggcttcttctttagactcttgtagcagggaacaaagactctgaagcncagnagncataatactcatttctgncaggctctcctccatgccntggggtctctgcgggctgaagggataccattgatgctactcgggtgaaagcactcttgtcacttccaagcaagggcacaggagtagattctggctctcatctgcnctgc

SEQ ID NO: 725133 - DNA, 379 bp, Homo sapiens
  misc_feature (39)..(39): n is a, c, g, or t
  misc_feature (196)..(196): n is a, c, g, or t
  misc_feature (206)..(206): n is a, c, g, or t
  misc_feature (217)..(217): n is a, c, g, or t
  misc_feature (247)..(247): n is a, c, g, or t
  misc_feature (274)..(274): n is a, c, g, or t
  misc_feature (303)..(303): n is a, c, g, or t
  misc_feature (327)..(327): n is a, c, g, or t
  misc_feature (338)..(338): n is a, c, g, or t
  misc_feature (358)..(358): n is a, c, g, or t
ggcaccaacctgcattcatgcccttgtatccgcacacgnccagtgtgtacaggcgcaccccgtggactggcccaggaggacgtgcatcatcactgcaatcagcatgaacaccaggcacccctgggacacctaacgcccagttcccgtgaccccaactgcaggccccccctactctgcagcctttcccatgctctgncccctgtctnatggacgagtngtgcggggtgctgggagcgaggggggccgnatgctcctgtccttgtgcttctccttntgcccctctggtctttcctgttggtgctncaggcattgtttacctgctcttgntccccggtgtnagcccacagccatatttgtnatggtttccccggggggccaa

SEQ ID NO: 725134 - DNA, 163 bp, Homo sapiens
tcgtatgtggtgtacgttagtacaatggtgtactctccgctctgaggaggtatacaaggaactcatttttaatttgcctttcttttttctcttccccgatgctacataaatggaatttgcacacattcctcacagcatcacctgacggtaaccacacagtacg

SEQ ID NO: 725135 - DNA, 535 bp, Homo sapiens
  misc_feature (2)..(2): n is a, c, g, or t
  misc_feature (197)..(197): n is a, c, g, or t
  misc_feature (263)..(263): n is a, c, g, or t
  misc_feature (265)..(266): n is a, c, g, or t
  misc_feature (272)..(272): n is a, c, g, or t
  misc_feature (275)..(275): n is a, c, g, or t
  misc_feature (277)..(277): n is a, c, g, or t
  misc_feature (281)..(281): n is a, c, g, or t
  misc_feature (305)..(306): n is a, c, g, or t
  misc_feature (317)..(317): n is a, c, g, or t
  misc_feature (346)..(346): n is a, c, g, or t
  misc_feature (349)..(349): n is a, c, g, or t
  misc_feature (352)..(352): n is a, c, g, or t
  misc_feature (373)..(374): n is a, c, g, or t
  misc_feature (376)..(377): n is a, c, g, or t
  misc_feature (383)..(383): n is a, c, g, or t
  misc_feature (385)..(385): n is a, c, g, or t
  misc_feature (392)..(392): n is a, c, g, or t
  misc_feature (398)..(398): n is a, c, g, or t
  misc_feature (401)..(401): n is a, c, g, or t
  misc_feature (403)..(403): n is a, c, g, or t
  misc_feature (405)..(405): n is a, c, g, or t
  misc_feature (410)..(410): n is a, c, g, or t
  misc_feature (415)..(415): n is a, c, g, or t
  misc_feature (417)..(417): n is a, c, g, or t
  misc_feature (423)..(423): n is a, c, g, or t
  misc_feature (434)..(434): n is a, c, g, or t
  misc_feature (436)..(437): n is a, c, g, or t
  misc_feature (453)..(453): n is a, c, g, or t
  misc_feature (491)..(491): n is a, c, g, or t
cntggtattggggtaagggggtattgcaggtaaaaagaggtgaagcagattctggctttcagtttcttagctcagaaattccagcaatccctgtagttctttgcatcccctcaccacctctggaatagagagcagggtcttataaatatgctgaacaatgtcatctagtttttctaactccttgtcagagcgccgangttctcctctaggatatttctatggctctggaacttgatcatgagttttccttctcatttttcatntnnaggaanatnantctnagtttgtccacctcctgagagagnnaaactttctcntggatccaattggaggccataggctggcngtnggngtccagctggcctgccagggnntnntggagnantttggtntatgtntcngnangccgnagtgngngggtanggtgggtaaantnntatatacggattttgngatagaaaatattgtatttatgttattgggtattatanttatgatgatgtttacattaatggcgataattttatttattgtc

SEQ ID NO: 725136 - DNA, 399 bp, Homo sapiens
  misc_feature (200)..(200): n is a, c, g, or t
aatgttatttaagattgttagattactaagtaattagaagtaagcagaaagggaatctattaaaagtttcgggtgaaggggtggtagaagaatagtgtgggtgattataagtttgaatggaatagatgttaaatatgttatgtggcccttatgctgaaaatgctgctcttagtgctgttgttgggctgtaggcaagttantctacctctctggaccactttcccatctacaaaactgtgcttggctctttgcacaaagtgcttactgtgtgatgtgctgacgcaatgaaatacaactggctgaacgtttaagtccaatcaaccaactgtactggcagctttaccaggtcaggaacactgctgccaaggcgaatgaagagtggaactcccgcgtcgacgc

SEQ ID NO: 725137 - DNA, 275 bp, Homo sapiens
ttcgagttcggtacccactctgatccagttagaaaataatggaatactcattatttacattacctgatatatacagacaagcaaaaaaaatgttttggtcggccgggcgcagtggctcacgcctgtaatcccagcactctgggaggtcgaggcgggcggatcacgaggtcagaagatcgagaccatcctgaccgtcggatccgcctgccttgaccgtccaaagtgctacaactacaggtgtgagccaccgtgcctggccaacagagactggatca

SEQ ID NO: 725138 - DNA, 364 bp, Homo sapiens
  misc_feature (40)..(40): n is a, c, g, or t
  misc_feature (101)..(101): n is a, c, g, or t
  misc_feature (123)..(123): n is a, c, g, or t
  misc_feature (234)..(234): n is a, c, g, or t
  misc_feature (247)..(247): n is a, c, g, or t
  misc_feature (251)..(251): n is a, c, g, or t
gttgatcagcagtgaatccagaggaggaagagagctacgngtcactcaggcacacggtttgactggattcctgactcagatcacggttggtacgggccatngcccagccctgtcagtcagtgnaggagggaacagtgggacccggaggctctggtcggatgtaccctcttgctttggcaccaagcctgttgtcaaagtgatggccccatcagtcagattggctaggtgggtggnggtctctctgacnaaangtccctctagatcacccctaaccaagtgggggacccagggtcacagtgtccaccctgcacccatgacagcacacgggacctctgccggccagctgtcctgcgcatgccttgcc

SEQ ID NO: 725139 - DNA, 239 bp, Homo sapiens
ggtgtctactctatcttaggggacatcaatttcatcacaactattatcattataaaacccccgtgcataacccatataccaaactgcccctcttcgtcgtgatccgtcctacatcacatgctgtcctactatctccttatctctccccagtcctagcttgctggcatcacctatacttactaaacagacgcgcaacgtggtacggcgggggtaccgcagctcgacattccgtacatcat

SEQ ID NO: 725140 - DNA, 81 bp, Homo sapiens
aacgaggacacggccatttattattgtgcgagatattgccgtgatgactgctatcccggctttgaatcctggggcccggga

SEQ ID NO: 725141 - DNA, 690 bp, Homo sapiens
  misc_feature (570)..(570): n is a, c, g, or t
cggacctagacaaccacagtaaagatactgtatttgtggtccaaggaagtttaaatatttgtggtcaaacttaaaattcaacgtaaaactctcatctgtgatggaaactttccagaaactgcatggagcgggtgtgcaagctgcataaactctcaaaggcctctcctctcaccaggctgagctggaaaagcctgttctccttccttcaaactgtgtagctaacaagcccttcgatcagagaaggaactccttgatgctccagccaccacccaagaaacccgctctaaggacctttcgggccaggcacagtagctcatgcctgtaatcccagcactttaagaggccaaggccggaggatcccttgaactcctgggttcaagtgatcctcccaccttgacctcccaaagtgctgggattgcagtgtgagccactgtgcccaacttacttcctttctgtctgtctctctgtctctctctctatctatctatctatctatttttttaagacagagtcttgctctgttgcccaggctggagtgcagtggtgcgatctcggctcactcaccggaanctccacctcctgtgttcagcgattctcctgtctcaggctcccgagtagctgggagtgaccaccatgcccggctaattttgtatttttagtaggtcgagtgcagggtacggactcgaatcg

SEQ ID NO: 725142 - DNA, 1076 bp, Homo sapiens
ggatacgggagttcctccttgctctcgcccctactctttctggtgttagatcgagctaccctctaaaagcagtttagagtggtaaaaaaaaaaaaaaacacaccaaaaggctcgcaagcccacaaaggggatgaaatttcttctgggacatcctccgggttctcccggttaactggatcgtctggcttccctagagtccttcgggaaagctttttattcctaagaggagaaactcagtcaccgggcgaaatcgtgctggattaacagggagctggggcatgggaattggggagacctggactggcctatgaatttggctaaacttaaaagcaagctgggttctcggggatataaataagcatgggactgggagggaaacaggctggccaaatggcaaggggactggggtgccaagggttcatacctttggtgggtagactggcagaaacccgagaagatatttacaggctcttgcaaaagaaggtgaagggcagaatttgggagatgtagatatttaagtaaataaggcggggggtagtctatacattcagattggttggctaccacaagatcctcagcatggaaaagactttggaaggttacggtactggcacattttcgtggactacaaagggcaattacttcctggaagtgacgcacgaatattaccatggggccataatgggtacacgtgtggcttccgggcagacttgcgacactgtcctcgtgtcccccctttcgtaatagggctaactggtcaaggccaaggttatgcctggcaggtggggaattcccgtcaaaccctgtgcacagactggacctcgggggtggcctttacagcaataacgtgggaggtccaaacccacacccgggtcctgggggccccaagtgtcggtaaaccgcaggggggttacaccagaacacccagaggtccaacggttggcgggccccacgtcgtggagaacaggacaagcagggtggacaaccacggcgcgagccaacgggagacacctgcagcgctgcaccaaaacataggtgagtatcaccaacgctagacggctactaaacacacctgg

SEQ ID NO: 725143 - DNA, 618 bp, Homo sapiens
  misc_feature (397)..(397): n is a, c, g, or t
  misc_feature (542)..(542): n is a, c, g, or t
  misc_feature (615)..(615): n is a, c, g, or t
  misc_feature (618)..(618): n is a, c, g, or t
acgcgggggtttaaaaaaatctttaaaaaaatggaggaattatgaacttaaaaagcaaattaagaagctttttaggtgctactgcacttgtgttgccagtagcattttttgcttcttgccaaacaagatttgatcaagtaaatgaccataaattagtgattgctcacacttttaatagtagagaaggaaggtttttagcattagatcaaattgttaagctttgaaatgaaagcgaaaaagttaaaaacaaagaagaaggattttatccaataacactaaatcgacaatttgcgcaaacttatgcagaacaaggtaatgctttagagttaaaattaaaagcaaaaaacgctaaccaattagttaatttaatttttggttatcctactctagctgctgntgcatcccaatatgatatgagtttaaaatattcagattttccaagtttgcaaaatgcaataaaaacaacttttccacctgaatttcttcaagaaagcaaagaaattgcaggattaaatccaaaggaatattgaataattcctagnttaaaatctttcaagaacattactagttaatggacctgttttgaattatgtagttcaacaagctacaacacanggn

SEQ ID NO: 725144 - DNA, 763 bp, Homo sapiens
ggtgcacttccattctgagctttcaatcgatcttcctcattttatgttgctaaactactcttttggcatggtatacagactatatatatttcaccacactcctcattatcttgtcatttgtattatccttacatgctctttgaattcgtcaatagtttatcttgatccatgtattacctaatcggattgcctctctttatcctgcactaactaattcttgtctatcatcgttcttgaaaatgccagcagctatttgagttctcaaataccatagcttctcaacagtccattgccagtgccattactttgtcccaggcactcagacttctactctcctatctttgaaggcaaagtaggtataggatagccccaactctacgaatgaattttggagaggggtatgaagataccatagtcaacctatgacatggacaatggttggacagcatatttgtgtacttcccttcatacatcatttgctgagcataaaggttttggtaaaccaaataagatacgggtcgctggagtgcaagaggcttatgcttgtaatcccggcactttggtagtgccaccgcgggggggatcacctgaagtcaggagttcgagaaccggctggcgaacatggtgaaaaccgtgtctctcctaaatgcgcaaattggccgcctcatgcccatgctatagtcccgctactttagagttgagaccacactcatttggcctgacgtacagtgcctggcccaatcagtgcaatgaacccgcttgc

SEQ ID NO: 725145 - DNA, 215 bp, Homo sapiens
cagctcgcttatgtgctccctgtgttccatgtgtgccatggctgtgagccacagccaccccactatgccgcaggcgccctacccatcttcagtgctgcctatgggacgcagggccctatctgtccctcggtcgccgtgtggccagagtgggtcccgtcgtccccaacattcgtgctcgctcagacattttggcaggttgtctggggcctcaccaa

SEQ ID NO: 725146 - DNA, 253 bp, Homo sapiens
ctccagcgtattatacaatatagagtaaagttttgtttttgttattttgagacagggttgcccaggctggagtgcagtggcatggccacagctcagtgcagccttaacctccagggcccaagcaatcctcctgcctcagccactccctaacccagtagctgggactacaggcatgcaccaccacccccagccaattttttgtgtgtgttttttggagagacagggtttcgccatgttgcccaggctggtctgg

SEQ ID NO: 725147 - DNA, 1520 bp, Homo sapiens
aacaacactctatatttgaaactgatgaacgctaccgacatttagcgattctctgttgatgacctctggactgctgtaaacgtgattcgtcatagtctctggggatacccatgctagtctgtagggagctatcttcactaatgcaacaccagacagccactattatgaagaacattacagtggacacttagcagacaatatccacttcacttctgcttgatacgtagtgttgctaatgctacactagtatatgggcttgaatcatagtagaacaccatggtcagcagcataacacagcttacagtaacaagtaatacgttactttcatacagctacttcactcttcaaagcaatctctacctgacagcacgctttctgccagacacacatatgagagcacaagcatgaaattactgaggcaagatctcttcacacacaactctgccaatactggctctcacctctctatcttcactaatcgacctctgagactagcgacgcctgtggaaccaacaagtacccaacaaatatgggtactaacgagcaaatagataggactacaattctacgccctctggctaaagcacaagtgcgacttactgcaggtccgttggccctaactgtggtcttactattaacatcgccatccataatatacgtctgggaaacaacacacgcggctcccttcaacagggcttactatattatatacacgtgtcagattgtacatgtccgctgtaccacgccagataagacaccctgaactgtagattccaaggcaacacgaaaattctcctggggggacatttaacctcataatgaagagacaatatacggggggcaaccggcggatcccgtgcactttcccttaccgcaatcgagtaagttcccccccgatcccggacaagtggacagagggccacccccgaagtaggctccatttgttcacccggccccggacataaccgccccctaatggcgcgattgtttccactgagggtgcttaacgcaaatataccgtagtggagagcttcccccctagttatcattagaagcgtttggaaaggactccgggtgaaggctccgaagtttgaaagcgtacctataagggagacatacctctggtggcgctccatgtctacccggcactattctctgcattcgacaaagcgaggatatcagcgttggaaccattgtcgggagcaaccatagaaagcctatgtgcccgttattgcccgttttgggatggcaaacgttcccgcgtgtctcggattgacacacgcctgttaaactccctctgttacaccggacgtacacctatgctatgagtcaataggattgacatactccatataactgaatgtaggggaaccgcacaaagttctctacacctgtttacgccaggcgacgggaaacttgtttatacgaaggcacgagtatccgaattaaggacgggattacactaacagcagtttctagagcaacaacatacatcatactatggtctgggtacatacaga

SEQ ID NO: 725148 - DNA, 182 bp, Homo sapiens
ctcgcccagtacaatggatatcagaaagcgctgtgatacctcagacagaatggcatatcagcgcacgtaggtctacaagacgctactatcccctatcatagaagagcttatcaccttacatagatcacgccctcataatcattttacctatatctagctatacctagatccatgatatgcca

SEQ ID NO: 725149 - DNA, 142 bp, Homo sapiens
  misc_feature (1)..(1): n is a, c, g, or t
ncaggaaaaacaatgcctgtctttgtctgactcaaaaacatgctggtaatttgcatatgagatatattttattaagatgttgttatatttgaaagctatgtcatcccggtattgtctaagaaatacagttcacgatttatgg

SEQ ID NO: 725150 - DNA, 578 bp, Homo sapiens
  misc_feature (38)..(38): n is a, c, g, or t
  misc_feature (67)..(68): n is a, c, g, or t
  misc_feature (74)..(74): n is a, c, g, or t
  misc_feature (85)..(85): n is a, c, g, or t
  misc_feature (97)..(97): n is a, c, g, or t
  misc_feature (123)..(123): n is a, c, g, or t
  misc_feature (174)..(174): n is a, c, g, or t
  misc_feature (275)..(275): n is a, c, g, or t
  misc_feature (345)..(345): n is a, c, g, or t
  misc_feature (357)..(357): n is a, c, g, or t
  misc_feature (367)..(367): n is a, c, g, or t
  misc_feature (393)..(393): n is a, c, g, or t
  misc_feature (412)..(412): n is a, c, g, or t
  misc_feature (474)..(474): n is a, c, g, or t
  misc_feature (476)..(476): n is a, c, g, or t
  misc_feature (489)..(489): n is a, c, g, or t
  misc_feature (492)..(492): n is a, c, g, or t
  misc_feature (504)..(504): n is a, c, g, or t
  misc_feature (560)..(560): n is a, c, g, or t
ataaagtaaagtgtatatggggaggaaagaagaaggtnctggggggaggatgatgggaaatggtgcnntatgtnttgtgtgaaanaactaggagtgnagtgtggtggtgactttggaattgcnatggtaaataaaaaatgtagggggaaataaaatatataggtagagtattgntaaaaataaaaataagagcacgttagataaagattctttaaaaggaatataaaaatgtatttgtaaacaaacagagaaagaggggagaaaaaaaaatatanaaacatctatcaaggggatcaaggccgttacgaaacacacaggtactctcccactcactcagctggggantgctagaactangtgaacacancatacttcaatgctgcagagcatgcncgggagaaacaatgaggcnccctccttgggacagttgagaaaggcaggaggaagggcaaaggaagtaaggctgggcggganancttgagcccaganacncaggtgaaagancaaaatatatctgttgcttcctttcttaaaaatgaagtggagaaaatactgaaganttgtggacaactaacagt

SEQ ID NO: 725151 - DNA, 900 bp, Homo sapiens
  misc_feature (3)..(3): n is a, c, g, or t
  misc_feature (62)..(64): n is a, c, g, or t
  misc_feature (93)..(94): n is a, c, g, or t
  misc_feature (100)..(100): n is a, c, g, or t
  misc_feature (103)..(103): n is a, c, g, or t
  misc_feature (119)..(120): n is a, c, g, or t
  misc_feature (195)..(195): n is a, c, g, or t
  misc_feature (206)..(207): n is a, c, g, or t
  misc_feature (227)..(227): n is a, c, g, or t
  misc_feature (252)..(252): n is a, c, g, or t
  misc_feature (352)..(352): n is a, c, g, or t
  misc_feature (371)..(371): n is a, c, g, or t
  misc_feature (412)..(412): n is a, c, g, or t
  misc_feature (427)..(427): n is a, c, g, or t
  misc_feature (454)..(455): n is a, c, g, or t
  misc_feature (469)..(469): n is a, c, g, or t
  misc_feature (541)..(541): n is a, c, g, or t
  misc_feature (560)..(560): n is a, c, g, or t
  misc_feature (606)..(607): n is a, c, g, or t
  misc_feature (609)..(609): n is a, c, g, or t
  misc_feature (612)..(612): n is a, c, g, or t
  misc_feature (639)..(639): n is a, c, g, or t
  misc_feature (643)..(643): n is a, c, g, or t
  misc_feature (684)..(684): n is a, c, g, or t
  misc_feature (711)..(711): n is a, c, g, or t
  misc_feature (740)..(740): n is a, c, g, or t
  misc_feature (763)..(763): n is a, c, g, or t
  misc_feature (765)..(765): n is a, c, g, or t
  misc_feature (767)..(767): n is a, c, g, or t
  misc_feature (833)..(833): n is a, c, g, or t
  misc_feature (896)..(896): n is a, c, g, or t
aanttcaaaaacatatatattcagtaattttcttaagtatattttattgtaagcataacctnnnaatagtttgctctatttaattcctcaagnnaaattnggngggggttaaaaaagannaatttttctgatcaagttcataaaaatgaaaaatcaagaatgttggttggattttataaaaggctttaatttctntacttgaaaannttaataattttaagtatttnagtgcaaagcagcattttctatgtnatcaactttttctattgtgaattaaaaatatatccaactcttattttgcaacttatttatgaatatcgaacttcaataaaaatattcattattgtgcttnggtcttggcattggggggnggggtagttgtggtagaagataggatttggtggtggttacncaggaggtaattttnaagagctctgttgaggattctaatatnncctttatttttaanatacctcactgtagaccagaagcctaacagcccctttaccaaaattttcaagtaatttgtaaaatgaaagtnatcacttttctgtatgcangccaattctggcactttctaaattagatcatatgtacaaatctttnngnttntttttttactagtctttcacttctggntgancatttttctttctgctttattgcaccactttactgctcatnaaaatcactaattcttcctgattaatntgaaatcaaatggcaatgcaaaacatatncatccaatgtttctcctactttngnanagctttggccaaagcttttattattcaatatggtggtgggaaactatcataatgcatgtggtcatntgcctaagtgagctactttgttgcgggacagaagcggataataggagcataggtaatggagcnaaca

SEQ ID NO: 725152 - DNA, 327 bp, Homo sapiens
actttggcgcgagcccagctgataccctgtgagagggctgcttagcagggcatgtgagagcaccacaggttgcaaagtatgtcttgtggattggcaaagtgcggagggtatccacccatgggggtagtttaacatggggcgtcagcactctcaccccaccttgaccttcatcatgttggttcagttccatcaaggtgttacccccacagttaggtcctgtgcgtcctgacaacgtcatctgcagtctgggaacagtatccctggtacatcacaggaacctgacagatggttggcacaccgtgaacgtttgtgaatgacaaaaaaaaa

SEQ ID NO: 725153 - DNA, 1021 bp, Homo sapiens
ggttgagacgctaagcagacatcaggactaccagctgcagagaggagctacccgactgtgggcttcggtctctgctgagatctgaacactcactgggacgccctgccctatggaaaccagctggttcactctgggtctcctcgtgagctgtggctgtcgctcacgggtaaaggtctatcttcgtgctgtactcgaccaccgtccatttggtacctgccattacctaccttcatcctggtacacgaggacaagagactggtggactgtgccgggtactggatggagcgtaaagactaggcatgctaggacagcaaaacaggagttggaaaacactgcgcgccgttgactcgccgaacgattgatgagatgaccaagaggggagcgcgataggaaagggagagcaagcatctgcgatcgcctgtgcggcgagaaccccaggacgtaaagagaagatccggagcacgtcgcaaggacctgtggaacgacccattctcgtgggggcttctgttgggctttccctgggctgtctccagagacgtactggagccatgctcgcgtctattcctccgggtaagtccaagtgtcgttggaaagtcgtgctttgctgtcaggacgtcattggccttagtgatccaccacaagggtctggaatgctagcacgagtgaccagatgaagtcagcagcctaatagctgaaaagcgctcttgccgtttcatcaagggctatcaacgcctgaagtttctcggttcttgctccctcccaaagcccgttcctggtgattagtgaatgcttgcgcggaaaatttccacccaacgatgtgagttgcacggccacagtttcacgcttggaatttgctcccaggaccccaattggcacgaaatcgacgctcgtgtgggaccatttcgccatccactgagattaagaggaaaaaccggctttggcccccaaacaggttggtttaggaaccttacaattacacgttgaaccgagggggtttggggaacaagactggaaacccccc

SEQ ID NO: 725154 - DNA, 383 bp, Homo sapiens
ctcttttacaagaagaaacattatgatacatagatgctgaagtttattgatacacccatccatctgaacatattaaaattttactgtatgtataaaatggaacatcatctaggccactgctgaagactaagttcccaggaagaacatacctgtaaaacatatcctctaagtcattgagggtctttgtgattctctatgcttacagctatgtcctgttagatcttacaagacttatttacagcaagaatcacaaacagcaagggataaaagtacctgtcgagtcaaagcgcaccaagagctgaggtcctctgccatgcagcttcttccactctcgagcccccagcacctgcactgcctggcagtgcatctgagggggacaaagg

SEQ ID NO: 725155 - DNA, 768 bp, Homo sapiens
tggaagatggtggattttttcctgggggataatctatattatatggactccctattacttattataacccggggttggtatgggaaatgtgtctactatgcgggggaaaaggtctctcgtaactcgcgtcggggggaaactcagggctcgtgccgctccgtgccctcttcgtgtgtggccggtgggataccacggtgggccctcgtggcgggtgagttcctccaatgtttcgtgccgtagggcgccgtgtgtgcgtattacctttctcgtggtgagcggagatatagctatagaacatccttgtgcaaaaggcgaatcacgttcacaaataaatgtggggaacactggcgtgctcccagaaaggattgccctccgtggcgtcatcagagtgactcctctccctcgcggccatcgccggggagcgtggcgagcgagccgaagcgggttgacccgtcggccccctctgtggggggcagcgtgccagacctccacccagctggcccaccgacggggccccagccccagggcctatcctccccgagaggcacgacaaagcttctgggaaaaacctcaaatctttaattccttctccttcgccgggtgcagccagagtgtgagacacctgagcttcaaaacacaacctgggtaaaaacagcccagggccgaaagccgtagagtaagcgcaggggggggagcccctctccaaacccctcaaagtgctggggatggcccccaaagggggcccaaaaccctggaaaactaaggccg

SEQ ID NO: 725156 - DNA, 211 bp, Homo sapiens
gcaagcagttaatacagactcagctaattttgtatttttaatagaggtggtgtttctccatgttggtcaggctggactcgaactcccgacctcaggtgatctgcctgccctcggcctcccataactgttgggattacaggtgtgagccaccatgcctggcctaataatggctttttaactgaagctagtttgagtctgtattaactgcttg

SEQ ID NO: 725157 - DNA, 927 bp, Homo sapiens
tttgcgtcgccggagccgagccagatcgctcagacagcatggggaaggtgaaggtcggagtcaaacggattggtcgtatgggcgcctggtcagcagggctgctttgaactctgggtaaagtggatatggttgccattaatgaacccttcattgaactcaactacatggtttacatgtttccacatatgattaccatccgcatggcagaattgctcgatggctaccgtcatacgggctgagaacgggaagcttgttcagtcaatggaaatcccgatcaccatctatactcagtgagcgagatccctcccaaaatacagagtggggctgatgctaggacgctgagtacgtcgtggcagtccactggcgttttctaggcatccatggcagaaacggctgggtgactcgatttgtcatgtgggggagcctacatacagggtctatgcattcgtctgacacctccgtactgcctgatgccccccatgtatcgctcgatggagttgtgaagcatgcagtaagtatgacaagcatgctcgtcaagatcatcagacgaatgcctcctgtcactcacacaaatgcttatataccctgtgaccaaggtcattcatgaccaacttatggtatcgttggcaaagcgagctcattgaccacagtactcatgaccatgacttgaccatctagtaaggacttgttgtgatggctcgctccaggggaaaactgtgggcgtgatggtccgtggagggttcttccaaaaacatctatccctgactctaattagggtctgtcaaaggtgtggggccatatgtcaattccctgatctgaatcgggaagcctcacatggcatgggccctccgtgttcccaaaggcaacgtgtcaactggggggacttggactgcggaaaaaaatcttgcacacttttttgcactccga

SEQ ID NO: 725158 - DNA, 188 bp, Homo sapiens
ctgatagagatagttcacttgtttctgatacagattaacattaaagattggttggagaggggcccttcataatggtcttgaactttacattgaaggattatatttgcctagaacctcatgccaaaacactcaggtgaatatggaatgatttgcaaatgcagatcaccacatctgagatacttttcttt

SEQ ID NO: 725159 - DNA, 1492 bp, Homo sapiens
gactagttctactactcaaaggtcttgtccttttgcaaactacataagttaatccagctcatataccaaacaatgcatgtatgaggaatagtctgacaatagggagaaaacacctatcatgctaagaccagcctttgctaagatatattccagcccagcatactcttcatctattcaatactggagtggtctgtattctgagcgaagagacctgctcggttagtcattccatgcatagcgtttggcaggttacccaacccaacacaccacattcttctatttatgccaggcctggtggcgtaggataattaaatgactggccatagtcagaaaatgatcaagtgaagagctaaacgtgggttgggtaaaagtctcagactagtactattcgtcaaacacatccatgctaggctaaatatattatttggatgaggcaatcatggctaagaacacttacgaacatgataatcattagcccaggctaggattgcggtttacttcaaagtaaatataaaagtacgatcctatatccggacacatacagataagggggacagaggtaacccaagatataacgctttaacacggacagaagatataatgacctgggctccagaggcctatatgtatccaaagggccagttgccatcttagaccccaagggaatgcagaaaaaccaaaacaaaaaaaaaacactgcacgagagacagagcccagcgaaacattaacccaaaaagggaaaggggacccaaaaccacaaaagtggcaaattgtcaccaaagccaaaaaagaacacataggggaagtgaccacaaaaagcacaacaaaagggaaacaactaaccacggccacaagggcacaacaaccaaacaaaaaaataacacgaaaaagctaaaaaaacccggagccaagaaccgagaaaagcaaaacggaacaacaacgggaaacggagaaaatagagagacacaactaaaacaacacagggacgacaaaaacaaaagcacactcgggaacaaaaaaaagaacaaaaacaaaagtaatcacacgcgagcgcaggcaagaaccaaaaaaccacgacaaccgaaccacacaaacatagaacgcactaacaaaacaagcaacacgagcgaaaagaaataacacaggcaaacaagaaaatgacgccacacagcaccaacagaaaattaatgacacaacaaaaaatgaaacagccacaataaccacaacgacacaacacaccaaaaaagaaaagaaaacacgagaaaaagcaaacaacaaaacgccaagaaaaaacaaacaaaaaaaaagcacaatcaaacaaaaaagaaaggacacagaaacaaaaaaaaaacaaaagagacagagaaccaacacacacacaagacagagaacgaacacacacacgcatagaaaaagacgacagcagacaggcaacaacaacgccgacaacgcaacaacacacagacaagaaaggaacgactctggagccacg

SEQ ID NO: 725160 - DNA, 807 bp, Homo sapiens
gcctctaccttagcgagcgctggagttggaatacggcgggacagtggctgtcgcacgccaaagctttccctatggcttcggtgaccaggccggtgttggagagctgccctcgtggtaggagggacacgtgggagtaagttccagcgtgcagattcagacgtcttgagaggtggacatcatctcctggggcctgcacgatcatcggccctagaggtcataacagaggtaggcaggggagagcctcggagcggtggtgcttgagggttcgcctcgagtgggatagggataggctccaaaagcagcacatactattggagcgagctatgggagggtggccagaacgaatcgtctggaggatccttcaaggtggatggggaacggagtatcaccttggcgattaaacaaggagccgcaacatgtcttgcatgggagggaagtcagaggggtcgtggtacaggtgctctagcgaccccgtccgggtgactgtcaacagtgggtgtcccgttctcgcagcagtcaggtccaagatggtgcaagaaggtaccgcgagaagacgtggaaggagtctggggtgaacgatactggcacctggtatgggccggtgcagcaggcgtccactttatccaagttgaaacagcagccgaacatatgcccagagcaggacctacaattgaagttcacaaagcggacgcacacgcgaatcccgttagctgtcaccgccgggcacaggtcccagggctgggctcccataatagtagttggcccgtggacactcaccatacaaccgcggactggtccatctggcct

SEQ ID NO: 725161 - DNA, 213 bp, Homo sapiens
  misc_feature (112)..(112): n is a, c, g, or t
tcctctcgtcgatccgacctggcggttcatgacgctcgacaccgacggcaagattcgcatggattgctcgtcgcccgacgcgatggcctcgcttatcgggattcgggatcgntacgacatcgcgaccggaaacgacgcagactccgaccgccacggcatcgtcacgcccgacggcggtttgatgaacccgaatcactatctcgcggttgccat

SEQ ID NO: 725162 - DNA, 683 bp, Homo sapiens
  misc_feature (1)..(1): n is a, c, g, or t
  misc_feature (236)..(236): n is a, c, g, or t
nccgagtcccaaacttccattgtgatagatagccaagccttggctaatgtttgcttccacttggcaaaccctgtttttggggggcacgtgaaattatacttctcatccctaattctcttccgttgaagttttttcaagactatccacctaacaagaatgtgttgttaagcactttggaccattctggcacttgtcacatggaataatagatgtctgttaataagtttgtcctttcntgaagtgtgatcccgtccagggagtgtcaagagcagtgctttgtcatttacaaatcttgtgtccttgggaaagttactaccctctccatactgtttctttctctgtaaaatggagataacagtagtgcctatcatacagtaccaaagtgatgaacaagtgagatatttaataagtctttagaacagtctggcacagagtaaacacctgataaatgttggccattatcattataaaggtactatgcctggcagatattaagcatttagcaaatgtcaggttaaaattgtatgtatcatctaccacacagtgagatgtctgtgaatattgagttcacaaacatttttttcagtttaaaaaatatttcaaaaacattttgaacaaacactcaataaaaccacatttggatggggtgggcctaaataagaaagagaggatagagctttagt

SEQ ID NO: 725163 - DNA, 1173 bp, Homo sapiens
ggtaccctgcatccgctgagatgtgatgcctaagaagaatcggattgcacatttatgaactccgtttttagatgcgagaggagtcatggttggccaagaaggatgtccatgatgcctaagcaccgcggtagctggtctgactaagaatgtgtcctcagatccgttcatgtcttgaaggtccatgcaagtctctcatgtcccgaggctatcgtgaaggaacagtttgcctggagacatttctactggtaccttaccaatgagggatatccagatatctccgatgattaccttctatctgccacccgtgtagcattgtgcctggcaaccctacgaccgtcagccggtccgagaaactgggccaggtctcgtgcctcaaaggtctggaagggtgagctgacctcgacgcagtactacacaagcatggggaatgcttgtacgagaggatacctaaccagaccggagttgctgttgcctatctggttgtcctggactaagtagaagcccgatgtcttcggggctgggttcgtgcaaaccccggaaagtacacgatgtttgttaagaaagagccgcgactataggtccagttcgagacggttgggtccaaggcctgacgccttcaaggtaaacaaagttggcgcaaggaagcgcctctcgtgtgcaggcgaggttcgaatacttcaatagctttaaacatgttcgagaaatataagcgtttaaagcgacacgttccaatttggacgacaaaacaaaggttctccagtgggcccaatttcgaattcttggcccaatgccctcaatgcacaatgcaaccataggtgaggccacttggggccccccataccccgcggagggacaaaacttcggtttgggccatgattgacattacggcgcctaaggaccaggtgcgagacattccattcccaagtaaacacaaatttcgaattccccacttgatacctatcattaacactcgggtcgcggcgttggacccaccataagtgtatcattagagactgcggcgtagaccaacaatggtatacaaaatcacccgaattgcaaaaggctttgagcaaccactggtgggaaaaaagcggattttccatcgttgtgcgcccaattggatgcgcccatatcacccgggttgtctacacccgctcgcttgtggcgcgagtc

SEQ ID NO: 725164 - DNA, 840 bp, Homo sapiens
  misc_feature (179)..(179): n is a, c, g, or t
  misc_feature (188)..(188): n is a, c, g, or t
  misc_feature (247)..(247): n is a, c, g, or t
  misc_feature (256)..(256): n is a, c, g, or t
  misc_feature (313)..(313): n is a, c, g, or t
  misc_feature (339)..(339): n is a, c, g, or t
  misc_feature (370)..(370): n is a, c, g, or t
  misc_feature (413)..(413): n is a, c, g, or t
  misc_feature (421)..(421): n is a, c, g, or t
  misc_feature (441)..(441): n is a, c, g, or t
  misc_feature (443)..(443): n is a, c, g, or t
catttaccaagattttattttcctacatgaaaatttaattgagtaataattattcacatgtgcattttctttttagctgttaaatgtactatgccatcatccaccatttagtaaaatgtagctggcccaggacatgtaaaaaaaaaaaaaacaacaacaataaatagggcatgtgaaangttaagttncagcaatagatatttattggtattccaggtagtactttttggtttatatcacttataangggtacagnggtactcttggtcacagctcagttgggtaaccgcattccattgaaaagttgggcctngtaaaatacaactctcatttaatatncatgctttggtgcctttaagaaaatattttngtcatttttggtggttacagaactataaggtgatccaggggtnataggctngtcataaaagggtcatttcngngtgtacttccttttaatatagctatagtatatttaccaataatactatctttaataggggtggctatttacctattctttactcagacatggatgtagactgtcagattatcctgagtatgtaacagggccttttcgatggaatcacacttttggtgtcaccttgtgccatatacacacaaaatctgtgtggaaggcagtttaaatttcgtgaagaatatcctcgtcaagaatttaagaaaaccaattggtgttcaaatcccatctttccagtggttaagcattttctagtaagcagggagggtttgtcgtggaccataacaggggaatgagggcttattggtaaggcaaaatgagatggcgaataattggaccatattaaaggtgcgggaattaaa

SEQ ID NO: 725165 - DNA, 1248 bp, Homo sapiens
  misc_feature (189)..(189): n is a, c, g, or t
ggcgagaacgatccccggaccgaccaatagcccggcgtcgccggtgcatcccggcgtccagtcgatcctacatcccgctgccgatcgccgccgaccaccaatgtcccaagagaaaggctgtaaggggatgctaagggagatagagagcgaaaggtgaaggacgaaccacagagaatgatccgggtaggnttgtctgtcataaacccatgtctccgtccaaatgccagacgcccaacgcctaaaaaggccgcctgcacatgaagggagaggaatggtacccaatagggaacacacagggaaacagctgatgctggcatagggaggggaagtaactcgcatgcagaaaagtgggatgatggcatatacagaccaggcatagaaagctgaaggtgctggagatgccaagtgaagtgtggtgcgatttctgataagctcgtgtagcttgctggtgagtggtacagtttgaagatagctagttgtatttgatcaaggtttgtataatgaatgcagaaattgggtctttacttgttttgtttctctgtaaaagctcatgttgtaatgcacgatcgagaacatgttcattgggggataaggagggggaaggggcctatgtccctaacttgacggtctccaaggccgggcattgaatggggagaaaatcagctttgccccggcctccaagtgacgagagactttcctctggagctccccagacgagggagcggatgcccactgactttgatacgcagtgggcaccccttggggaatagagccctgtgggttattcgccaagaacacatgtgggggtttgaaggttacccccactgcccttttcacactgcttccggaactgaaatttaacctccgttaagacccaagaacctctgcgttgaaaacctgaacgctaaactggggtcacacagtcgtcacggacatcgggaaaccccgaggagacccctagtagtgcccgtccaaaaagagtgcgccaaaaacagggggagacctagcaagaaagtgaggaatgaaataaccggtgaaggtggggggaggatgaggagggtattacaaacactaggaaggatagacccacaaaaatgcgtggaacgagaaaaggagctagtagagtatggtaacagaagaagaagaggagtataagtgatcaccagagttgtagtctattgacgtgaccaggcccacttttttctgtcaggatgtgtgttctactatcttcttttttttcatcgcgcg

SEQ ID NO: 725166 - DNA, 418 bp, Homo sapiens
actctaggggctagtacgggtagtaaaaaaaaaaaaaagatacgtaacacataatctttggtgtcgggcttcttcacggagcaggttttggcggtcatccaggttataacatttatcagcacttcatccctttccatagttgaataatatgatggaataaaaatatggctttatatgtataaataagaatgcaaatgtggccaccggtttaagagtttctggacctcacatgattactttagggttatgagtccaggtttaatcggtggcctactagatgtggtgtcagggcttaaagatcccatatccataagacaatttttttcacttctatggtagacgggtaaatccccggcgggagtgaatcttttatcattggcttatgatctagaagcaaaagcaaacagttggcccctgg

SEQ ID NO: 725167 - DNA, 243 bp, Homo sapiens
acaccaagcagtatatatcacacacagctgaagcaacatctctgcagtggtgtccatgtgtgtgtctatgtgcatgtatgtgtaggaggataggtgtaattagggaagggctgcccgaacaacatggataagtccatgcaagacgtctggctgtggtgggtaccacagaaacatacacagtcttcatatacaaagtcttcaggggtatgtcttctagcactttccggcgtcggggtctccatg

SEQ ID NO: 725168 - DNA, 173 bp, Homo sapiens
ggagacacgtggatctcgatggtgtattgattgtccaggccgatttgggtgcgtcgtaggaatacgccggcatgcgccgcacgcggcgctggcccgggaagtaatagaacgtggtggcttgctcgccggccttggtggtgaccaccccggcttgtccggcaagcgcggcgggg

SEQ ID NO: 725169 - DNA, 138 bp, Homo sapiens
ggctcttgaggatccccgtggagtctcatgacatcggtggatatacagaaactgaggaagcagaaaatttggaagatttgctcaaagcagcagagaagcatgcatgtccagcatttcaactgattcatcagttctccg

SEQ ID NO: 725170 - DNA, 974 bp, Homo sapiens
gtgaccgcgcctgtgtgctgcacttcgggccattctggagttcccggctggcctgggcctttgttggtccccgcattcagactagtccagtccaggccttgcttggccccgtgcaatgcgggacttagcacctgggcccagtggcttcgtgaggctgttactgagtctctctagcagtgctggccaaccggcgctgcgctcgattctcgctgggcttggctgccttgccacggggcagggctcgggactgcagcccgcaatggcctgagcctccttacccaatccatgggctcctgtgcggcctgagcctccccgacgagcaccaccccctgctccacggcgcccagtcccatcgaccacgcaagggctgaggaatgcgagcgcccggcacaggacctggcaggcagctccacctgcagccccagtgcaggatccactaggtgaagccagctgggctcctgagtctggtgggtacgtggagagtctttagtatctagctcaggggatttgtaaatacaccaatcagcaacccctgtgtttagctcaaggtttgtgagtgcaccagtcaacactctgtatctagctgctctggtgagggcgtggagagtctttatgtctagctcaaggattgtaaatacaccaatcagcactctgtgtctagctcaaggattgtaaatacaccaatcggcactctgtatctagctcaaggtttgtaaacacaccaatcagcaccctgtgtttagctcaaggtttgtgagtgcaccagtcgacactctgtatctagctgtcctgatggggacgtggagaacctttgtatctagctcagggatttgtaaacgcaccaatcagcgccctgacgaaacaggccactcggctctaccaatcagcaggatgtaggtaggggccagataagagaataaaagcgggctgcccgagccagcattggcaataacgctcgggtccccatgtcacac

SEQ ID NO: 725171 - DNA, 978 bp, Homo sapiens
ctgaaggcagctaccttaatagatgccgggatccgcagcgaagggctcggagttgtcagagaggatcgagagcttcgtggtagaccctgaagcggggtggtgggccgcgcagctccgaggaaatggctcgggagaccctagggttgctgcgcctagatcatcacggaccaccgctggagcaacgcgggggagctgatggagctgatccgcagagagggcaggagagatgacggtccgctcagccctccgaagaaccgaccgtggagcaacatggatgctgagtagtagatgctccaagcattatcccgggaggcagtatggcagcacctcctatggacagcagctgcacgagagctgatcaagcgaggagttcccttgctacaaaacttgtttgacaatcccggaggccttaaacgaggatttctagcttccaattatgccccaacttcccagtcctaaccatcattgaggcagattaatgagctgcttagtgggaagctggcaaagggacaatggagaacattgcagcccagggctctggagcacattcacgtccaatgaggtgatcatgaccattggcttctcccgaacagtagaggccttcctcaaagaggctgccgaataaggaggaaattccatgtcattgtagcagagtgtgctcctttctgccaggtcatgaaatggctgtgaatttgtccaaagcagcgtattgagacaactgttcatgactgatgctgccatttttgccgttatgtcaagagtcaacagggtgatcattggaccgagacatctgggcaatggggccctgaaaactgtgacaggactcacctctggctggagcaaaacacattcaccccattcttggctgtgcgccttgtcaacttttcccagtccctgaaagatcactaaaattgggcgaaaaaccgctcaaaggcctgaagcaggtccgtgagaacccccactccttccaggaaccac

SEQ ID NO: 725172 - DNA, 1548 bp, Homo sapiens
gtggccgcaacgggcggggcggggccgggcaagtttgttccccgagttcggagcctaggagccccccgcggctgcggcgcaggtgccctcggcctgagtcgggatggagctgcctgctgtgaacctgaaggtgattctcctaggtcactggctgctgacaacctggggctgcattgtattctcaggctcctatgcctgggccaacttcaccatcctggccttgggcgtgtgggctgtggctcagcgggactccatcgacgccataagcatgtttctgggtggcttgctggccaccatcttcctggacatcgtgcacatcagcatcttctacccgcgggtcagcctcacggacacgggccgctttggcgtgggcatggccatcctcagcttgctgctcaagccgctctcctgctgcttcgtctaccacatgtaccgggagcgcgggggtttccttgggtcttctcaggaccgtagtgcctaccagacgattgactcagcagaggcgcccgcagatccctttgcagtcccagagggcaggagtcaagatgcccgagggtactgaagccagccacgctgcgcccggccctgccccgggccttcctcgtgcctgggaggtcgttctagggatgctcctgacctccgtctcttggacctaagatggaatgtgtccccagctcagggattgcctgaaccaagaggccaggagcccccatgggccgcccagtaccatgcacactcctgtcccgaactccctgaggcctcccctcccttcagggcacccactggttcccaggctggaaccagggtctctctttacctcctaccccatggtggcaccacagaggccctcagccgagtcctgcctgagtgttgcaagctcaggcctttaaggactgctgatgccccctcaggcctcccccaagtttgctgggctttggtggaagccctgagagcttcaggtcctgctcagcccgaggagcagtctggcatgggagtgaggccccgtccttctcactgcctggtcacatggtgcctagggatgcagggctggaggccagaggtgtcagcaacactgtgacccaccacaacctccagcctcccttttcagagcacagcattaaagtttggggaattctgtaaaaaaaaaaaacaaaaaaaaaaacaaaacaaaaaaagggggggggcgaaacaaaaaaaccccaggaggggcgacaaaaacacggagacacacatcatggacaaagggggcccatagagagggcaggagacaacgcaggagaggcgcaaaaacaacacgcggcgagcaaacgcgaacgggcactgggaggaccaccgcggcggcacacggccgaccaccccagacatacccacagggcaacacaccaggtaccagggcacaccccgacacccccagagaagaaccggatttaatagcgacccagagacacacagcccaagcaccagaggggcccacacaaggcgagcgcgagagcgacagcgcagcgacgaccgcacgccgccgcgccggcacacgccacgcccgaaggc

SEQ ID NO: 725173 - DNA, 1569 bp, Homo sapiens
gtggccgcaacgggcggggcggggccgggcaagtttgttccccgagttcggagcctaggagccccccgcggctgcggcgcaggtgccctcggcctgagtcgggatggagctgcctgctgtgaacctgaaggtgattctcctaggtcactggctgctgacaacctggggctgcattgtattctcaggctcctatgcctgggccaacttcaccatcctggccttgggcgtgtgggctgtggctcagcgggactccatcgacgccataagcatgtttctgggtggcttgctggccaccatcttcctggacatcgtgcacatcagcatcttctacccgcgggtcagcctcacggacacgggccgctttggcgtgggcatggccatcctcagcttgctgctcaagccgctctcctgctgcttcgtctaccacatgtaccgggagcgcgggggtgagctcctggtccacactggtttccttgggtcttctcaggaccgtagtgcctaccagacgattgactcagcagaggcgcccgcagatccctttgcagtcccagagggcaggagtcaagatgcccgagggtactgaagccagccacgctgcgcccggccctgccccgggccttcctcgtgcctgggaggtcgttctagggatgctcctgacctccgtctcttggacctaagatggaatgtgtccccagctcagggattgcctgaaccaagaggccaggagcccccatgggccgcccagtaccatgcacactcctgtcccgaactccctgaggcctcccctcccttcagggcacccactggttcccaggctggaaccagggtctctctttacctcctaccccatggtggcaccacagaggccctcagccgagtcctgcctgagtgttgcaagctcaggcctttaaggactgctgatgccccctcaggcctcccccaagtttgctgggctttggtggaagccctgagagcttcaggtcctgctcagcccgaggagcagtctggcatgggagtgaggccccgtccttctcactgcctggtcacatggtgcctagggatgcagggctggaggccagaggtgtcagcaacactgtgacccaccacaacctccagcctcccttttcagagcacagcattaaagtttggggaattctgtaaaaaaaaaaaacaaaaaaaaaaacaaaacaaaaaaagggggggggcgaaacaaaaaaaccccaggaggggcgacaaaaacacggagacacacatcatggacaaagggggcccatagagagggcaggagacaacgcaggagaggcgcaaaaacaacacgcggcgagcaaacgcgaacgggcactgggaggaccaccgcggcggcacacggccgaccaccccagacatacccacagggcaacacaccaggtaccagggcacaccccgacacccccagagaagaaccggatttaatagcgacccagagacacacagcccaagcaccagaggggcccacacaaggcgagcgcgagagcgacagcgcagcgacgaccgcacgccgccgcgccggcacacgccacgcccgaaggc

SEQ ID NO: 725174 - DNA, 540 bp, Homo sapiens
cagagtattacgtgtacacgctttaaataattacaaagtcatgtctccatgtaagtttatctgaaacccatcactcagtgtttgctgcaagcccaagctgtgataaaacacccatcataaatttatattaaaactctgctcgatagcaattatttaccaacaaagattatcgactgcattagagactgggggtcttaaccaggccaatcagtctttgtatagagtctcatttaccaaatgctgccggcctctgctcgcacagggatcatcgttacacagagggaacatttcatggctaagctcctacggggtgatgggagcaacagtctcaacgcagggcggcgccatgtcaagatcagattatcaacaggcacgtccacaaccactacgcctttgctctgcgggcagcattcctcatcggctttaaaccagacaccggggggccgtgcatgcatctgacttgaatgtacaaggacgggtgcacgtgtgatttcgcactgagactcaatgaatcctcttgctgctgcaggagcgctaata

SEQ ID NO: 725175 - DNA, 1241 bp, Homo sapiens
gtggccgcaacgggcggggcggggccgggcaagtttgttccccgagttcggagcctaggagccccccgcggctgcggcgcaggtgccctcggcctgagtcgggatggagctgcctgctgtgaacctgaaggtgattctcctaggtcactggctgctgacaacctggggctgcattgtattctcaggctcctatgcctgggccaacttcaccatcctggccttgggcgtgtgggctgtggctcagcgggactccatcgacgccataagcatgtttctgggtggcttgctggccaccatcttcctggacatcgtgcacatcagcatcttctacccgcgggtcagcctcacggacacgggccgctttggcgtgggcatggccatcctcagcttgctgctcaagccgctctcctgctgcttcgtctaccacatgtaccgggagcgcgggggtgagctcctggtccacactggtttccttgggtcttctcaggaccgtagtgcctaccagacgattgactcagcagaggcgcccgcagatccctttgcagtcccagagggcaggagtcaagatgcccgagggtactgaagccagccacgctgcgcccggccctgccccgggccttcctcgtgcctgggaggtcgttctagggatgctcctgacctccgtctcttggacctaagatggaatgtgtccccagctcagggattgcctgaaccaagaggccaggagcccccatgggccgcccagtaccatgcacactcctgtcccgaactccctgaggcctcccctcccttcagggcacccactggttcccaggctggaaccagggtctctctttacctcctaccccatggtggcaccacagaggccctcagccgagtcctgcctgagtgttgcaagctcaggcctttaaggactgctgatgccccctcaggcctcccccaagtttgctgggctttggtggaagccctgagagcttcaggtcctgctcagcccgaggagcagtctggcatgggagtgaggccccgtccttctcactgcctggtcacatggtgcctagggatgcagggctggaggccagaggtgtcagcaacactgtgacccaccacaacctccagcctcccttttcagagcacagcattaagttggggaatctggttgacaagacaggagtgacaacgacccaccagcgaagaaggtggacatccgcagaccgaacgaacagagccacacagaaacaagg

SEQ ID NO: 725176 - DNA, 381 bp, Homo sapiens
caaggcgtatattttccacattggaaaacctcgcggctatttattgataggacatatgggttgatttctagtcttatgctaatatagtgaataatgctgcaataagacatacgtgtgcatgttgtctttatagcagcaagatttatagttctctttgggtatatacccagtaatgggatggctgggtcacatggtatattctagttctagatccctgaggaatcgccatactgacttccacaatggttgaactagtttacagtcccaccaacagtgtaaaagtgtatcctatttctccacatcctctccagcacctgttgtttcctgactttttaatgatcgccattctaactggtgtgagatggtatctcattgtagttt

SEQ ID NO: 725177 - DNA, 1666 bp, Homo sapiens
gtggccgcaacgggcggggcggggccgggcaagtttgttccccgagttcggagcctaggagccccccgcggctgcggcgcaggtgccctcggcctgagtcgggatggagctgcctgctgtgaacctgaaggtgattctcctaggtcactggctgctgacaacctgcttctggagacatttctctgccaaaccaagactggaaaccattgagctcacctgtgcactttgcaaacttcgaagtgcagcgcacagggcaacagctgggctgcattgtattctcaggctcctatgcctgggccaacttcaccatcctggccttgggcgtgtgggctgtggctcagcgggactccatcgacgccataagcatgtttctgggtggcttgctggccaccatcttcctggacatcgtgcacatcagcatcttctacccgcgggtcagcctcacggacacgggccgctttggcgtgggcatggccatcctcagcttgctgctcaagccgctctcctgctgcttcgtctaccacatgtaccgggagcgcgggggtgagctcctggtccacactggtttccttgggtcttctcaggaccgtagtgcctaccagacgattgactcagcagaggcgcccgcagatccctttgcagtcccagagggcaggagtcaagatgcccgagggtactgaagccagccacgctgcgcccggccctgccccgggccttcctcgtgcctgggaggtcgttctagggatgctcctgacctccgtctcttggacctaagatggaatgtgtccccagctcagggattgcctgaaccaagaggccaggagcccccatgggccgcccagtaccatgcacactcctgtcccgaactccctgaggcctcccctcccttcagggcacccactggttcccaggctggaaccagggtctctctttacctcctaccccatggtggcaccacagaggccctcagccgagtcctgcctgagtgttgcaagctcaggcctttaaggactgctgatgccccctcaggcctcccccaagtttgctgggctttggtggaagccctgagagcttcaggtcctgctcagcccgaggagcagtctggcatgggagtgaggccccgtccttctcactgcctggtcacatggtgcctagggatgcagggctggaggccagaggtgtcagcaacactgtgacccaccacaacctccagcctcccttttcagagcacagcattaaagtttggggaattctgtaaaaaaaaaaaacaaaaaaaaaaacaaaacaaaaaaagggggggggcgaaacaaaaaaaccccaggaggggcgacaaaaacacggagacacacatcatggacaaagggggcccatagagagggcaggagacaacgcaggagaggcgcaaaaacaacacgcggcgagcaaacgcgaacgggcactgggaggaccaccgcggcggcacacggccgaccaccccagacatacccacagggcaacacaccaggtaccagggcacaccccgacacccccagagaagaaccggatttaatagcgacccagagacacacagcccaagcaccagaggggcccacacaaggcgagcgcgagagcgacagcgcagcgacgaccgcacgccgccgcgccggcacacgccacgcccgaaggc

SEQ ID NO: 725178 - DNA, 570 bp, Homo sapiens
gatttggggccaggacctccctatacacacacacatgcacgcatgcacgcacgcacacacacgacacgcacgcacacacactgtcctgtaaggttgaaatttggggccagtacctccctacacacacacacacacacacacacacacacacacacacagcgcacgtctgctctctgtaccatcctatacacacacgacacacggctgtcgtgtcaccgtcccatacacacacaacacacacacacacacacacgctgaacctatataggtggctcttatctcctcatatacacacacacacacacgacacaacacacacgacacacgacactcttgactatatctctctctacacaacacacacacaacctctctgatcacttcactgctggcgctctatctcatagtaacaccacacacatcagcacaacacagacaccacacacatgctgtcttttctctccctactcatataacacagcactgctgctgtttgcagtagcgtagtatgcatgcctgctgtctacaacacgacacacacgaccctacacacgtgggtcgtctaccctc

SEQ ID NO: 725179 - DNA, 1805 bp, Homo sapiens
gtggccgcaacgggcggggcggggccgggcaagtttgttccccgagttcggagcctaggagccccccgcggctgcggcgcaggtgccctcggcctgagtcgggatggagctgcctgctgtgaacctgaaggtgattctcctaggtcactggctgctgacaacctggcataaggattgcacaccctgcaggagctgggagggagacgtggaagtgctcatcagagctccccagggccttccccacagtgaggcctcagcactgcagcttgattttcacctttaccatctcttttaatctgttgagcttctggagacatttctctgccaaaccaagactggaaaccattgagctcacctgtgcactttgcaaacttcgaagtgcagcgcacagggcaacagctgggctgcattgtattctcaggctcctatgcctgggccaacttcaccatcctggccttgggcgtgtgggctgtggctcagcgggactccatcgacgccataagcatgtttctgggtggcttgctggccaccatcttcctggacatcgtgcacatcagcatcttctacccgcgggtcagcctcacggacacgggccgctttggcgtgggcatggccatcctcagcttgctgctcaagccgctctcctgctgcttcgtctaccacatgtaccgggagcgcgggggtgagctcctggtccacactggtttccttgggtcttctcaggaccgtagtgcctaccagacgattgactcagcagaggcgcccgcagatccctttgcagtcccagagggcaggagtcaagatgcccgagggtactgaagccagccacgctgcgcccggccctgccccgggccttcctcgtgcctgggaggtcgttctagggatgctcctgacctccgtctcttggacctaagatggaatgtgtccccagctcagggattgcctgaaccaagaggccaggagcccccatgggccgcccagtaccatgcacactcctgtcccgaactccctgaggcctcccctcccttcagggcacccactggttcccaggctggaaccagggtctctctttacctcctaccccatggtggcaccacagaggccctcagccgagtcctgcctgagtgttgcaagctcaggcctttaaggactgctgatgccccctcaggcctcccccaagtttgctgggctttggtggaagccctgagagcttcaggtcctgctcagcccgaggagcagtctggcatgggagtgaggccccgtccttctcactgcctggtcacatggtgcctagggatgcagggctggaggccagaggtgtcagcaacactgtgacccaccacaacctccagcctcccttttcagagcacagcattaaagtttggggaattctgtaaaaaaaaaaaacaaaaaaaaaaacaaaacaaaaaaagggggggggcgaaacaaaaaaaccccaggaggggcgacaaaaacacggagacacacatcatggacaaagggggcccatagagagggcaggagacaacgcaggagaggcgcaaaaacaacacgcggcgagcaaacgcgaacgggcactgggaggaccaccgcggcggcacacggccgaccaccccagacatacccacagggcaacacaccaggtaccagggcacaccccgacacccccagagaagaaccggatttaatagcgacccagagacacacagcccaagcaccagaggggcccacacaaggcgagcgcgagagcgacagcgcagcgacgaccgcacgccgccgcgccggcacacgccacgcccgaaggc

SEQ ID NO: 725180 - DNA, 1514 bp, Homo sapiens
  misc_feature (1514)..(1514): n is a, c, g, or t
caacgtgaagagggtcaagatatatacagtactaggccagatcctgttgtaagttctgcctgtgagagttgagaactgatgcatactcccaatcagaagtgagcacagaaagatctgtgactcttgaatcatacagctcatgtgttagtgaaaagtgttgatacatagataccagtttgaatctgtgagttgccccgttatacatggtgttaccctcgtcacctcttcttcgtctgcggctctataggataccgactatcgcttttacgttatcgcccgtatgaggtcagtacattgacttagactaaggctccaatcgtgtcctactgaccataagcgtgattctaaatatgatctggtcaattgcgacttcgtcttgtcaattcagctcgtgcgatgaggccctcgagtacgtatccaagccgatttcatcaatcccgaaaaccccctcattgagacgctcttcaaccctgagctggcgagttcgcactatcatacaatgacactcaggccccacctgtgtagcatatatcgagtgcccatcacgttaagcctatatgcttgccactgaaccgatatgcttcataccagactaatcgtagaagcgacaagcgatccatgcgagtttcggttcaattcacttagccgtgccggatccgttcgtccacaggcgcacctttgtcataagaagcgtccttgtcagttcccccaagcgttagagctacggcgcttcttgtgcggaactggaaggctgttctcgttaaggaaaacacgaggcagccatccggacatgtagaacgcgctagtacgggcaccttattaccaggccgccgcgtcaagagtgtactgactaagccgctccgtgaacacgtcgaggtgaatgtgaacacccgttctctccgtttgccgttgccgttaacacccttcaaacctcaatgctgggttctgcactccacgacgttaggacactttcgagctacggcctcagttcagagagcgttccttaggcgacactaacactttagagaaccaacagaggcgacaccgttccggaacggcgcactcagccactaagcggctgcacatcaacgggtgcgcccggttaatgtaagcagtgccgacgcattacagtgaacgcaaactcaagttgcaacagcatcgagtcagctgagactcatctatgactgcgcggcgctgtctttcattgactgtcgtaacaccagcgatggcgcgacccagtgcgataggcgcgcacgtcattgcaagagaagactacgcgcgttgcgcaatcttgccgcaccacccggggaactggagtcgtacggacagagacgtccattcgcggatgcgtgtgccctagtcgaccgacaccctctgattgcgcccacgcgatcgtcgctgcccatgcgcctgtgaattgccggcgtaccgagaccctccctcggatagcgatggcgatgtcgactcgggggggttgattccgccgcgcgcgtgtgcacgcggcgcaagcatcn

SEQ ID NO: 725181 - DNA, 124 bp, Homo sapiens
cacatcatgtcatacagcttcttcacagctgcttaatctggtgcttgttggctttaacatcccataatgaacacaagtgtgttgttgtcttctatccatcttccatggccagactccagtggtc

SEQ ID NO: 725182 - DNA, 1645 bp, Homo sapiens
gtggccgcaacgggcggggcggggccgggcaagtttgttccccgagttcggagcctaggagccccccgcggctgcggcgcaggtgccctcggcctgagtcgggatggagctgcctgctgtgaacctgaaggtgattctcctaggtcactggctgctgacaacctgcttctggagacatttctctgccaaaccaagactggaaaccattgagctcacctgtgcactttgcaaacttcgaagtgcagcgcacagggcaacagctgggctgcattgtattctcaggctcctatgcctgggccaacttcaccatcctggccttgggcgtgtgggctgtggctcagcgggactccatcgacgccataagcatgtttctgggtggcttgctggccaccatcttcctggacatcgtgcacatcagcatcttctacccgcgggtcagcctcacggacacgggccgctttggcgtgggcatggccatcctcagcttgctgctcaagccgctctcctgctgcttcgtctaccacatgtaccgggagcgcgggggtttccttgggtcttctcaggaccgtagtgcctaccagacgattgactcagcagaggcgcccgcagatccctttgcagtcccagagggcaggagtcaagatgcccgagggtactgaagccagccacgctgcgcccggccctgccccgggccttcctcgtgcctgggaggtcgttctagggatgctcctgacctccgtctcttggacctaagatggaatgtgtccccagctcagggattgcctgaaccaagaggccaggagcccccatgggccgcccagtaccatgcacactcctgtcccgaactccctgaggcctcccctcccttcagggcacccactggttcccaggctggaaccagggtctctctttacctcctaccccatggtggcaccacagaggccctcagccgagtcctgcctgagtgttgcaagctcaggcctttaaggactgctgatgccccctcaggcctcccccaagtttgctgggctttggtggaagccctgagagcttcaggtcctgctcagcccgaggagcagtctggcatgggagtgaggccccgtccttctcactgcctggtcacatggtgcctagggatgcagggctggaggccagaggtgtcagcaacactgtgacccaccacaacctccagcctcccttttcagagcacagcattaaagtttggggaattctgtaaaaaaaaaaaacaaaaaaaaaaacaaaacaaaaaaagggggggggcgaaacaaaaaaaccccaggaggggcgacaaaaacacggagacacacatcatggacaaagggggcccatagagagggcaggagacaacgcaggagaggcgcaaaaacaacacgcggcgagcaaacgcgaacgggcactgggaggaccaccgcggcggcacacggccgaccaccccagacatacccacagggcaacacaccaggtaccagggcacaccccgacacccccagagaagaaccggatttaatagcgacccagagacacacagcccaagcaccagaggggcccacacaaggcgagcgcgagagcgacagcgcagcgacgaccgcacgccgccgcgccggcacacgccacgcccgaaggc

SEQ ID NO: 725183 - DNA, 444 bp, Homo sapiens
gcagttctgaccttttgtatggtcagaaatatgctaactgttgtaatcaacagccccagaattttagtgctttaacccaacatacattgactgtttgcttatataattcagtgtgggtgtcctgggggtggctttctgcgggactcaaagacccagattccttacctcttgtaattccagcctctctcaagactttggagtcttttctgttcctcaaggagataaggaaaaggaagtgcagcaccaatacttttttaatgggtcagtcttgggagtggcacacttcttcaggtccagagacacgagtgtctctaatttcaaggaaggtgagtaaatatggtctaatctagagatgtggaaggggaaaaatatggttggatgagcatctagtgagttgctatgacagaagaaaattcactgaggaagttattttcttttggaaat

SEQ ID NO: 725184 - DNA, 1494 bp, Homo sapiens
gtggccgcaacgggcggggcggggccgggcaagtttgttccccgagttcggagcctaggagccccccgcggctgcggcgcaggtgccctcggcctgagtcgggatggagctgggctgcattgtattctcaggctcctatgcctgggccaacttcaccatcctggccttgggcgtgtgggctgtggctcagcgggactccatcgacgccataagcatgtttctgggtggcttgctggccaccatcttcctggacatcgtgcacatcagcatcttctacccgcgggtcagcctcacggacacgggccgctttggcgtgggcatggccatcctcagcttgctgctcaagccgctctcctgctgcttcgtctaccacatgtaccgggagcgcgggggtttccttgggtcttctcaggaccgtagtgcctaccagacgattgactcagcagaggcgcccgcagatccctttgcagtcccagagggcaggagtcaagatgcccgagggtactgaagccagccacgctgcgcccggccctgccccgggccttcctcgtgcctgggaggtcgttctagggatgctcctgacctccgtctcttggacctaagatggaatgtgtccccagctcagggattgcctgaaccaagaggccaggagcccccatgggccgcccagtaccatgcacactcctgtcccgaactccctgaggcctcccctcccttcagggcacccactggttcccaggctggaaccagggtctctctttacctcctaccccatggtggcaccacagaggccctcagccgagtcctgcctgagtgttgcaagctcaggcctttaaggactgctgatgccccctcaggcctcccccaagtttgctgggctttggtggaagccctgagagcttcaggtcctgctcagcccgaggagcagtctggcatgggagtgaggccccgtccttctcactgcctggtcacatggtgcctagggatgcagggctggaggccagaggtgtcagcaacactgtgacccaccacaacctccagcctcccttttcagagcacagcattaaagtttggggaattctgtaaaaaaaaaaaacaaaaaaaaaaacaaaacaaaaaaagggggggggcgaaacaaaaaaaccccaggaggggcgacaaaaacacggagacacacatcatggacaaagggggcccatagagagggcaggagacaacgcaggagaggcgcaaaaacaacacgcggcgagcaaacgcgaacgggcactgggaggaccaccgcggcggcacacggccgaccaccccagacatacccacagggcaacacaccaggtaccagggcacaccccgacacccccagagaagaaccggatttaatagcgacccagagacacacagcccaagcaccagaggggcccacacaaggcgagcgcgagagcgacagcgcagcgacgaccgcacgccgccgcgccggcacacgccacgcccgaaggc

SEQ ID NO: 725185 - DNA, 201 bp, Homo sapiens
aagaatataagacatttgcaggaagatggtgcaggaggagttctggaggtccaaaggcatgtgctggagttgcaggataaatatgaattgctctagttcatgatccaagccacggccaatcacatgacaataaaatagagactgatggcacatgcacccacgtacacacactcacactcacactattaagccttacgagga

SEQ ID NO: 725186 - DNA, 1220 bp, Homo sapiens
gtggccgcaacgggcggggcggggccgggcaagtttgttccccgagttcggagcctaggagccccccgcggctgcggcgcaggtgccctcggcctgagtcgggatggagctgcctgctgtgaacctgaaggtgattctcctaggtcactggctgctgacaacctggggctgcattgtattctcaggctcctatgcctgggccaacttcaccatcctggccttgggcgtgtgggctgtggctcagcgggactccatcgacgccataagcatgtttctgggtggcttgctggccaccatcttcctggacatcgtgcacatcagcatcttctacccgcgggtcagcctcacggacacgggccgctttggcgtgggcatggccatcctcagcttgctgctcaagccgctctcctgctgcttcgtctaccacatgtaccgggagcgcgggggtttccttgggtcttctcaggaccgtagtgcctaccagacgattgactcagcagaggcgcccgcagatccctttgcagtcccagagggcaggagtcaagatgcccgagggtactgaagccagccacgctgcgcccggccctgccccgggccttcctcgtgcctgggaggtcgttctagggatgctcctgacctccgtctcttggacctaagatggaatgtgtccccagctcagggattgcctgaaccaagaggccaggagcccccatgggccgcccagtaccatgcacactcctgtcccgaactccctgaggcctcccctcccttcagggcacccactggttcccaggctggaaccagggtctctctttacctcctaccccatggtggcaccacagaggccctcagccgagtcctgcctgagtgttgcaagctcaggcctttaaggactgctgatgccccctcaggcctcccccaagtttgctgggctttggtggaagccctgagagcttcaggtcctgctcagcccgaggagcagtctggcatgggagtgaggccccgtccttctcactgcctggtcacatggtgcctagggatgcagggctggaggccagaggtgtcagcaacactgtgacccaccacaacctccagcctcccttttcagagcacagcattaagttggggaatctggttgacaagacaggagtgacaacgacccaccagcgaagaaggtggacatccgcagaccgaacgaacagagccacacagaaacaagg

SEQ ID NO: 725187 - DNA, 101 bp, Homo sapiens
gaagttccccgcgtgactcaacagacatctacaaatgccaagcctctgattgtcttagcagtcagtaaggaagaaagatcagataaggaagaggttagtcc

SEQ ID NO: 725188 - DNA, 553 bp, Homo sapiens
gtggccgcaacgggcggggcggggccgggcaagtttgttccccgagttcggagcctaggagccccccgcggctgcggcgcaggtgccctcggcctgagtcgggatggagctgcctgctgtgaacctgaaggtgattctcctaggtcactggctgctgacaacctggggctgcattgtattctcaggctcctatgcctgggccaacttcaccatcctggccttgggcgtgtgggctgtggctcagcgggactccatcgacgccataagcatgtttctgggtggcttgctggccaccatcttcctggacatcgtgcacatcagcatcttctacccgcgggtcagcctcacggacacgggccgctttggcgtgggcatggccatcctcagcttgctgctcaagccgctctcctgctgcttcgtctaccacatgtaccgggagcgcggggttcttcggtctctcagaccgtagtgctacagacgatgactcacagagcgcccagatccttgcagtccagaggcagatcaatcacgaggtactgaccaccgccgagat

SEQ ID NO: 725189 - DNA, 116 bp, Homo sapiens
  misc_feature (102)..(102): n is a, c, g, or t
  misc_feature (111)..(111): n is a, c, g, or t
gatcctattacaagtagtggaattaaatttgcaaatgatgaaaacgtgaagcacatctcctgtcccctgctcatcctgcacactgaggacgacccggtggtncccttccancttgg

SEQ ID NO: 725190 - DNA, 854 bp, Homo sapiens
  misc_feature (456)..(456): n is a, c, g, or t
gtggccgcaacgggcggggcggggccgggcaagtttgttccccgagttcggagcctaggagccccccgcggctgcggcgcaggtgccctcggcctgagtcgggatggagctgcctgctgtgaacctgaaggtgattctcctaggtcactggctgctgacaacctggcataaggattgcacaccctgcaggagctgggagggagacgtggaagtgctcatcagagctccccagggccttccccacagtgaggcctcagcactgcagcttgattttcacctttaccatctcttttaatctgttgagcttctggagacatttctctgccaaaccaagactggaaaccattgagctcacctgtgcactttgcaaacttcgaagtgcagcgcacagggcaacagctgtgagtaatgtgaactgtaaccatcatgattcacgaccttgagaagcagggccanaatacagatttcttagtcacacttccccaagattctgagttggtgattctgggctgggacccaggcacctgctttcttaaaagcaaaagataagatggtttattcaaagacctattgaaccgaatggcactccacacctgccttgcacatgtcttctgcatgttacactttagtgaatgtcctataaatctaggaagcgcccgctgcatgcaggggaaagcaaggcccagtgggtttggtaataaatgaggtagactcagtccccgtccccctgagtcttccttgcaacacagcagggtgacaaggagcatggcctctccagccagactccaaatcccagccccaccgctcagcaactgtgtgaccttggcgagttactaacctcacttgggtaaggc

SEQ ID NO: 725191 - DNA, 257 bp, Homo sapiens
tactaccagtgtgattcattataacagtctccatgtcataagtgttcaaggagttgaggcccatcaggagacccacattcgggctgtccctggatgaaaattatccgagtctgtactcggaaaatgcctgttctgaccccatcctttgaatccccatctagccttgggcttgcctaggccactgttctctgctgagtgccctgaccaggagctctgtactgtttccaacaccatgttcagtccccgcccgcgggccg

SEQ ID NO: 725192 - DNA, 262 bp, Homo sapiens
tcggcggcgaacctctctgtcagcctcgccgctgggaggccggggcatcgtgatgagccaagaactcttccaccttccgagcggagagaagttccattcctctccctcttcctcctcctcttccacctcctcctcggcctcctgtgctctcctggcccaggaccctgccatggagacaggcctgagcatgtattccgatgactttggcagcttcatgcggcccaactcggagcccttggccttcccagcccggccctggttg

SEQ ID NO: 725193 - DNA, 389 bp, Homo sapiens
  misc_feature (68)..(68): n is a, c, g, or t
  misc_feature (195)..(195): n is a, c, g, or t
  misc_feature (355)..(355): n is a, c, g, or t
  misc_feature (365)..(365): n is a, c, g, or t
aagcaagactccatctcaaaaataataataataaataataataataataataataataataataatantaatccttccagctgggcgcagtggctcagctcaggtgatccgcccgcctctgcctcccaaggtgctgggattacaggtgtaagccatcacacctggccctagtgacaggtttttatgggtactttntagatgatctaagaaatcatgtgcatatatctttcagatttttattttgggaaaatgaaggtttctacaacatagttgtttcagtgttcaaataaacctgaaggactcaacatttacatttgaactatatccttcctagtgggttaagtgtgaaaaagantttggcttgnttcctaaaaactctgccaagccct

SEQ ID NO: 725194 - DNA, 805 bp, Homo sapiens
gcgggagaggtgcgggccgaatccgagccgagcggagaggaatccggcagtagagagcggactccagccggctggaccctgcagaccctcggcctgggacagcggcgcgctgggacagagcgcccaatgagagcatcgagacagcggaacccgcgaagccaggcccgaagatcgcgagcgcgtgcagccgtggcgcgtctcccgccgccggtccgggcagcatgaggcgctgcggagcttctggctctggctgtgcgcgcatggcgctgagcctgctagccgagcctgcggcagattgtggctactattttgccccctgaagatcacgatggctctggggatgactctgacaatttctccggctcaggtgcaggtgctttgcgagatatcaccttgtgacagtagatccccttcagttggaaggacacgcagctcctgacggctattcccacgtctccagaagccaccggcctggaggctacagcttgactccagctccaccctgccggctggagaggggcccaaggagggagaggctgtagtcctgccagaaagtggagcctgtgctcaccggccgggagcaggaaggcatcaccgccgagccagggaggacaccagcagatcccgagcactcaatcagtgctcaaagacacacagacaagcacgagccatggagccagcaacgttccaaccgccacagggcacatgcaagctggcaacatgagagctcaaccctgaggaccagcaagctgacttcacatcccaaaagaggatggaggcctctgcacgagaaggctgtgagatg

SEQ ID NO: 725195 - DNA, 184 bp, Homo sapiens
gtgaggtctttgtggacgaagttgttgcaagatcgggatgacgaagttgttgctgcacacgccgatggatccacacttttaaggatgctcggaagtcagaatggacgaagttgttgctcacacgcctgaatgcccaaacgcctgagatggggatcctcataaagattgaccttgcagtgcatgc

SEQ ID NO: 725196 - DNA, 555 bp, Homo sapiens
  misc_feature (555)..(555): n is a, c, g, or t
tacaaggaacaccatcagttaactgtggttggagacatgacaataatctgcttgccaagaacacttgaaggaacccttttaccagtacgcttgaaggaacgagactcactggacccgaattacatcttgatgattatgccagatcacattatgtttgtgctacagatgttcatagatctgccctggtgaaagaactggagcctaataaatgttgaacctttgcttgtcacttttcagaaaactaatactctgctggtctgaatcgcctgtaccacaagggcacgctgccaactttcttattgtctagcgaataacacgataggacaaaggcagagatggtacagccaatgccgtagctccattatcgttgaggagagctcatgctctccaagcttgagtgtatgcggcaaatcaagagaatcgacccttgcattcacaaccatgtgcccctattcataaaattttggttcaaaaatctgtagggcaagtgtagctcaattgcaataaaacattttgcacgcagtggaggcttgggccagatcaagaagctctttn

SEQ ID NO: 725197 - DNA, 752 bp, Homo sapiens
  misc_feature (51)..(51): n is a, c, g, or t
ggtgttgggatttcataaaaaaagttaaatttggcctttcaagacccacgnaaaaggggccggggggggggtgcgaaacatccccttccctatgggggcagcttaaaaatactgccacccagatctggtagggtttctgggccaaaggttaggaaaagagttccctcaggggtgaaaaccaagagcccgttttaatgttgttgaggcatttggccggtttaaagccttttcttccctccccccaaaaattttgtttgcccaacttcaaacctggtggggtggtgcattcccttaggccccatttaaacataatttaggggccgtgacccctttggccgactctgggtcaggattttcttaggggattatattctccccgggcccggtcccgggaatttaaatgtttaagtcaccctaaatggattccgccccataaaatccaggggaaacccaggtggttgccttccctctgtatgttgcctgccattaaaaaggttaaaggcccggtttcccccccgcccctgccctgttttgccccttccccccgaggaaaaccaagccaaaggttccggggggggcctaagtaaaaaaaattgttaaaaaggggattcctgggtttttgccccttttgctttaagcccccggttgggttaaaaacttttggtctggccaaaggggggtttccgggggggaaagggtcctaactaatttgcccatttttttatcctaaaaaacccataaatctctagctt

SEQ ID NO: 725198 - DNA, 901 bp, Homo sapiens
gctttacttcggtctccggcggccgggctggggaagactggtgtggtctggccatgtgatggtctccatgccagatgcaggtgcgttgaggcgcgggcgtggcgaggtcgccgtgcgcaagccccagtcacacagcgggtcggtcctggccctgcccttgaggtccaggaagatacgaaagcagcgtgctaaggtgttgtatcccgcatggcagttgcgtgaggacgcagacgctgcctagcgataactcggaggaatcgaggtgtggagtcgactggcctgacgatctgggggatcgcgctaacccggtggggcggcggtggcggtcgtctccggactcagcgccggcgagatccttacggtcacctggggcccgcaggagctgctggaggcctcgcccgcgggcgtctcccttgctagtaccccgatctgggctgcctggtgtccgtttccgtgtccgcccgcgcgcctggtgtgaggtgcccgccgccgccggtccggtctgtgtgtgagacctcgggctcctgtctgtgcacgcgggcaacagttaagctggcgtccagtcgtccggggcccctgcgatcgtgcgtctggggccgcaggtggactaacacgggtgtgggacgccgttctggtgactccctgctgccgggcgtcttgggcctgagctgaagcgcatttccccatcaagaccgcgcggcgagcgggcccggcctctttgagtggctcatcgctcccatgcgcgcgaatcagttctaccgggcgacctatgggagcggcagcgggtgctggtgcggtgggaggatcagactaataccggggaatttttacggtgactgattcgttctgcgcaaagggagatggtcggcacattgcacccgcgtacgtacgggaggaacta

SEQ ID NO: 725199 - DNA, 398 bp, Homo sapiens
tgcggatcccctcggctctaccttgtctctcggctctaccttgttctctcggctctaccttgtctctcggctctaccttgtctctcggctctaccttgtctctcggctctaccttgtctctcggctctaccttgtctctcggctctaccttgtctctcggctctaccttgtctctcggctctaccttgtctctcggctctaccttgtctctcggctctaccttgtctctcggctctaccttgtctctcggctctaccttgtctctcggctctaccttgtctctcggctctaccttgtctctcggctctaccttgtctctcggctctaccttgtctcttcacacgcctgtagacaagatagagccgagaaaggtagagccgagacaaggtagagccgag

SEQ ID NO: 725200 - DNA, 291 bp, Homo sapiens
tgcggatcccctcggctctaccttgtctctcggctctaccttgttctctcggctctaccttgtctctcggctctaccttgtctctcggctctaccttgtctctcggctctaccttgtctctcggctctaccttgtctctcggctctaccttgtctcctcggctctaccttgtctctcggctctaccttgtctctcggctctaccttgtctctcggctctaccttgtctcttcacacgcctgtagacaagatagagccgagaaaggtagagccgagacaaggtagagccgag

SEQ ID NO: 725201 - DNA, 945 bp, Homo sapiens
aaggcgagtgccgcgcgggccaccatggtcacggacgagctggccaccaagctgagccggcggtctgcagatggagggcgatgggcggcgtgcgagaccccgggagcagcccgggcatgaacggggcagcgtgcggtctgcggcgggggcaccctgacgaggcggtcgaggcgctgggcagcgcggactgcgagcttgagcgcctagatgcgtgctgcggctcgcagacctcatggcagggcatcggcgagccccagatcgcgccagctcgcgcgcgatcttcttacctccgtaaaccgagttcaaggagttctcctaggaagcagatcaaggcacatggacgaagtatgttcaagcagtcatgatgccgggctgggactggcttcatcgacctgatggagctaaaactcatgatggagaaacttggggcccctcagacccagctgggcctgaaaagagatgatcaaggaggtggatgaggactttgacagtaagctgagcttccgggagttcctcctgatcttccgcaatggcggcggccggggagcttcaggaggacagcgggctgtgcgtgctggcccgactctctgagatcgacgtctccagtgagggtgtcagggggtcaagagcttctttgacggccaggtccaggccattcgacgtgtccagccgcttcgaggaggagatcatggcagaccaggatgacgtggacaaagcaggggaggatgatgagcaggtggaagcgggctcaatcggaggcttgccagggccaccgttttacgttagcaggggtgtttggatagcgaccgcgccttggctcccgggccccagttgtttgtgggaaaagggatggggctttagggagccccggcttagaatcttgctgcgtgtatagggagagcgcattaaaatataaggttttggcattgggccagatacaggcta

SEQ ID NO: 725202 - DNA, 275 bp, Homo sapiens
tgcggatcccctcggctctaccttgtctctcggctctaccttgttctctcggctctaccttgtctctcggctctaccttgtctctcggctctaccttgtctctcggctctaccttgtctctcggctctaccttgtctctcggctctaccttgtctctcggctctaccttgtctctcggctctaccttgtctctcggctctaccttgtctctcggaaacccactccacctactacgacaaggtagaccgagggggatcctcagagcgaagcagaga

SEQ ID NO: 725203 - DNA, 270 bp, Homo sapiens
tgcggatcccctcggctctaccttgtctctcggctctaccttgttctctcggctctaccttgtctctcggctctaccttgtctctcggctctaccttgtctctcggctctaccttgtctctcggctctaccttgtctctcggctctaccttgtctctcggctctaccttctaaatcgctcccaacaatatcctgccttattgatagctgcctaagcaaaggcttctgtcacacactcgtacactgacagcagtagagccgaggaccgagc

SEQ ID NO: 725204 - DNA, 1308 bp, Homo sapiens
gtgaacgaaccttatgaggtacgtggatagatttgcaaaaaatcaacgcagtcctgatgttaaattggagttagtggctgatgttgtgcagagaaatgatggaatagatgcagagaagaaggtaagacgattattgaattgtaggctatagtgctcgatttggggaagaatgcaaatgatcgatgtaacatagagagtgatgtatcccagcgtcctgggccatcatcaaggagtatcaattgggcaagatatgacatggtctgcttgagaaaagagctctcacagagaaatttggctcaatttgttcgcgcagaaaaaaggtagagaacgcgctaatttggcgagcattgcgtttatttcggcatcagagaaaaatgcatcagtacaggttagaagattctgtaagttttacaaaagagtaaattaatgtaatagcaatttgaaggtctggagaagtatatttgactaataaaattgaccttgttggtgtggttgctgaggcattttggtatctcggagtaatctgtatcaatttatatccaagggtgccacattggaacgaaattgagactttgaatgtagtcgcatttgtagcggtgcgaattctcgaagtggcttgtcggggatgaacgttctctacgatatggcgtggggaaaacgtgagctggaaaatagcccaaataatggataaacatgtcttcgcaatggcggtatttggcccttgtgggtggcgtgaccctattcccaataccaagggtatgtcttggagaacgggttcccagtccttttgtttccaacccatgttcgttgtgctgcccctggaaagaaattgaggctgacctgggggaacctccggttgggaacgcaagcgtaacctttggcatttcccccaaatgtggggccatggcacaatctatcatatatcgtgtacttgacgccaattttggagttcctcacagtccaaccgcagggaaggaaagtaaccaacagtgcgcgaggccaaacagtaaagcgacatttggtcggatgctcccaacaccattaattgtcccgaaaaaaaggaccccgaggaatttgccaaggcagagttcacaaacaagggacactttcaagtgctagggaagtgaatactacaaacttttttgtcaccaattgggggggttggttaactctgaattggacaaagacacaggttaattgggcgcacacccaaattggcgccctttggtgtggacatggacatctcctggaagagaatctcctgggggaggccaaaatggttattcctaacgacagtcaacaaggtct

SEQ ID NO: 725205 - DNA, 282 bp, Homo sapiens
tgcggatcccctcggctctaccttgtctctcggctctaccttgttctctcggctctaccttgtctctcggctctaccttgtctctcggctctaccttgtctctcggctctaccttgtctctcggctctaccttgtctctcggctctaccttgtctcctcggctctaccttgtctctcggctctaccttgtctctcggctctaccttgtctctcggctctaccttgtctcaggagaagggtctggactagagacatagatttgagagtcattagttgtcagca

SEQ ID NO: 725206 - DNA, 507 bp, Homo sapiens
tgcggatcccctcggctctaccttgtctctcggctctaccttgttctctcggctctaccttgtctctcggctctaccttgtctctcggctctaccttgtctctcggctctaccttgtctctcggctctaccttgtctctcggctctaccttgtctcctctaccttgtctctcggctctaccttgtctctcggctctaccttgtctctcggctctaccttgtctctcggctctaccttgtctctcggctctaccttgtctctcggctctaccttgtctctcggctctaccttgtctctcggctctaccttgtctctcggctctaccttgtctctcggctctaccttgtctctcggctctaccttgtctgtgttaaaagttcacgattgccagcttcccatgataacacggaaatcagcctcctgcctatactccgtcccaaatgcggcctaattatattgtaggttctattagcttttcttctcttcaagacattctgtcttatgtct

SEQ ID NO: 725207 - DNA, 324 bp, Homo sapiens
tatcttggctaaatggctttacactgcaaaatgaccctaggttgttgctacccgctataggtttggctgcgtcccacccagaggcatcttgaattgtagttcccataatccccatgtgtcgtgggagggacccggtaggaggtaatcgaatcatgggggcaggtttttcccatactgttctcgtgatagtgaatacatctcactaaatctgatggttttataaagggcagtttccctgcacgtgctctcttgcctgctgccatggaagacataccttttagctccttctttgccttccaccatgattctgaggcctctccagcc

SEQ ID NO: 725208 - DNA, 565 bp, Homo sapiens
tgcggatcccctcggctctaccttgtctctcggctctaccttgttctctcggctctaccttgtctctcggctctaccttgtctctcggctctaccttgtctctcggctctaccttgtctctcggctctaccttgtctctcggctctaccttgtctctcggctctaccttgtctctcggctctaccttgtctctcggctctaccttgtctctcggctctaccttgtctctcggctctaccttgtctctcggctctaccttgtctctcggctctaccttgtctctcggctctaccttgtctctcggctctaccttgtctctcggctctaccttgtctctcggctctaccttgtctctcggctctaccttgtctctcggctctaccttgtctctcggctctaccttgtctctcggctctaccttgtctgtgttaaaagttcacgattgccagcttcccatgataacacggaaatcagcctcctgcctatactccgtcccaaatgcggcctaattatattgtaggttctattagcttttcttctcttcaagacattctgtcttatgtct

SEQ ID NO: 725209 - DNA, 117 bp, Homo sapiens
tagaggatccccttgcttgtaccgggccggggggagagaagtggtggttctgcaaggcgcaaggagtacagagcctagagttggcaccgtcttgagtgggagacccaccacttctct

SEQ ID NO: 725210 - DNA, 502 bp, Homo sapiens
tgcggatcccctcggctctaccttgtctctcggctctaccttgttctctcggctctaccttgtctctcggctctaccttgtctctcggctctaccttgtctctcggctctaccttgtctctcggctctaccttgtctctcggctctaccttgtctcctctaccttgtctctcggctctaccttgtctctcggctctaccttgtctctcggctctaccttgtctctcggctctaccttgtctctcggctctaccttgtctctcggctctaccttgtctctcggctctaccttgtctctcggctctaccttgtctctcggctctaccttgtctctcggctctaccttgtctctcggctctaccttgtctctcggctctaccttgtctctcggctctaccttgtctctcggctctaccttgtctctcggctctaccttgtctcttcacacgcctgtagacaagatagagccgagaaaggtagagccgagacaaggtagagccgag

SEQ ID NO: 725211 - DNA, 308 bp, Homo sapiens
tagaggatcccctgatgtcctgatgaagaaaaacaaattgaagacttttccagaagtctaactcaacaggaattttctcattccccaacctcttaaaaaaaagaaaaaaaaaaaagaagaagattattttcagagtctatttgtttcactgctggagaccagggaatagagatgtaagggctgtttgtcaactctcaggcagagaaatcactaattcatttctttcttgggtcaggggacctgatctccttttatcaaaagaaaattacttcacagagaaagcactgtcactataagggggaaaggaa

SEQ ID NO: 725212 - DNA, 563 bp, Homo sapiens
tgcggatcccctcggctctaccttgtctctcggctctaccttgttctctcggctctaccttgtctctcggctctaccttgtctctcggctctaccttgtctctcggctctaccttgtctctcggctctaccttgtctctcggctctaccttgtctcctctaccttgtctctcggctctaccttgtctctcggctctaccttgtctctcggctctaccttgtctctcggctctaccttgtctctcggctctaccttgtctctcggctctaccttgtctctcggctctaccttgtctctcggctctaccttgtctctcggctctaccttgtctctcggctctaccttgtctctcggctctaccttgtctctcggctctaccttgtctctcggctctaccttgtctctcggctctaccttgtctctcggctctaccttgtctcccgtctttaataaaatcttgtgttaaaatttgcatcacgtcgccttcctatgtatgacgaaccagaacagagatttccatgctcttttttctgcagaacaggtagaccgaggtaccgagctcc

SEQ ID NO: 725213 - DNA, 444 bp, Homo sapiens
tgcggatcccctcggctctaccttgtctctcggctctaccttgttctctcggctctaccttgtctctcggctctaccttgtctctcggctctaccttgtctctcggctctaccttgtctctcggctctaccttgtctctcggctctaccttgtctcctctaccttgtctctcggctctaccttgtctctcggctctaccttgtctctcggctctaccttgtctctcggctctaccttgtctctcggctctaccttgtctctcggctctaccttgtctctcggctctaccttgtctctcggctctaccttgtctctcggctctaccttgtctctcggctctaccttgtctctcggctctaccttgtctctcatccaagtactaaccaggcccgaccctgcttagcttccgagacagacgagatcgggcgcaacaagtagacacac

SEQ ID NO: 725214 - DNA, 181 bp, Homo sapiens
agaggaatctagatcttcattcaagggtgtcttctgccttcttgcgtgccactcaattcggttctcccagtaacatgcagctcagcacacgttctcactcacacacatttgcacacataaaacccatattgacctctgcatctgctaaagctgttatttctaaagatctccaggtaataac

SEQ ID NO: 725215 - DNA, 411 bp, Homo sapiens
gaagggttctcagatacaactctgagctacttcagacccatgaggtaggcttgaagacaatgactggcagctgatgagaaagccaaacttattatcacgtagtacatcagatctatagcatgcagacacattgtgaacgcatcagaaaacaacagcagcaacaaaactgcctgttgggtagctctgtaaatagagctctcattagtatgtttaaaattgcagttggattttgcagagctgctctgcaacacaggttttgcatcacgtgcagtaaatctctattacgtcttaatatcttcctgccactgtagccgtgggaatggggaagcaggtaagttttaggttgtgacaggcacagagtgtgctgttagtatttagtgggtagggatcagggaacgctaaaatatcttt

SEQ ID NO: 725216 - DNA, 261 bp, Homo sapiens
aatcaggttatggtggcagaagatcttggagggagagaagaggtggctggtagcagaggtggccctgatgtgtagatgaaacctcctaggtagcagccctcacagagaaggcagatgtttctttcagacctttaaagatgtcagactctcagtcaatcttccctagatctggaccagggagggccttagagaaagatggtctcccatcagtgcagtttcctccccaggcaggaatgtgctattgaaacttctaaaactagg

SEQ ID NO: 725217 - DNA, 107 bp, Homo sapiens
cgctttcgctcgccctctcctcgaggatcgaggggactctacacagacatgtgctgggaagggagacagaggcggcggcggctttaggggaaaccgaggccttcagt

SEQ ID NO: 725218 - DNA, 803 bp, Homo sapiens
  misc_feature (4)..(4): n is a, c, g, or t
  misc_feature (116)..(116): n is a, c, g, or t
  misc_feature (119)..(119): n is a, c, g, or t
  misc_feature (121)..(121): n is a, c, g, or t
  misc_feature (131)..(131): n is a, c, g, or t
  misc_feature (136)..(136): n is a, c, g, or t
  misc_feature (138)..(138): n is a, c, g, or t
  misc_feature (141)..(141): n is a, c, g, or t
  misc_feature (170)..(172): n is a, c, g, or t
  misc_feature (174)..(174): n is a, c, g, or t
  misc_feature (177)..(177): n is a, c, g, or t
  misc_feature (180)..(180): n is a, c, g, or t
  misc_feature (206)..(206): n is a, c, g, or t
  misc_feature (209)..(209): n is a, c, g, or t
  misc_feature (211)..(211): n is a, c, g, or t
  misc_feature (232)..(232): n is a, c, g, or t
  misc_feature (244)..(244): n is a, c, g, or t
  misc_feature (246)..(246): n is a, c, g, or t
  misc_feature (249)..(249): n is a, c, g, or t
  misc_feature (256)..(256): n is a, c, g, or t
  misc_feature (259)..(260): n is a, c, g, or t
  misc_feature (300)..(300): n is a, c, g, or t
  misc_feature (307)..(307): n is a, c, g, or t
  misc_feature (324)..(324): n is a, c, g, or t
  misc_feature (326)..(326): n is a, c, g, or t
  misc_feature (328)..(328): n is a, c, g, or t
  misc_feature (331)..(331): n is a, c, g, or t
  misc_feature (333)..(333): n is a, c, g, or t
  misc_feature (345)..(346): n is a, c, g, or t
  misc_feature (351)..(351): n is a, c, g, or t
  misc_feature (354)..(354): n is a, c, g, or t
  misc_feature (356)..(356): n is a, c, g, or t
  misc_feature (359)..(359): n is a, c, g, or t
  misc_feature (362)..(362): n is a, c, g, or t
  misc_feature (371)..(371): n is a, c, g, or t
  misc_feature (377)..(377): n is a, c, g, or t
  misc_feature (383)..(383): n is a, c, g, or t
  misc_feature (390)..(390): n is a, c, g, or t
  misc_feature (400)..(400): n is a, c, g, or t
  misc_feature (439)..(439): n is a, c, g, or t
  misc_feature (455)..(455): n is a, c, g, or t
  misc_feature (458)..(458): n is a, c, g, or t
  misc_feature (460)..(461): n is a, c, g, or t
  misc_feature (496)..(496): n is a, c, g, or t
  misc_feature (577)..(577): n is a, c, g, or t
  misc_feature (586)..(586): n is a, c, g, or t
  misc_feature (594)..(594): n is a, c, g, or t
  misc_feature (598)..(598): n is a, c, g, or t
  misc_feature (610)..(610): n is a, c, g, or t
  misc_feature (614)..(615): n is a, c, g, or t
  misc_feature (622)..(622): n is a, c, g, or t
  misc_feature (643)..(643): n is a, c, g, or t
  misc_feature (654)..(654): n is a, c, g, or t
  misc_feature (657)..(657): n is a, c, g, or t
  misc_feature (665)..(665): n is a, c, g, or t
  misc_feature (669)..(669): n is a, c, g, or t
  misc_feature (674)..(674): n is a, c, g, or t
  misc_feature (697)..(697): n is a, c, g, or t
  misc_feature (701)..(701): n is a, c, g, or t
  misc_feature (716)..(716): n is a, c, g, or t
  misc_feature (801)..(801): n is a, c, g, or t
acancagttaccgtgggtaagcaggtcgcctgcacagcaggaaccccaggaaaaaaaaaaaaaaaacacaagagacaaaaaaaaaaaaaaaaaaaacaagaactaaatgagtacanatngntaaagaaganaccantntanaaatataaagagaatagaaaaagaaaaannntntanaanaaaacataggaaaaaaaaataaagtntantnaaggtgtgtgtacaaaaagcntcacgacggagntnctntcctttnttnntttctctcttccccgtgtggtcatcaagtcctgggggatnttctctncccagccgccctcgggnanancancnccgcctcccatnnggccntgngnctnctntactcactncacttncttaancaacccnccatcctccnttccccaccccacccagcacgcactcattcagtccattnccttaacacaagcctnaangnnctgtattctcacaatataaacgaataaagtgtctnctggcctacttctgaattacttctcaactgtatggtttggggaagtgtgagggaaacctacaaatcccgtccaaataagtnaaattcctnaagaagtngctnagtcctaccagnttgnngttaggnaaatgttctgggttcaggcgnccctcccaggnctnagaaagtncagncaggnacagctttctgttctctcccagngtgnctaggttagtatctnacatgacaaaaaactgagagtgttctaacttctgtgcaagccaggttaatcctgagactaaatcttggcgttcagactcccgtanag

SEQ ID NO: 725219 - DNA, 597 bp, Homo sapiens
gcgaaatttcccctcactaaagggcccaaaagttggcctcccccgcggtgcgccccttctaaaactgtgtttctcccggggtccggaattcggcccaagcaggtggctttttaaagtgttggggttgggatttttttctccccgttttttcttttttgttctgaggataaagccctgaggcccacgcggttgcggagtccctgcccaaagcgccctcccctccctttaaaagccctggtctttctgtcggacctctggccaagccaggggttcgggtccgccccgatctctttctcctgggcaccaaaccgggtgtccgcgggcctctccccttttttaccagacttttccacaatttgacattttcttgtctatttattgagaccagtaaatcgggttgtgttgtatttcgtgagtggagataaaaaattgtaggccctagtcattcttgccctcctagtcacaccaacatatgtttgtgtggtgtggtgggctgttttcttttccctcttgagcgcgccccgtgtgtttttctcccttcttgggcgggcgataatatataatctattccgctgggcccgtcgtgagggtgtgttt

SEQ ID NO: 725220 - DNA, 1644 bp, Homo sapiens
  misc_feature (1011)..(1011): n is a, c, g, or t
  misc_feature (1318)..(1318): n is a, c, g, or t
tccggttgtcgtcagttcagtctgtgttctgctgctgctgtgtatcgtgttcgttgtatgatctgtcgttgtgtgttgtgttgtctggtgtcctgtagttttgtgtgtgttgcttctgatgtctgtgtcgttctgcctggtcatgtcatgttagtctcatgttgctgatattgttgtgtgtctgttgtgtgcgttcgtctctcgcttgtcgtatctcatcatgtgccatgttgtgtatgtccccgctaatccctttgttttcaacaccctccccgttttgggcccccctatttggtctcgccaggggccccacaccactgtgttgaccacaaaacccgcgcctttttttacccccccgccccctgttccttatacccggttccttaaggtttgcccgaggccgcttggggtggccgctaatctccgccccctaaggggggatccccgcccgcccaaaatgcggcccacgtcccatatatccactcaacaagaaggaggggagaaattttgtctccgcctcttgtaggggctattcttttccaataaacgttgtgtacgctgggataatggaggtttttttattactctccggggggaccctctggtctcttgaaaagagatatggtccataaacatttctcttggggagttttttgagggtttctccgcgagggtgtacccaccccccagccccatgggcccacatgaaattccacttttattgtgtggacccccctcccacgggaccacccagcagaaggtttccttggttgtagaaaaggggcccctcccgtattttctcggggaaacttgacctgtcctggtgaagagttctcagaaagtaagtttttttggctttttcccacgaaagccccacattgttaaagaagccttttttatagcctcggtaaaaaagggggggcgaccccttaagagggtttctttgttgtggcccccatatgcgccccaggcccgaagtgtctccctcggctgtttcacccaagagctccnctctaggagggggctctttcttcttttcccgcgaagggcccctcccctctatgagtcgtgtcctcccccggtttcccatccatgtggagaacatgggggccccccaaagagcctttccgagagttgttgcgatgttcttgggaaaacatccgcggaggcaccagataggcgcctaaatacccatggaagcatttgtttggattgtgccctggatgtatctccactcaccgcgatgacccctgtttataacgtattattccttgaacacctgctgttgcgccacacctgttgctcacagacaccgggntttgtctgtggcactaccaaggtgaaagagatcacatgctggccctgggagaccccacactggtataagagttggcccctatatgagagcctcctgccctgagaccaccgctgaggcactttgtggaaccccaagattgagatatctgcccacccaccccccacttctcacggacacgaaagggtgggaaagccacgaagccccctgccacatgccccacgccacgtcccccccagcattaccgggtctccttggccagctgtattttggaggatctggatgttgctcttttaagaccctttaattaaattttgtaccaagaccca

SEQ ID NO: 725221 - DNA, 1060 bp, Homo sapiens
ggccctctctggcctcctaatgacctccggactagccatgatgattgcatttccactccataacgctcctacatagtaggcctactaaaccaaaatactaaccatataccaaatgatagtgcgctgatgtacactacagagaaagttagagtacccaatcgtactaccccaccatcatcgaccgtgatcttaatagataggccattcaggatacggtgataaatcctactccatctcagccttcaggacagtgtgttctgcattcgcaaggacttgatatctggacgaccttttatacgcacctcctagtccttagcctcatacacccccagtcttggtggagcctcgagtgcccaaacacggcatcagcaccatgctaaattagcgctagaatgtacccaactgtaaaaggacattccgtattatctctacatcagggctgttatcacactacagctgatgatcatccatgacgtctacctaggataagaagggcgacacgccatgactcattgaaagcaatggctaattgagcacgttgttacctcgtagtctcgtagtaaacaggcctcctaacacgctctgagagttaactttcggggctcgctttcagaatgtgttccgacggggattctaacggtgtcaacatattttggacgccgagagttgctctgggcccttagaggtcggcgagtggtgtccccacggacgttcgcgtatgtagcttagggcgcctaacttatattacaggttacagtgccctacactacttcgagttcgctagcgacgcaggttgctgtgaatattggtcggggtggttgccagtagttggatgcatccacgagggggtggttagctcacagacaagggaaaacatatggttggaggcctgcctgcaacggtcacgtaccttgtgagcgggcgccatttaggtcatccctcgcgtcccccatgccagagcccgggtcctaagcgggccgaccacgcaggggggggaggatacagaagcggagagagcggagcgcaacaaggagagcggacgatgagcagacagacaaac

SEQ ID NO: 725222 - DNA, 145 bp, Homo sapiens
  misc_feature (23)..(23): n is a, c, g, or t
  misc_feature (40)..(40): n is a, c, g, or t
  misc_feature (85)..(85): n is a, c, g, or t
  misc_feature (104)..(104): n is a, c, g, or t
aggtgcccagtcttgagtgggcnccctccttctcccctcnagacccctaccctttcccaaaaccttcggtattgttcaaagaacncccctccccaaggaagganaaatatgattctcctctcccaaataaactccttaaccacct

SEQ ID NO: 725223 - DNA, 640 bp, Homo sapiens
cttgttatatatccagctgtgtgttcgatttcgctccccatggcgtgcacacctcgtgttccccgaggccagtccttgggtacacagatcaaagtgacgcctgtgacactgtctgtgggtaaagctaggtgccttcagcaccagtttacttcacagcagagtatcagtattctcagtatgtcttagccaggccgtcagctccgaagcgttgcgggtatttgtcactgcgcaggcaacactcacttatagcgatgagccacgcagtcctgcaagtcagtacggtagtttccgatatccctagtatgattataagtacgtcaagctatcccctgaaccggacagtgagtcatccagcccagacacccctaggtcctatgtgggggagcatcatagctcccccgagcgtatgatatatcagctcagacattggtgtgctgacactcaacaggttcaactagggtttgcccatgtccccaaccccgtggagcgcgtccttgaagaacttccgtcagcttccagagctgcctgcaatggctaagcaccagataccaatgcctgtacatagactctttgagctggaggcccgtctccaggtgctcctccagtaaaggcacagatcacagtttgttatgcaagtgcc

SEQ ID NO: 725224 - DNA, 957 bp, Homo sapiens
tccaggacatgtgatgaaagtacccagagagaatcactgttctccaggttcatcataccagcaaagtcctggtgaaatgcagctcaacaccaattatgagtccctgcaaaacccagctgagttttacgataattactatgcacagcattctatacataattttcagccacccaataactctggtgatgggatgtggcatggtgaatttgcccagcagcagcctcctgttgttcaagactcacctaaccatgggagtgggtctgatggcagcagcactaggacaggccatggccctctgcctgtaccaggcctcctccctgcagtgcaaagagctctttttgtaagacttactcagagataccaagaagatgaagaacaaaccagcaccaactcatagggcaccaagcaaggaagaaagatgatacagttaactggtattccagtagtgaagaggaagaaggaacgcagtgtcaacatcaatactgaaaaacattcacagaaaacaaacagaaacctttaaggaatcagcaacaaccttccacaagaactcagcactcctactgatccaagacttgctaaagagacaagtaccaggaacccagtggttgaacctaggttaggactatcccaaggcaagaacttgaagcttccgagtctgccccactggattcttagacttgcgtggatccccggaaatgcaagcgaatggaagtggcacataggtctaccgatggggagcaactttggtttgatcacgcaatgccggcttatgtaaacacacaaaagcactctaatttaaactcagaaacacggcaaaattttgactctggagctccccgatatgccagtacggcaaccgaatagcttaaggctacacacccttgccatgtgggccaactcgctacaggattcaacacctaccagaaataacaatagtccaccacaaaaagcaaaaaa

SEQ ID NO: 725225 - DNA, 87 bp, Homo sapiens
ctgctgtgctccaggttgccactggagtgatttctaccctccaggtaaggtttcagcttctcattatttaatgtggttggaggacac

SEQ ID NO: 725226 - DNA, 289 bp, Homo sapiens
ctagtgttttaatttcctttcatctactaacatccttgcaggacatggaccattgccacttactcgagtcaggatacttgatggattaactcgtatcatcctgccgaatcttttccagttcacgtaattttccatttgctaaaaactcatcaatcttctgcagctatgttcgttcctactccaggagatttcttagtcttcagctccactccttattttgtgtgggtattttgctcttacagatgctgcttttctatccggaaagaagaaaaggaaaatcaattagaat

SEQ ID NO: 725227 - DNA, 190 bp, Homo sapiens
ctcggtaccgttcgacatccggtggcagcttctggcctgtcctgcatatggcgagctagctgtacacggcatcaagctgatccccgatcaccggatattcctgtcgtcggcgttcagcgtggttatttggctggtggtggattttcaaacgtgtatctcccttccaaatatggccagcacttcacggtta

SEQ ID NO: 725228 - DNA, 170 bp, Homo sapiens
cggaacgaggtaggagcacgtggtctcagatttctcagagcagggaatgttaaaatatcttcatgagaccctccctattcctcagagaaacaccaactgaaaagagccaggaaaaccggggaattttccaaataggtcttcacggttaaactggtcttactctcagtgag

SEQ ID NO: 725229 - DNA, 931 bp, Homo sapiens
atcatgctccgattccccgatgccagaatcggcgcatgatcccggcgttgtggcgcacctaacggcctgtgcctgttagcttaccaaggaagtcacaagacgggaggggaccgtgcccttgacctaggtcctcacgcgcttcgcaggtttctcatcccgcagcctcgcggcgtgtcatgttcctgacggcgcctgtctctggcgcgtgtgatgtttcattctcttccagattgtgaatcatggcactgagcgcgtgtcctttatactttgtaaaggtcccgtattagctcgtggcgtggtcttggtggtcgggtgtgtactgttccccatctacggtcctgcgcgtgtgcgcatgatactacctcgtctcgcctcattactgtgaggagggtctgggtccatcctggtacacgtctgtgccccaattgtgatcctggggtcgatagaatgtcgttctcatgagtcagctctgtgagccgctcctttggatgggggtcttcttccttcctggaatgttacgttgatatcctctgtcgctcttctggttcccctattagcttctcttctagccttgtcctgttgtggtgcagttccctggtcgctggcacgggtcgtccacttttatgcgcttatctcgaatctgaagagtagtgcgtgatggccccgagcagacctcctttgttcataccgttcttccctctgctccgggggctgtgactgatccattgttctggctggtagattgttcaccacctgctgtatttccgtcccttcctttgtgacggggcgcgatgctggtgtgtctcccggggtggggccagctgcccggcaggtcttctgaggcagtgcggggctcgtggcacgtggggggctcacccttggggtcggggccgggggtgttggtaaccgaaacaagttgggcccgcatgtt

SEQ ID NO: 725230 - DNA, 353 bp, Homo sapiens
cccggccgagaaacgtgtgtgtcaagaaagtagatttacgccgattcactaataatattgaaatggattgggtcgtaggttaggtctagggtgtagctcgtgagattagggtaaatcagtgaatgaagcctcctatgatggcaaatacagctcctattgattggacatagtgtaagtgagctacaatgtatagtgtgtcgtgtagtacgatgtcaagtgttgagttggctaatacaatgccagtcaggccacctacggtaaagagaaagatgaatcctagggctcagagcagtgcagtagatcatttcatattgcatccgtggcgtgtggcgagtcaggtaaatactttgacg

SEQ ID NO: 725231 - DNA, 134 bp, Homo sapiens
gggtgggggggggggggggttggggttttttaacccggggttttttttggggggggggggggggcatttactgggtttttttttcccccccccccctttttttttcctttaaaaaggggtcccctttttcccca

SEQ ID NO: 725232 - DNA, 159 bp, Homo sapiens
ccaccctctttacagttctagtgatttgggagttgcttccccatgtctgagactcagtttcctcatctgtaaaatggagatgatagcaccgtacctcaaagagtggttgattactagggcttatgatcctgggaactcggtcataggtgtgggatgttt

SEQ ID NO: 725233 - DNA, 424 bp, Homo sapiens
  misc_feature (18)..(19): n is a, c, g, or t
  misc_feature (31)..(31): n is a, c, g, or t
  misc_feature (49)..(49): n is a, c, g, or t
  misc_feature (64)..(66): n is a, c, g, or t
  misc_feature (70)..(70): n is a, c, g, or t
  misc_feature (76)..(76): n is a, c, g, or t
  misc_feature (79)..(79): n is a, c, g, or t
  misc_feature (99)..(99): n is a, c, g, or t
  misc_feature (129)..(129): n is a, c, g, or t
  misc_feature (207)..(207): n is a, c, g, or t
  misc_feature (216)..(216): n is a, c, g, or t
  misc_feature (236)..(236): n is a, c, g, or t
  misc_feature (245)..(245): n is a, c, g, or t
  misc_feature (279)..(279): n is a, c, g, or t
  misc_feature (284)..(284): n is a, c, g, or t
  misc_feature (345)..(345): n is a, c, g, or t
cacgagctccttgtaggnnctgtcactgtanggcaacgcgctgatgggnctgtacgtggacctnnnctgngttatntgnctcaagcgcgtcaatcttgncgagaaccgcctggccacctttccgcctgnacacacagctgtgtcactggaagtgctggacctgcgcaacaggttcaggcttctggcaagcagtgccatgggtggccnggagaccangcttcggcgcctctacctgnaagggaatncactcagctgttgtggcaatggctggctgtgagnccagntgtaccaaggccgcgtggacctggacgccacccaagacctgagctggcgcttagattccangaggaggtgtgcctgagccacgtgcgtgccgaggactgtgagaaggggggactcgggaacattcctcatcatcatactc

SEQ ID NO: 725234 - DNA, 386 bp, Homo sapiens
atcccggactgtcggatgcatgttcttgtgacatgtcctcacatagatcaacatttaagatagagaaaagatcagaagaactgaaatgatgtgatgtggagataagaagccgtgtccagtatgaatctcaatttcaacaaatgaggagaaagtagatacagatgatcgaactgaaggctatttacgagcagaaccacaagagccctcccactttgattctcagcagcctgcagtcttggaagaagaagaggtcatgatagctcatgctcatccacaggaagtctacaatgaatatgtacccagacggtgcaagaataaatgccattcacatttccacgataacactcgggcagtcagacgatctcattcaacaacatcatgactac

SEQ ID NO: 725235 - DNA, 669 bp, Homo sapiens
agcgggggggactcgtggtcccggctcgactcagtcctccagccgcccggggaatacctctagttcttcccggccgccgcgactacgacccgacgtaacatccatccgcacatgacagtgaaaacatatcgtcaactcctactactagaacagagtcagctgcggatgctgagcactataccgtaatttatctcacgcgtacatctcatacgaacagccatcaagcccaaagcacgacatggcaactgaatcagagaaaagaatcaagcaagacaaagtaagcacgacccagcaacgaaagaaaaagcaaaggaaaacatgatagacggacaacaaagcagcacagacaacacacaacaacaacaacagcaacagcgaaagaccagaaacacaagcgagacaaaacaaaaaacacacacaacgcaaaacaacaaagacacaacaaaacacaacacagcacaaaaaaaaaaagaaaaaaaacaaagagtaaaaagaaggggaaaaagcgccagagcgacatacagaaaaacacataacgccaaaataaacacacaaaagagataaacacacagaagagtgaaagaaaccataccctccaacaacaggtaaaccacaaaacacaacagcaacaggaacaaaagcgagactaaaaacacacaaaacaacacc

SEQ ID NO: 725236 - DNA, 919 bp, Homo sapiens
  misc_feature (196)..(196): n is a, c, g, or t
  misc_feature (218)..(218): n is a, c, g, or t
  misc_feature (306)..(307): n is a, c, g, or t
  misc_feature (313)..(314): n is a, c, g, or t
  misc_feature (333)..(333): n is a, c, g, or t
  misc_feature (586)..(586): n is a, c, g, or t
cctgagcatggtgacaccagatgatgtcaacgccatcatcctggcccagaagaacatgctggaccgctgtgagaagacccatgagatgctgctcaacttcgctacctgtccagtgcccgcctgcagcagatgagcgaacgcttcctgcaccacacgaggaccctagtagagatgaaacgggacctggacagcatcntccgccgtatcaggacgctganagggaaactggccaggcagcacccagaggccttcagccatatcccagaggcatccttcctggaggaagaggatgaagacccctcccanncgcccnngaccaccatgccacctcanaacagagcacgggctcatgtgacaccagccccgacaccgtctcgccctccctgagccccggcttcgaggacctgtcccatgtccagcctggctccccagccatcaacggccgcagccagacagatgacgaggagatgacgggcgaatagcctgctgcccggtgccttgagggggtctcagggcagcagcatacaaggtggcagcgggtaaccctgccttgttctgtcatccagggctcctttgctgccccgtnctgtcacccagggctcctaggggacaaggctctctcccgaggggtgtggaattctcggggggtctttaattctgctccttcttctcagacatctctattctgcaagaccctctgacatgccaggcacgccattccagctggagtcgtggggctgggcacaggggaatttttcagagctgagcctgacgtctgctctgagaatgcttagaaggttccagacacagagccatgaccaccaccgtcagactcttgagtgcacagcacagtctctctgagtcgcccagccaccccgaccactaatctgctttctgcccttgctcgtaaagatcaata

SEQ ID NO: 725237 - DNA, 971 bp, Homo sapiens
  misc_feature (196)..(196): n is a, c, g, or t
  misc_feature (218)..(218): n is a, c, g, or t
  misc_feature (306)..(307): n is a, c, g, or t
  misc_feature (313)..(314): n is a, c, g, or t
  misc_feature (333)..(333): n is a, c, g, or t
  misc_feature (638)..(638): n is a, c, g, or t
cctgagcatggtgacaccagatgatgtcaacgccatcatcctggcccagaagaacatgctggaccgctgtgagaagacccatgagatgctgctcaacttcgctacctgtccagtgcccgcctgcagcagatgagcgaacgcttcctgcaccacacgaggaccctagtagagatgaaacgggacctggacagcatcntccgccgtatcaggacgctganagggaaactggccaggcagcacccagaggccttcagccatatcccagaggcatccttcctggaggaagaggatgaagacccctcccanncgcccnngaccaccatgccacctcanaacagagcacgggctcatgtgacaccagccccgacaccgtctcgccctccctgagccccggcttcgaggacctgtcccatgtccagcctggctccccagccatcaacggccgcagccagacagatgacgaggagatgacgggcgaatagcctgctgcccggtgccttgagggggtctcagggcagcagcatacaaggtggcagcgggtaaccctgccttgagggggtctcagggcagcagcatacaaggtggcagcgggtaaccctgccttgttctgtcatccagggctcctttgctgccccgtnctgtcacccagggctcctaggggacaaggctctctcccgaggggtgtggaattctcggggggtctttaattctgctccttcttctcagacatctctattctgcaagaccctctgacatgccaggcacgccattccagctggagtcgtggggctgggcacaggggaatttttcagagctgagcctgacgtctgctctgagaatgcttagaaggttccagacacagagccatgaccaccaccgtcagactcttgagtgcacagcacagtctctctgagtcgcccagccaccccgaccactaatctgctttctgcccttgctcgtaaagatcaata

SEQ ID NO: 725238 - DNA, 405 bp, Homo sapiens
  misc_feature (1)..(1): n is a, c, g, or t
  misc_feature (20)..(20): n is a, c, g, or t
  misc_feature (24)..(24): n is a, c, g, or t
ntactactactaaattcgcngccncgtcgacgtgaggaactgagaaacatggatggccttgggaacgtggaaaagggtcactgaaatgggacgacatgaactcaaggaggctatttatgaccatgtcatttgcaacatgaagaaagcttatctggagtgaaagtaaatgagaccaacagagatgagagacccggagaaatcctggttacactgcttgaatcctgtcagtcctatactggagtcctgttaatacaaaataattaagaaagaactctccaccacggggaatgtgaaaggtatatgagtcccttttcacgatgcgatgtcatgtcttttaaataagccatactttatgttcaataaaaagagaataagcaggaaaaaaaagtcgacgggcgcgaattt

SEQ ID NO: 725239 - DNA, 921 bp, Homo sapiens
  misc_feature (1)..(1): n is a, c, g, or t
ntctgccttacatactccatcgcgagggactttacttagtcgcgcgacggttcccgggttgtgctcgactgtttccccttataccgggtttgtggcaccctctgcctgtttgcgcccccggggagtgtaaccctttgcccgaggcgggacattttttacccggcgagcccctttttggaccgggggccactccgacaaaccgtgggtgacacccccgctacgttttgtagaaatctccagggtcccaagtagtaaccgtggtgacgccccccctcccgggcccgcttagtccccccccagctatttaagggcatccgcacctgctctcccgcaaaggtttccccccccgcctcctttccatgccgtgtgggagtaatacccccaccaacggcttctcaaaaatctgctggctctttattattttccaccaagataaacaccaggtctccagtgaaattaataaagtcccgccagacagagttcaggtaaacatgttggtggcgccccaatcaatatatccctccaatcattctttgtaatcccttcaacaaagcccccttgtctaaccaagatgacgtggctttaagaccaccactctccacaccttaaagaagtatcgccccccccaggcaccaatctatctcatttatcaaccacgacatattggggcacattctttacaagatctccattttacaatgaacagctgtcctccctggaatgcatccaaatatcgaggttcatacccactccccgatcgcaacctataaataggatataatcattatctatgtcttgccaaatacttcgtcttgtgtcacccaccctcccaaccaaaaaatattgttttcaccgggcaaagagtgtctctccccccagggccgaaaaagacacacgggaaaaggcaaacaaacataacaa

SEQ ID NO: 725240 - DNA, 504 bp, Homo sapiens
  misc_feature (1)..(1): n is a, c, g, or t
  misc_feature (20)..(20): n is a, c, g, or t
  misc_feature (24)..(24): n is a, c, g, or t
ntactactactaaattcgcngccncgtcgacactaccgtttgctggttttgaaaatggagaaaaagagtgaggaactgagaaacatggatggccttgggaacgtggaaaagggtcactgaaatgggacgacatgaactcaaggaggctatttatgaccatgtcatttgcaacatgaagaaagcttatctggagtgaaagtaaatgagaccaacagagatgagagacccggagaaatcctggttacactgcttgaatcctgtcagtcctatactggagtcctgttaatacaaaataatagtaataatccctctgtttcttatgtttatgccaacttcaacaaaaagaaacttgactaagagacaatataagaatttaatgtgtaattaagaaagaactctccaccacggggaatgtgaaaggtatatgagtcccttttcacgatgcgatgtcatgtcttttaaataagccatactttatgttcaataaaaagagaataagcagga

SEQ ID NO: 725241 - DNA, 120 bp, Homo sapiens
cctcctgaaagctccatgaactgcttgagtaccagacttgagcaatggttcccacaattatttatgagatcagctttggtcttgccaatgcctgtgtctaccagagtcagggtacgttcc

SEQ ID NO: 725242 - DNA, 691 bp, Homo sapiens
gatgtaagtgagattctgaagaaggaagagaagaacagtgttaagtatcctggcaaaggagcattagggttacagatagaattgaagttgctcgtcagctgattgaagataaggagattggcctggattatccaggtaggctcaatgtaatcaggaagggcctttaaagtgagagagggaggcagaagaggaagtcagagcgatgtgctgtgaaatctactaccgtttgctggttttgaaaatggagaaaaagagtgaggaactgagaaacatggatggccttgggaacgtggaaaagggtcactgaaatgggacgacatgaactcaaggaggctatttatgaccatgtcatttgcaacatgaagaaagcttatctggagtgaaagtaaatgagaccaacagagatgagagacccggagaaatcctggttacactgcttgaatcctgtcagtcctatactggagtcctgttaatacaaaataatagtaataatccctctgtttcttatgtttatgccaacttcaacaaaaagaaacttgactaagagacaatataagaatttaatgtgtaattaagaaagaactctccaccacggggaatgtgaaaggtatatgagtcccttttcacgatgcgatgtcatgtcttttaaataagccatactttatgttcaataaaaagagaataagcagga

SEQ ID NO: 725243 - DNA, 798 bp, Homo sapiens
gtcatctgtgaatgagcttcgccaggtggtgggcacctgggagccatgcagaggctgtggtgctgagttagactccaggtacttatgtggtcaaaaggaaatcgccactagctccaggctgtgttaggacagtattagcatgaaggctgtgcgaccatcatgcctgctgatccttgcagtgcaggcctggtccagaaaatttctgggtcagtgacttgctgcagggaccagccgctaccagtgacggccctgaaacaggacacatctgtaatttatgtccctcacccatgggacaaggcacgccgtctacaatcacagtcctcctccatcacccaccctgacagtctcgagctggcagggcttgaattgttagtccacaactctggccaaaagatactattttatccagagacaagagtgccaggaggcaagtgagtggtgagccccgctgggagagagctggcggctgactgccacatgccattccagacctgtcttgccatgtggcgacccatggttacatatttgacgttataattgtactgaccctggaaccagataagacagaaacttcgtggtctcttggcggctccacaggaacccacttcacgggacgcaagattctacactggtggttacccatacttggacaatagggaagccctacttcattcgaatggacgcagccaccttagctgacacaccacgaaccggccacctgccctaatactacacgtaacaaacagcaagaattatcaccctgcatctgccctggcatgaaaagtaagcgtacgcggc

SEQ ID NO: 725244 - DNA, 695 bp, Homo sapiens
gaggctcccttgcctttggctgggtgcaacttccattttaggtgtggatctgagggggaaaaaaaaagtgagagagggaggcagaagaggaagtcagagcgatgtgctgtgaaatctactaccgtttgctggttttgaaaatggagaaaaagagtgaggaactgagaaacatggatggccttgggaacgtggaaaagacacatactaacaaaaggccacatgaggacacagtgagaagctggaagtctacaacccagaagagagccctcaacagaacctaaccatgctggtaccctgatctcagacatccagcctccagaagagtgaaaaaatataattcttatttctaagcaaaaaaattacaaaaaaaaaaaaaaaaaaacaattggtcgggcggccttggcccctctaggaaaaggtttttcataagaaccaatagcgagtattagagagcgccacagcgagagaccccaaagagagagacaggaacaaaggtgcgaagaaaccacaatgtgtgggaccacatcgacgcggatggatccaccaaaaggaagaacaactcctgtcgcaccagtgagacgaaaggggcacgggaactctcaccgcgagataaaaaagcgccccggaggcgtaaacgaacgcgtctgggaaacaatacccagaagggggtccggagcacaaaacgggcctgacga

SEQ ID NO: 725245 - DNA, 677 bp, Homo sapiens
  misc_feature (47)..(47): n is a, c, g, or t
  misc_feature (94)..(96): n is a, c, g, or t
  misc_feature (100)..(100): n is a, c, g, or t
  misc_feature (119)..(119): n is a, c, g, or t
  misc_feature (130)..(131): n is a, c, g, or t
  misc_feature (157)..(157): n is a, c, g, or t
  misc_feature (162)..(162): n is a, c, g, or t
  misc_feature (194)..(194): n is a, c, g, or t
  misc_feature (196)..(196): n is a, c, g, or t
  misc_feature (199)..(199): n is a, c, g, or t
  misc_feature (206)..(206): n is a, c, g, or t
  misc_feature (222)..(222): n is a, c, g, or t
  misc_feature (225)..(225): n is a, c, g, or t
  misc_feature (236)..(236): n is a, c, g, or t
  misc_feature (240)..(240): n is a, c, g, or t
  misc_feature (246)..(247): n is a, c, g, or t
  misc_feature (282)..(282): n is a, c, g, or t
  misc_feature (308)..(308): n is a, c, g, or t
  misc_feature (314)..(314): n is a, c, g, or t
  misc_feature (317)..(317): n is a, c, g, or t
  misc_feature (328)..(328): n is a, c, g, or t
  misc_feature (343)..(343): n is a, c, g, or t
  misc_feature (351)..(351): n is a, c, g, or t
  misc_feature (360)..(360): n is a, c, g, or t
  misc_feature (366)..(366): n is a, c, g, or t
  misc_feature (369)..(369): n is a, c, g, or t
  misc_feature (375)..(375): n is a, c, g, or t
  misc_feature (378)..(379): n is a, c, g, or t
  misc_feature (421)..(421): n is a, c, g, or t
  misc_feature (438)..(438): n is a, c, g, or t
  misc_feature (447)..(447): n is a, c, g, or t
  misc_feature (457)..(457): n is a, c, g, or t
  misc_feature (489)..(489): n is a, c, g, or t
  misc_feature (496)..(496): n is a, c, g, or t
  misc_feature (666)..(666): n is a, c, g, or t
ggaggaacagaggtggggaaacatgggagatgggcatagctttccanaagcttccagcatgggatacctagtggctcatccctgtttgcttctnnntgtntagatacccacatgctatntgttccaatgnnccagatccctctagaccacgcatagncccancctgagatatgttggaagaagcttagtgaaananctnccaaagntcgagttccagcttgnagnttttggatatnaccncgcttnnaggcacagggaccaacctcccatgatgttcatgcnaggtagagtggggtataaggttcggnagttgntanttttggttagntttaccgtcccgttntcccaganaaccttgtntggagntangatttntanntggagccattattgtgctcagcactcacacggtgggctactntggggccacaggaagtncagggaganaataacccangtgtttggggccctgagcatgggtggggccangcagggnactacaagggggactttcccagatggaaaccagggctcccacccagtaggcgcacagcacagatgggacgggaagaccctggacagaggccaaaggcccaggccccagcctccccatcagcctgcgccagcacaggcttcggactacttggagactgtaggcaaccagtntggcacagatg

SEQ ID NO: 725246 - DNA, 942 bp, Homo sapiens
  misc_feature (787)..(787): n is a, c, g, or t
gatgtaagtgagattctgaagaaggaagagaagaacagtgttaagtatcctggcaaaggagcattagggttacagatagaattgaagttgctcgtcagctgattgaagataaggagattggcctggattatccaggtaggctcaatgtaatcaggaagggcctttaaagtgagagagggaggcagaagaggaagtcagagcgatgtgctgtgaaatctactaccgtttgctggttttgaaaatggagaaaaagagtgaggaactgagaaacatggatggccttgggaacgtggaaaagggtcactgaaatgggacgacatgaactcaaggaggctatttatgaccatgtcatttgcaacatgaagaaagcttatctggagtgaaagtaaatgagaccaacagagatgagagacccggagaaatcctggttacactgcttgaatcctgtcagtcctatactggagtcctgttaatacaaaataatagtaataatccctctgtttcttatgtttatgccaacttcaacaaaaagaaacttgactaagagacaatataagaatttaatgtgtaattaagaaagaactctccaccacggggaatgtgaaaggtatatgagtcccttttcacgatgcgatgtcatgtcttttaaataagccatactttatgttcaataaaaagagaataagcaggattcgcaagagaacacaatccctttttaactgctgggaagatacttttagtcattaatgactggacgacaatttgggacacatatatggatattggncggttgtgatgatgtgattggctctaagtgacaacattgttccctgtatagagtgagtggcaagtgcatttataaaattggccatcatggctgttaaattatgagtctagaagtgtgctcttcaaacagttttgggaggtttcctgaagaaagaa

SEQ ID NO: 725247 - DNA, 939 bp, Homo sapiens
gatgtaagtgagattctgaagaaggaagagaagaacagtgttaagtatcctggcaaaggagcattagggttacagatagaattgaagttgctcgtcagctgattgaagataaggagattggcctggattatccaggtaggctcaatgtaatcaggaagggcctttaaagtgagagagggaggcagaagaggaagtcagagcgatgtgctgtgaaatctactaccgtttgctggttttgaaaatggagaaaaagagtgaggaactgagaaacatggatggccttgggaacgtggaaaagacacatactaacaaaaggccacatgaggacacagtgagaagctggaagtctacaacccagaagagagccctcaacagaacctaaccatgctggtaccctgatctcagacatccagcctccagaagagtgaaaaaatataattcttatttctaagcaacctggtctatggtatttcattatggcagcccaagctaagacagatccctatcctattcaccatgctgcagagccacatgagcctcccttttgttcctcaagctcatcaaatacctcctagccttagaacttgctattccctctaaccagaattctcttccaggtctttccatcctgtaagtcttgtcctttagatcgaaattcacatgtgacctcccctgagaatggtcctctggaaaactatctcaaaagaggtgttcccagttactctctaccttaccccaggttattatctttcccacccacttttgcatatgtgtatcattgcttggatatgtgtgatatggtagggttaggtcctaccaaatccgtgttactgtatcccgggggatacactcaggagagaccgtggcaggatgctagggggggtccccagcggctcggtagggaaccatcaaatcagttgcagggtccggggcaaaatc

SEQ ID NO: 725248 - DNA, 196 bp, Homo sapiens
actgcacgaagtgcccacaagtgttcttaaagctgacccctcgaagagctgcagtgagtaattacagcaaacatcaatcacatggaccccgggggaactaactcctagggggcccagcccacagagtgtgctcttgcctacagattacagaagtacgctacagagcagagtggtcatcctcatctccacttcgtgg

SEQ ID NO: 725249 - DNA, 369 bp, Homo sapiens
acatgaggaaagtagctagcacatatcgggacacacaataactacgacaccacactgggattagataccccataatgcttagccctagacctcccctagttaaatcagtccaacactgcatcgccagtaatactacgtagccgaccagattaaccactcaaaggcagctgggggtgcttcatatcccgctagaggagcctgttctgtactcgataaaccccgatcaaactcaccacctcttgctcagcctatataccgccatcttcagcaacccctgatgacggctacaacagtaagcgcaaaggtacccacgtaaccgaccgttaggtcaaggtgtcgcccctgaggtggcaagaaatgggcctaact

SEQ ID NO: 725250 - DNA, 316 bp, Homo sapiens
  misc_feature (24)..(24): n is a, c, g, or t
tgagacagaatatcactctgttgncccaggctggagtgctgtggtgcccatctcagctcactgaaaccacctcctcccagtttcaatcagttcttgtgccttaacctcccaagtggctggaattgaaggcaagtaccgccaccatgcccagataatttttgtattatttttgtgtttttagtagagatggggttttgccatgttggccaggctggtctcgaactcctggcctcaggtgaattgccgacctcagcttcccagagtgctgggattataggcatgagccaccacacagtagtgaaacttgacagataat

SEQ ID NO: 725251 - DNA, 600 bp, Homo sapiens
taatgcaagtgtcctctggaatgcttacagatcatggcggaaggccaggcaggagccgtacatgccacatggcaaaaagcaggaacaagagggatagagaggatagtgtggtgagtgggtgtaggcacacttttaaatgccagataccatgagaactcactatcatgacgatagcaggcaatggcatgaggggtccgatcccatgatcgaaatacgcgcctccaggcacccaacctccgagcttagaggattacaattggatcaagagatttggagcagggacaaataatccggcaccatataggaactcaccacccttggctacgtactatgtgagtccaaaagccgggatgcatctctaagtcgggctcatggtatcgttcatcgggcaaagcttgcaggactcagccttagctcatgttgtgctcgagatgcagactttgttttggagaattaactttccctgttgtgaagtctgaggcagatggtaaattgaagtgccctgccctcccctcaccaaacaataggcatgagacctcagctgggaggtcccagccctctctggaccttggatcttaacagaagcagcacgggctacag

SEQ ID NO: 725252 - DNA, 310 bp, Homo sapiens
cacacccctgccctgaacaggaggcgtctccagcaatggcctgcaggccccacgtgaggagtcaccccccagtgcgccatctgcggtcccccatgaaccaccatgcatgggtggccctgaggagagttgtatacatgttattctataagatacagacaatgactaagataatgaagactcacataaaagcataagaacacagacaataaggagagagacgagaacacgactacaaaggaacaagatcagaaatagaacgaagcacgcgagagcaacactagtatcgcagaatatatcacacccacacaag

SEQ ID NO: 725253 - DNA, 933 bp, Homo sapiens
ggcacgaggtgcccccggcggcacggcgctggggaggcgatggcgccggccgcgtccaggctgcgggccgaagccgggctcggggcgctgccgcggcgggcgctcgcccagtacttgctcttcctgcggctctacccggtgctcaccaaggcggccaccagtggcattttgtcagcacttgggaacttcctggcccagcatgattgagaagaagcggaaaaaagaaaactctagaagtctggatgtcggtgggcctctgagatatgccgtttacgggttcttcttcacagggccgctgagtcacttcttctacttcttcatggaacattggatccctcctgaggtccccctggcagggctcaggaggcttctcctggaccgcctcgtctttgcaccggccttcctcatgttgttcttcctcatcatgaactttctggaggggaaagacgcctcagccttcgccgccaagatgagggggggcttctggccggcgctgaggatgaactggcgggtgtggacgccactacagttcatcaacatcaactacgtccctctgaagttccgggtgctcttcgccaacctggcagctctgttctggtatgcctacctggcctccttggggaagtgacgaccgctgggagaacatcaggtgcactgtggacgtgggtctgggggtctcacccgcccagcgagagcagaaccaatccagtcaggatgtcactgactctaaatcaggtgattcaagatgcccaaaaatgatggatagagaaacagaaatctctgaatgtcagaaccctgtcttttaaaaaggcagtcactgccttcaggtggtgctgccccagaaacttaaaatttagtcgaggcagtttcaattgttactgtggaccgaattaggatcacaataaacgataatgcaggttcttcaaaaaaaaa

SEQ ID NO: 725254 - DNA, 1515 bp, Homo sapiens
gacaatccatcctcgtatatggagctgcggtgcgtgacggataacagtcgagagcgcagccccctcgcccgattgatttatgtcgtgagctgacgctttattcagtgcagtcgtgaaaaactttgactcaatcattttgcacaggatgagcttgagacgggctgctccactgtacttcgttggctgagaaagttgacgcacgcgggtcgtgggttgcgtacgcgtgttgggggcgctggcgagggtgtcagcgtcctgatgtgccctcactctcgtgtccagttgtgccacctctaccctgccttgcggttgccagcactgcgcgatgcggcttcgctattcccccttgacaaaggcgcccggagtaaatggtcctcgagcaagtgctccaattatctgggatcgcgtatacgcaggctactgtatagtcgagcatcgactcagtaagctaagcgcaggaggtgcaggacgccgccgttcatgccaagatcttcgctatctggccagagctagctgtcggaacggattcgacgcggcaaacactcgagggagcacgacgcaggaagaaactcttgagacggtatcctcgcatctcgtgcataggataccaatggccaaaaatgcagcccagaaatagttcgggcaagccatatctagagaaagagctggaattggagtcccggcagcgtgcgatatcccagagcgaagccatagcacgattccagtttcttaacaccaatccactcttataaccaattcccatagatacccctctagcagggcttgttaaccctaggtcaggtgcccagacacaacggcaaggattaaaccataccatagcacaacccttgtgggctttggtcatggcccggagcgcggaccaggcatggccgtgctgaacaacacgaggagacactccagaggagggaccaaagggtgccccaacatagcaaccgagagatcagaaaataggacgagaaagacacatgcattgtcgcttttgtgtacgtccagccccttagccactgtcatggcctttgtcctccatcaactccacgggaacatcccgacccccgaaagttaacactcgtgattcttgatgccacacaaccttatcccgggtgacgctggacactactggaaacacgggacccgatgattcactgatctcttacaatatcagaaatggggacacctctgctacacatcacggtcgttgacccctacgttaaacaacatttttggccggaaactgaggtaaactcgtaatggcacaccacactaactaagcaggcgcccgcgacattcacagtcccgagaccccactttcagtcacctcatctttgtgcagttgcgacgcgcattcgccccctcttcccccggcaaccaataaatagcgcgtctagtatacaccatatacacccaaaaaattccaccgaaaccgtcttgcgaaccttatgaacgcaacgaggactgctatctttaggatcacaaaatatatgatacccatcaaca

SEQ ID NO: 725255 - DNA, 84 bp, Homo sapiens
  misc_feature (27)..(27): n is a, c, g, or t
ctcagtgttaaagtatttattaatggnaagtcaacttaatgttttgaaataaatatatgactctgtttaatgcaaaaaaaaaaa

SEQ ID NO: 725256 - DNA, 768 bp, Homo sapiens
  misc_feature (83)..(83): n is a, c, g, or t
  misc_feature (125)..(125): n is a, c, g, or t
  misc_feature (153)..(153): n is a, c, g, or t
  misc_feature (158)..(158): n is a, c, g, or t
  misc_feature (252)..(252): n is a, c, g, or t
ctccaagttgtcccgcgaaggaattttgggcccaggacagacatctactgcccagcatgagcaggctgctgtctggccatctnactgatcattttccatcttgctggtctgctccttagagtcgnagtgctgagtacacatgtgtgctgtctncgtanacacagaacaaaatccaatagtcagtttaaaaaccatcacgatagggtctgggtgcccggaattcagttctgatgggcagtgagactgttcacnacccgccttccctcctttggaggggaaagacgcctcagccttcgccgccaagatgagggggggcttctggccggcgctgaggatgaactggcgggtgtggacgccactacagttcatcaacatcaactacgtccctctgaagttccgggtgctcttcgccaacctggcagctctgttctggtatgcctacctggcctccttggggaagtgacgaccgctgggagaacatcaggtgcactgtggacgtgggtctgggggtctcacccgcccagcgagagcagaaccaatccagtcaggatgtcactgactctaaatcaggtgattcaagatgcccaaaaatgatggatagagaaacagaaatctctgaatgtcagaaccctgtcttttaaaaaggcagtcactgccttcaggtggtgctgccccagaaacttaaaatttagtcgaggcagtttcaattgttactgtggaccgaattaggatcacaataaacgataatgcaggttcttcaaaaaaaaa

SEQ ID NO: 725257 - DNA, 1068 bp, Homo sapiens
ggcacgaggtgcccccggcggcacggcgctggggaggcgatggcgccggccgcgtccaggctgcgggccgaagccgggctcggggcgctgccgcggcgggcgctcgcccagtacttgctcttcctgcggctctacccggtgctcaccaaggcggccaccagtggcattttgtcagcacttgggaacttcctggcccagcatgattgagaagaagcggaaaaaagaaaactctagaagtctggatgtcggtgggcctctgagatatgccgtttacgggttcttcttcacagggccgctgagtcacttcttctacttcttcatggaacattggatccctcctgaggtccccctggcagggctcaggaggcttctcctggaccgcctcgtctttgcaccggccttcctcatgttgttcttcctcatcatgaactttctggaggggaaagacgcctcagccttcgccgccaagatgagggggggcttctggccggcgctgaggatgaactggcgggtgtggacgccactacagttcatcaacatcaactacgtccctctgaagccaggtccccaggaccactcccacactgggaggatggggtgcagcaccccctgcagcatggcaggatacccccagatgctacaggaggaggcctggcagagcctgcaggggccacgtgcttccctcccccagaagttccgggtgctcttcgccaacctggcagctctgttctggtatgcctacctggcctccttggggaagtgacgaccgctgggagaacatcaggtgcactgtggacgtgggtctgggggtctcacccgcccagcgagagcagaaccaatccagtcaggatgtcactgactctaaatcaggtgattcaagatgcccaaaaatgatggatagagaaacagaaatctctgaatgtcagaaccctgtcttttaaaaaggcagtcactgccttcaggtggtgctgccccagaaacttaaaatttagtcgaggcagtttcaattgttactgtggaccgaattaggatcacaataaacgataatgcaggttcttcaaaaaaaaa

SEQ ID NO: 725258 - DNA, 261 bp, Homo sapiens
acgtatatgtaaccatgttggtgggagagattttggtttttaatgtggtgttcgatggagtaaagtttcttttggggtttttttgtttcaaccaaaaaaggcccccaaaatttaagcggttcctgaattttaatttttaatccctttccaaaccaaaccccgcccttttgggccccgggggaaggcacattttcttaaacgttttccgggtttttctcccaaaaggggttttttttttggggtttttgtcccctccttcaa

SEQ ID NO: 725259 - DNA, 192 bp, Homo sapiens
gacgaggaccgcgagcaatgcctgtgtccactgtgctgcctcctccgctgcttctggctgctgctgggggtggaggtttgaagcagtcccgttgcccgccgcaggcttggaagtcagctcttcccatggttccctctgcccgtgttaaccccaggctcgggattcaagtacatcttgtgcccaaccagaagc

SEQ ID NO: 725260 - DNA, 582 bp, Homo sapiens
  misc_feature (504)..(504): n is a, c, g, or t
cacagtcatgatttgtcacccaggctgccgtgcggtggcacgattgccacttactgcgaacaatgactggtggatagacgcgattgtactgccttaccctgatgcgtagctggaactgtacgcacgcacacaatcgcccagctagatctagaattggaagtatggacggggttttactatgttggactggctggatgagaactaccgacctgagacggatccgactgccttggcgcttccatagtgctgagactaccggcatgagccaccgtgcccagctgcccctgagtatgacacaataattaagcattcttgacatggaaataggagaagaaacgtcatgaatataagtcggattcgttggcggcctttgacagaaaagtattagaacgactacaatgcttacgctgaaggaacctgatcgattaaaataataattatctagccctacggatatgtgctttttgtgagacggatgctaacttaccttgctactgctgcaangcaactcgtgcccaatttccgttgtccgggggaggcactaattgcacaatcgtccggcatccccagcggaactcacaa

SEQ ID NO: 725261 - DNA, 118 bp, Homo sapiens
gagatccatgcattgtggcgcaatggatcccgattgtattcagtggaatccatgcagtgtgatgaatgcattgattccagtgcagcctggtaaaatgcatcagacctgctcttacctg

SEQ ID NO: 725262 - DNA, 453 bp, Homo sapiens
  misc_feature (21)..(21): n is a, c, g, or t
  misc_feature (445)..(445): n is a, c, g, or t
  misc_feature (448)..(448): n is a, c, g, or t
  misc_feature (450)..(451): n is a, c, g, or t
aaggacaaaaatgtttgttgncctccccaaaatccctatgttgaaaacccctaaccccccaaaccgataatgttgggagcctagagactttgggaagtaattaggtcatgaggttagagcacctcatgaattaaattagtgcccttaaaaaaggaccccagaggcccaggagtggtggctcacacctgtaatcccagcactttgggaagccgaggtgggcagatcacttgaggtcaggagtttgagactagcctggccaacatggcaaaaccctatttctactaaaaatacaaaaattagccagatgtggtggcacgtgcctttaattccagctactcaggaggctgaggcatgagaatttcttgaacccaggagatggaggttgcaggaagccaagatggcaccactgcactccagcctgggtgataaagcaagaccctgtctnaangnnta

SEQ ID NO: 725263 - DNA, 1834 bp, Homo sapiens
  misc_feature (84)..(84): n is a, c, g, or t
ggtggtcgcgcatgattctcaagatgctaggccgaggaacaccgcgaggtcgtacaggtccacgcactgctcggcgttcagggnccgggcactaataacacaaggtgcgcttgcgcggtcaagactgcttctctagcgcagagaccactgctggacctcgaactgaccgtggggcgcaccgagcaggctgtctactacgtggcacgctgcgaaacgggcgacggggagactggcagcttggtctcgtgttcctggccgcggagccagaacggcgggccttgatgcttgcgccatgcgaagacttcccatgaaaagttatcgcgaagcgaattatcatctgggaagcgaactggcacgaatgcgacactggagcggtgactacgactgcgtagacatgcgtacatcgcggccagtggccttggccttgtgatggtgtgcagtggtccactcatatcccaagttaaaggcacttgctcgcattgcgctaggtaaggcattctcgtacaggacattccctttgacccgggcaacatgcacatgtcatacatattcttatccgtacactcaatagcataggcacgagggagggacacagagggccagtatcgccaggccagtagccttaagggcctaggcaatggcaatagccatttcagcaatcgattccggcaacaagctggtggcgcggttgactggagtttcagcctttcccgggtgaagtgttctcaattcacacaccacatggacctaggcgggagtcgaacaatgggcgaacgcattgtctgagggccctcgtagaggggcctattcgtgcccgatgggtagtccctgaaagggatcccctggggaaccccaaccaggggtttggaagccaatccataccggcgtagtggaagtaaagggccataggatatagccccttccggggcctacggttggcacctgtccggcgacaccaaggccttcctaagccttccccagagcaaaaaggaagggcttgctgcgcacggggtgcatttcccctgccaccttatcccaccaagtcctcccccacttcggcacgtcgccatgcaaggcgtttcccaccccgcggattccctacaggggaatcattccctagtctgttgggcttgcccccccggactgtctgtggcccttattctgttgaggaaccccctcacgtgtatgggaagcccccgactggtgcacccctggtctcgcgtttgtttgcgccgggcccccctttcctttcgctcgggagacacgggtcaacccggtcctctgggcacccccttctgggacagcacttcttcgacctggtttcccatttgggcctgcgcttgcctttgcgggcccggtacggatttaaactactacgggggaacacgggtgtggctgccgcatcccttccgcaaaatgttccgtgcgcccacaggtggcggcgacaacatgtgttttgttccaactgccaggggcctctgtgacacgcataacggggtgccacgctttggttggcccccgcgacgcactgaccaggttgcgaaacaccacccgatcgactgtgtgctcccacaaccgcgcccaacacaaggacgcaggcacacgcacgtcgacgtcctccggggacatccacccctccagcagcgacgccaccatcgcagcgaatgagcgaagcagcgaccacaagccagagactcaccgaccgcgcacacacacagtcggagggcagacagtactcgaccaacacgacaacgagatcgcaccacagcggccaataatacccaactagcaggtcgctaatcagagcgacaagaaccacacagccgcagagcag

SEQ ID NO: 725264 - DNA, 428 bp, Homo sapiens
cttattagtagctctgggctcaagtgatcctcctgcctcagccttttacgtagccaggactgcagatgagtgccactatgcccagctaatttattttgtttgttttagagatgggatcttactgtattgcccaggctgatctcgaactcctaggctcaagggatcctcttggcctcccaaattgctgagattaaaggaaggagccactgtacctgtacccagcccatcacccaatttcagtagttgtcaactcatggtcatttttgttttcgtttgttctatttttgggaaagggattcgccttctgtgtggcccggggggtactgccggggtgtgatctgggctcattgaaccttttgcccccgggttccaggtgattctcttgcctcagcctccctagtcactagcttaacgggcgcccgccatcc

SEQ ID NO: 725265 - DNA, 147 bp, Homo sapiens
accctgctgctactgtatgagccgcgccaggcccagcgcgtggcccatgcagatgtcttcgcacctgtcaagcccatgtgcagactggagcgcgtttcccggtgccggtgccatgggtcagtgtgcagacagccgcaccctcaccac

SEQ ID NO: 725266 - DNA, 630 bp, Homo sapiens
  misc_feature (512)..(512): n is a, c, g, or t
tgtattttcagcacagcaatccaggactaaggttatgtccaagttcatggctatgaaacagaattttaatgttggacctttgcttcataagtgtagtattttaactgactgaggtaatgcaactaagaattatacatggcctctctgaaaaaatactcttatctgtggttggtaatagtgaacagttgaaagcaacttgaatatccaataacaagagttgggttaaataaatcagagtatattcatgtaatggaatactaaaacatggtatagaaatataggcattaatatgaaaatgtgttcacaccatattatcaagttaaaaagtaataggtatgtatgattccattttgggctttatttttctaccttattaaggtataattgaagtacaatgaactgcacatatttaaagtgtatagttggatacatttggacatccacagacacatgtgatgtcatcacagttgagatgatgaacattccattagcaacccccacccccgaagttntcctgtgtctctttgtaatccattaatccatctttccttccatcctcatctccagggcaacactgatctgtctcctgtcactaggaattagactgtttttctaagaatttctaaggtg

SEQ ID NO: 725267 - DNA, 177 bp, Homo sapiens
tataggtgtctagttttggacatatcttttttgaggggagctaccattcaacccacttatagagggcacactctttaaaatgattaggtattattaatctggtatatataaatcaaactataagtctaccatgagcaacaattggtagtatctcccatgttgcctgcgaacctatga

SEQ ID NO: 725268 - DNA, 1246 bp, Homo sapiens
  misc_feature (741)..(741): n is a, c, g, or t
  misc_feature (749)..(749): n is a, c, g, or t
  misc_feature (970)..(970): n is a, c, g, or t
ggtcctggtttatcacctggttctgtgtccgcccgctctctctcttggcctgaatggttttggctgtcccgggtcagaaccacgttgggtctggctaaaaaggctcgttggccaccgctgtgtttgcgcttataccagggtccaccctttgtcctggccgggccctccggtttctgattttgtcctctgaacgcttttcccgctcctgtctccgtcctgattatgccccccctatgatccaagggggccgtcccacaaaatgttggtccaacaagggccccttttatgtgtgaaccgacccgagggacttaattgctgcaatgccccgttgcgtgccgtgaatcgagaaggcgcaccaatctttgggtcctggaattctccccagaacctggtttctcttggaggcacccctgggtccacaaactgttcaatcaaggccaacatgaaccccccgggtgcatcaagaaggacccctggcaagtcccaacccccccctcccaaagggtgacacttgggccaaacaacccgtccgcgtggccttgtaactgcacgctcccacgaactcctgagtactgggccaccacaccacaggtcacaacgtggtcccctggagggaaattaaaatgccccggtgaaatatcgtaggtcacccgtcgtgtaataatatgacccaccccaaaatctcgtcacaaggtgccacacaaagagacccctctgtgcacacataacacacactcgtgnggagaccncacgagaaatggtgttccctgaagaaatggattctctgggtacaccttgaatggtcccacggtccttttgccacgctgtgttttgtgctcgatatggtttcccacatggaatacacacacggtgtaatgcgccccgggctcgtttctcacctgcttaatgtttcttcgggaatttctgggaagccacccacactctaatccgttctccacatttctgcttntgggcgaacccacgcgcccgagaaagccccaagaactttcactgagaactacactaggtctttaccacttgagcctaagatcacaatctgaaactattcttagcgcccgtccacgggagctctgctttcctagaaaggcactctttcgccacagtggaattcgcctccaaaggttgagggcccccacattggaagatgaaaaattgcactcccttggtgtagaccaataacccggtccccttggtgttgttgccctataataaacactgttttctt

SEQ ID NO: 725269 - DNA, 243 bp, Homo sapiens
cctgctgctgttgtctgtgcatgggaatgctagctacttcgcacatgatttatatcctgagattgctactgtgcttatcaccttaagaagctttgcgctctgagacaatgaggttctctagatgtaggatcaggtcatctgcaaacgaagataatttgactacctttatctctattagaactactctttatttcttcctctgccctgattatcctggccaaggccttctgatactatattgaa

SEQ ID NO: 725270 - DNA, 328 bp, Homo sapiens
  misc_feature (104)..(104): n is a, c, g, or t
gggggggggggggggaccccgggaaatatttttttccttgggggggaggggttttttttttttccccgcccccccccttcccctttgccggggtgggggttttnaccccccgggggtggggggggacccccccggggttttcccccccctttttaaggggggggttttgggggtttttttccccccccggggtccgggtttccccccgggtttttttggtttttttttcccgggggggggtttttttttggttggggggctttgggtccccttttttgggggggcccttttttttccccggggggggggtttttttttttccccccca

SEQ ID NO: 725271 - DNA, 118 bp, Homo sapiens
catgcagcagcaggtctgtaaagtccacagtattctgaagtgctgcggggatagaacccggctctagggcttcaggagggatctctcagttggcattagcactgtgctgaagctgcca

SEQ ID NO: 725272 - DNA, 553 bp, Homo sapiens
tgacatttgtcgtgcatcagggagaaatgcatgggacacacagtcctccactccactcccatctctgctcatcctcccgttcgcttcaggcactcttagcattgtttgtttacccatttctgatactacatacatccatgctgaagatttgccatattactattttggaaacattgagtgatagaactcctagaaaatttgcaaagaaatgttgacatagcgtgtatatcaaaaatctcagattctagtgttgaaaaagtagacactatagctattgactattacttataacctgactgccatagaaaaaaataagtgtattcatgacaagatttacattctggatacataaataaaagaaaaaagggcaacattttacggagtaagtcatggtagtcattagatgatattacatgaacaagttcttaatatgaaaatacttcaacaggaagtaaaggtcatggcttagctgaaggaaatgctccaaaaattggactgtgtaaagcatcagtacaataatacgctgtgtatgtatgtgtatataaaatgagag

SEQ ID NO: 725273 - DNA, 201 bp, Homo sapiens
ctacgtccatgtgttactagcactctacataaacttggggcactttacagacttcaaggcacatttgaagctgcagaaatgttagaagaagctggtatgagtgtctcgtagacagggtcgtgagaatgttcacgaacagaggttggcagaagtgctcaaggaccctgagaacatggctaagcgcaagagccgtgagagtct

SEQ ID NO: 725274 - DNA, 105 bp, Homo sapiens
ctcagagagactcagaagaaagattgcagccctcagaatgcacgttatgaggaaggcagaatgtggtgtccgtaattcctccgtgtcccttctccccctctgcaa

SEQ ID NO: 725275 - DNA, 258 bp, Homo sapiens
aggtcgtatctacaggatcccccgttatagcacgtggtccgcattttatagatgagatagctgagcgctaccgggagaaggatctggcccaagattgtattcttagaccgctacatcttatgactctgtttcctggcttgctttgacttttgggggagttctgttccttctgggtttgcctgcttcacgtcttatgcatcgcacatcgccattttattatcttgtaacggcctttttgactacttttttatcttgtgt

SEQ ID NO: 725276 - DNA, 125 bp, Homo sapiens
aactcgaggatccccaggcgcttgttggcgtcccaagagtcccagtcaggacacaggccgggcacagttgtccaccagtgcgccagtgccctgccgctctgccgtcccggctgaagttggtgatg

SEQ ID NO: 725277 - DNA, 344 bp, Homo sapiens
  misc_feature (13)..(13): n is a, c, g, or t
cagaaatttaaanaatctttcgaatttatgaaaatttaaaaaatctttcaaatttatgaaaatagggacatagcttacccaagattcctgggatgcagctaaaacagtgtcaagaagaaagtgtatatcactaaacgcattcatcaaaaagtcagacctcaagttaattaatttggtacataaaggaactagaaaaccaaccaacctcaaagcttgcagaagcaagtaacttaaattggagaacttaatgaaattgagatgcaaaaatctatacaaaagatgaataaaaccaagagtagcttctgtgaaatagttaaacaagattgatagactgctagctagat

SEQ ID NO: 725278 - DNA, 238 bp, Homo sapiens
acaggcctgtaatccacagcgtactcaggaggccagaggagggcagatcacttgaggtcgcgagtttggagaccagcctggccaaaacgacaaaacaccttctctactgaaaatacaaaaatgaaccaggcatagatggtacatgcctgtaaatcccagaccaccgagaaggctgaagtgggagaatagcttgaacccaggatggggaggttgcagtgagtcaaagaccaagccatag

SEQ ID NO: 725279 - DNA, 818 bp, Homo sapiens
tccttcgttataggagccaggcctacaccccagcaaccatgtccaatgggacctgcagttggtatatgatcttgtgcaccacctactcttgtgtggtgtgttttccagcacggaaaagtcgagataatatgccaatgatcagggaaaccgaaccactccaatgctatgtcgcctttactggacactgaacgtgttgatcggtgatgcctgcaaagaatcaatgttgcaatgaaccccaccaacacagttttttgatgccaaactgtctgattggacgcagattattgatgatgctgttgtccagtcttgatatgaaacattggacctttatggtggtgaattgatgctggcaggcccaaggtccaagtagaatacaaggtgagagaccaaaatgcttctatccagaggaggtgtctaactatggttcttgacaaagatgacaggaaattgcagaagcctaccttgtggacgactgttaccaactgctgtggtcacagtgcccagctataataataatgacctctcaggcgtcaaggactaacaaaagatgctggcactattgctggtctccaatgtacttagaattaatacatgagaccaacatggctggcggcaaaaagctaacgggataaaccacaagggtggagccgaaagaaacgtggccatcctgcactgggagggggcaccaggtgagaatcaaacaaaagaaaggaaacccagcggcaccccacaatggaaacccccgcgagagacagagaacacagcgacacaaagccaaaacagaaaaagagaaaggaagaagaacaaccacgcaaggc

SEQ ID NO: 725280 - DNA, 375 bp, Homo sapiens
  misc_feature (18)..(18): n is a, c, g, or t
  misc_feature (25)..(25): n is a, c, g, or t
  misc_feature (28)..(28): n is a, c, g, or t
  misc_feature (83)..(83): n is a, c, g, or t
  misc_feature (86)..(86): n is a, c, g, or t
  misc_feature (99)..(99): n is a, c, g, or t
  misc_feature (124)..(124): n is a, c, g, or t
  misc_feature (156)..(156): n is a, c, g, or t
  misc_feature (208)..(208): n is a, c, g, or t
  misc_feature (226)..(226): n is a, c, g, or t
  misc_feature (271)..(271): n is a, c, g, or t
ccagggttaggaaccgtngcattgntgngccccaaggctgttgacccaggtgcgtaagccaagccaacacgtgtgaggcgtcnagngcaccctgctgcngaataacgagggatcactgctggcntactctggttacggggacacgtgacgcccggntcaccgcgtgccatagccagtaacatctgggccgcctacgaccggaacgganaccaagcgtttaatgaanacaatctcaaattcatcctcatggactgcatggagggccgtgtanccatcacccgagtggccaaccttctgcttgtgtatgtatgccaaggataccggtgggcttttggaatgctcaaggccaaaggccaggctttggttgcaggtacc

SEQ ID NO: 725281 - DNA, 220 bp, Homo sapiens
  misc_feature (92)..(92): n is a, c, g, or t
  misc_feature (183)..(183): n is a, c, g, or t
acgagtgagactctgctcccaaaataaatagtaataaatagcccagataagaagccctataataaacttactgaatgttgggaatatcactnggataaacattctggcctttgttcttaggttttcccatggcctttcctgatctagacaacatgaagcctagctttctcccattatcctacnagccatacttgtgactttaataacaaatacccccgag

SEQ ID NO: 725282 - DNA, 361 bp, Homo sapiens
tagctgttctagaggatcccagctcaggcgagctgcgagtgggcgaggttcttggcagtgtcagcaggtcatgcccaggccaccaacgtggttcctcccccaggaacgcgtgtccttgtacagctgctgcaggcgggagctgagctcactgatcacagttggtttgtcgtcttcaggcccagggagcccccggctctccacggggtccccccatagcttggaccttctctggaagaggtagcgagggcgggcaggcccggctggcagaggccagcccggcagaggcggcgtgctgctgctgggccatgagctcgctgtccgaggactgcttcagcaggctcgcccctgagttgggtaccga

SEQ ID NO: 725283 - DNA, 320 bp, Homo sapiens
ttaaagctcccctctgacatccggactgtttcttctcaaataacaaatactatcctccatctcagtcatatacctatcatctctccctcactaaaacgtaagacagtaaccacgtccgcggtgatgtctcacggacgataaatcgagaacggatcagaggtctatcctagatgtaggtggatttccccccctgtggtgaacaggaaaagttggcgccagtcctttcatgtgattaaggatgacatggatggagcgtggtggagggtagtgtgagaaaaagaatgtatatatttgtgtgtgcccgtaagacataaccgcgg

SEQ ID NO: 725284 - DNA, 741 bp, Homo sapiens
gtgggctctatgcttgtgctgtgcgtaactcagtccaccggcaaggtaaagctccaaatccatcatagtcaaagtctctgaactggagtgattacccatgaattctactgtaggttcccccgaagttccgatgtttcatcacgccatggagagtcgacagaaccagcgaagaggcactcgtgttgccagaagcccgtatacaccgtgggaggctggagcaacgtcgatggtaaatttgcatgggagaaatccgttgttacctggacatgtgagccagctcaggaactcatcgcaaaatgttgcggactagccattaactaagcgagacttatctcaatactgtaaaccgaggtatatagtacagtgtgatgacttcggcattgtggagcagttttgccaagggatgtcgagagacatagagctccccatcatagataaggctcccagcccatcttgagctgtccttgcgtcatgcgctgcctcatttcagcgttggacaggataatgcaagtcagtgagaagtttcactagtgtagatagacttctggagggtaacgaacagagtgtctggatatgtggatcatcaatcgtcgaaaacttgtacgtaactatctcagggtgaaatgtgggtctctcctatcttgcagtacatgggctctccatatagtaatatgatcgacagagatattgctgtgtgtttgcagagaagatggtttctataaagagtaggaaagtgaaata

SEQ ID NO: 725285 - DNA, 467 bp, Homo sapiens
gcctttttcttgtgtaaaaggaaagtattaatatatgttcaagaaaataacatacataaatgaaagcaagatgtttattcactcacacatagcttttcagaaataagactaaatgtgtcataataaaaattctggcatgtatctaatcagtgatattttgcacttgtggtagttaaaaaaaagatgtcacatagctattttacagctatagatgtgatctggtttgataaacatttattattttctttccactctattgccataactaaggacaaagttgtcacatagaacttggagagatgggcttttattatctctgagcatctattctaagtgttgcatgcttggccaattggtcagcatggctctagaggcagtaacataagccattttcataaccatctcctttcataacaggaaaggaattggaaaagggagagtttgtttgcccttaaagtaaaaaaaaa

SEQ ID NO: 725286 - DNA, 383 bp, Homo sapiens
  misc_feature (168)..(168): n is a, c, g, or t
ttccggacaaccgtgcgcttagtaagatggggcgcgcgggggagaagggctgccccgggccctctggttctcggtcccccggcccaaggaccgggttccccggcttcccccccccgggcggcccaactgcgccggctccccccagggaaaccctggtactccgggggntcgccgggcttctctcctggcctccggtcccgccagacacctcgagctccttaagtagctcggtccttgacgtccctctgggcccttcccgcgtctatcgcctgagtccccgggcccctctagccctctgttcccgtcccactcttttgttcctccctagagccccgccgccctcagggctgacagtgtggacggcgggagtctcctcgctcccc

SEQ ID NO: 725287 - DNA, 803 bp, Homo sapiens
  misc_feature (520)..(520): n is a, c, g, or t
  misc_feature (558)..(559): n is a, c, g, or t
cttcactgcagaaacagtatctcacttggccatggctgtggatggaacatctttaaaaagtctctcctataaatttatggcccctggctagcactctccatcacaggtatagggccaaagttcatattatttacatgttcaaaagaactgcaaactgtgacttttaattgcaagcatatctggagctatagtgcccccaggcctctggtagaaagaaatgtatgtccttgcaggaggaacccccaacccaggcctcaaggaattccagccagcaggatccctagactataagctcatagtggaaaatcacagcacacacaagagaaggggcctcagaagttatggccaaaagaagcacacctgcaaagactcagatgttagaataggaaatgcaaatatgtttaatgtgtttgaagaaacaaaggagaagctaaaaagcataaataagcaagagagtatcagaggctaagcagataataaatgaaccaaatagaacctctaaaaatgaaaaatgtaatanttgaaattcaaaacttaatggaagtaatcttgatcccnncctcacaccccatagaaaattaactcaatgaatcatagacccaaacattgaaattcacaactatgaaacataggaaacaaagttttgtgactattgggttaagttaaacattcttagatatgacaccaaaaatagagcctataaaggaaaaacaatggcaagtcatacttttattaaaattaaaccttcttgctattgtgaaaaccattgtttagagaatgacaaagacagttaccaggagaca

SEQ ID NO: 725288 - DNA, 371 bp, Homo sapiens
tacagacatatataaatagtaagaacagtacaaagcttataactaaaatagagagatggagcaggagaaagggagagaacgcacatacgggaacgagtactcaaactaatgctcagaaccggtgtacagtgccatagaaaccactttcccaaatggaggcgcctttccttccctggggatcgtggcagagggagtgaccgccaccgccaccatgcctgctgcactccctctccgtcccactttccatttctcattcttttatcatcagcatggcatcttggacatccggcaattatcactcatccacctcatcgttctttcatcaagtagatagttaaatcattaaagacaacaggagtcatcaggggtca

SEQ ID NO: 725289 - DNA, 381 bp, Homo sapiens
gaagccctggaagaaaccagaggcttctggaggaaaaaggaccctgtacccctgttcaaggtctacgtagaggagctggtccagcggcttcaggagcaggttctgtccaggcccgcagtggtgcagaagagagccggtgaccacgcctgagcactgggctcagcctcccctgtgggcagtgggcgaaccccacttggcatgtgccgagcacacagttcctgtggtagacttttcagagaacccttctgtgccaggactcgtggaagcctggagcggagcagatgcctgtccaagctggtcaagtccttctagttcttgggctgaaataagtaacagtctgaggcagcctgcgccacagtaaagtgtgttggtttgcttgga

SEQ ID NO: 725290 - DNA, 659 bp, Homo sapiens
gcactgaagaaagcaggacgtgagtcttaaggacatggattggtagaggtgaatgaagcttttgctccccagtacttggactgttgagaggagttcggatcttgacataagtaaaaccaatgtgaatggaggagccatagcttggggtcacccacgtgggaaggatctaggatcgaatgaattactgtcacgaccttggttcacggaatttaaggcgtcgaggtggaaaatatgccgttggatcagcttgtcatgtgaggtggcctaaggtattgcgtgtcgatcatttcatgagcactagcctgaagagaccagatgagctcaactgtgatcccatccttacatctacttggccatggtccaacgagttaaatagcaagtgaccttcaggagcagctgccacaactgggccatgccctgccattgaaacagtgattgagtctgatcaagccatggtgacacatagagaatgcatcgatgcagtgaagtaggagcccatgcgtagaaggtacattctctcgagattcgaacgcagtgaacactatgagtgtatttctgagctgaaaactcaagtataggaagacattaacaagaaatcgtattcttggccaagtaaccaccacttcgtgccttagagtggatatgattatgggggaatc

SEQ ID NO: 725291 - DNA, 901 bp, Homo sapiens
gtttgggcacctgtatttccagctactcgggaggctgaggcaggagaatctcttgaactcaggaggcagaggttgcagtgacccgagatcgcaccattgcactccagcctgggcaacagagcgagactccgtctgaaaaaaaaaaaaaggagaaggctgccgggctctgctcaggtgacgggtctgaaaggcggctctgagaaatagctggtcctccgggccaagagcgggcctgggccccggggcagccacacagcagggttctggtgtttcaggatgaagactccggggaaggttgacagcgacgtgggctgacgacgtgcctggtggcccaggagaccgtgcaggtcattcctgggcagcaagctggctcgggaggatcaacacccgggccccccaactctggcccagatgtataatttcaccgagtttcactggtgagcctcaacgagctgggagacaggcatggagaagacccttgccacccagggactggccgccttgcgccctgacatccggcgggcatgggagaatgggcaacatgggatctgggccagccaggagaaggagcggctggaggagaagcagagagattcacggagggagcgggccaatggaggaggcagagtggcagacgaggtggttctacccagggtattaacccctacactgggacccccgacgtggttgtatgcggggatcacttgacgacggatttctccgaatggccaggtttttactgggggccctggatgcgcctggggcccggaaccgctacgttgataaggttggcattctccgagtggccgtggtagccctgtcacgggcacccaatttttacgatggtccgggagaaggtaccctggtaggggttcccatacggtcgtgcgaccatcctgtg

SEQ ID NO: 725292 - DNA, 1237 bp, Homo sapiens
  misc_feature (1237)..(1237): n is a, c, g, or t
cagacactcatccgcgagcagatcgcctgaaggcgtccgagcaccgtcagaccgtcttggagtccatcaggacggctggcaccttgctttgggcgaaggattccgctgccttcgctgacagaccgggcacaaagctgacagccacggtgcgctgggctgacgctgctggctgctcgcgcggctctactcagccaagaactgcgacagcccgtcactggccgccttcactcgaggctcggctggggaagccgtccctagctgacgggcagacgtcccgcatcacggctgctgcgcaggcggctgcggccaccccactccacggtcacgccggcggcctcctcagctcgaccccaggacgtgcctggcagggctgtagtgcttacgtcccagccttgcacacgcacggcgtgccgccgacatcgccactagcaaccaggaacacccaacgacacgaaccgggggcctgtaccaggcaccatcctgctgtattgggccaccaggccaccgcgcaccgacgcctgtttgcccacggacacctcgcccttgccactcaggcatggacctacgcccatcatgcccggccgggcacgctggccccccatggcgccgcgaacggcgtgcccgccattgcccacgctcttcgactgggccaattaccagccggcgcggcctccttgctcttcatggcatgaagccagacgcccttccttcggaagcgagccattgagcgcagattaagcaaggaacttcagagccacattgaaggcttcttgtacacatggggccaacacagcacaaatcatgctggtcctgggccagcatttggcttgcacaatttgaatggggccctaaaacaggcccgctatgacttgaagggctccacttggaaactggccgacacacgagagagcgaacccgcccctggatagagcactgcggctttttacgagcagcgggtgtatataagccggcctccaaaaacagaacaaggggcccttagacggcgcccatattaacaccgacaggaagatccagagccgatccgcagcagagcagagtacgttgcgagaagacgcgcagcgacgtagtcgacgagcagttccacaaatagagccacacgagacaatagcaactctgctacactacaccccaagacacgaagcagcggaggacggcctactacacacagaagcatctacattagcacatagaatcaagacatagcgagtcgcaagtn

SEQ ID NO: 725293 - DNA, 210 bp, Homo sapiens
cccggaggcttggatggccggaaggctagagattatgaaagagatttgggagacaacacaattcaagataatgtccctcctatacttacattaagaggctgtgatggttggcatgaagaagttagacatgagtcatttagaatacacactgaggggggccattcaacgcctccgggccattcaatgcctccgggccatcaacgcctcctg

SEQ ID NO: 725294 - DNA, 735 bp, Homo sapiens
tggcttggtgttctcctctctccgccatgccgtgtgctcgcccactgatatcggtgtactccgaacaaggggtgaacgcacatctgccagaaaattgtcacttggcctatctgctattcaaggctcccaaatacggaccgagctatgggctgaacacttgggtccacacacacaactctttgtccgccaagatacacaaccaggatcacgccttaatggcttagtacatcgttgaaattacaggcaggctccattcagaactaacttagctggaggctcctgtggggggtaactgggccagaaagttttgtcgcgcctccgaattttcccccaagaaaagttcccggaagggcatggcctatggcgggcacctttccacgctcgacattcttggggcccccagattgaatgtgccaatttgaggggcacaaaccctctattgtattatctcgaataggtcatgtcccccggcaactattgtttcgaggcacacccaacactcccaatcacacttccctgttggggcgttcccgcgatatggctccatattccggtataagacacgtcttgcacacccataccgaaacgtctccgaaaagaaaacagcactgcacttagcggtgcccgaagatcgctttgtgttgtacgttgggcgcccacagtgggcactttggtcccccattctaagccccccctataaccccgaacgacgagcatgtggcagcataccaaatg

SEQ ID NO: 725295 - DNA, 131 bp, Homo sapiens
ctgaaactccagtttttatatgtgctacggcggggctgaaggatctgctcagcgtcttccaggcctaccagctacccgctgatgactacaccagtctgatgcctgttggtgacccccaatccatcacaata

SEQ ID NO: 725296 - DNA, 519 bp, Homo sapiens
cgcggagttcaagatgatgtatacggtgtggtgtgtcatagctgtgtcttgtattgaggtatgtcctttaatactactttattgagttttaacatgaagctatgttgaattttatcaaaagccttttctgcagctactgagatgatcacgtggtttttgtctttagttctgtttatgtgtttaatccatcttgaattgattttagtagaaggtgtgaggaagggatccagtttcagctttctacatatggctagccagttttctcagcaccatttattaaatagggaatcctttccccattgcttgtttttctcaggttagtcaaagatcagatagttgtagatatgcagcgttatttgtgagggctctgttctgttccattgatctatatctctgttttggtaccagtaccatgctgttttggttactgtagccttgtagtgtagtttgaagtcaggtagtgtgatgcctccagctttgttcttttggcttaggattgacttggtgatgcgggctctt

SEQ ID NO: 725297 - DNA, 391 bp, Homo sapiens
gctcacatttttagttttaagtatgcctgcctatgcttcataatactagatactataagaaagaaattactggaattctgttcctaataaatatggtgaggagttctgtaagctttggacttccacataatgctaactaaaggaataattttgttatagtatctattaaaattccttcctcgagagactgtcagtgcgcatatgggttaaacacgaagtgcaagtcagccgggcatggtggcgcatgcctgtagtctcagctacttgggaggccaagacgggaggattgcttgggtccgggagttcaaggatgcagtgacctatgatcatgccactatactcgagcctgagtgacagggtgagaccttgtctcaaaaaaaaattaaaaaaa

SEQ ID NO: 725298 - DNA, 449 bp, Homo sapiens
  misc_feature (4)..(4): n is a, c, g, or t
  misc_feature (122)..(122): n is a, c, g, or t
  misc_feature (206)..(206): n is a, c, g, or t
  misc_feature (211)..(211): n is a, c, g, or t
  misc_feature (214)..(214): n is a, c, g, or t
  misc_feature (253)..(254): n is a, c, g, or t
  misc_feature (260)..(261): n is a, c, g, or t
  misc_feature (263)..(263): n is a, c, g, or t
  misc_feature (268)..(269): n is a, c, g, or t
  misc_feature (271)..(271): n is a, c, g, or t
  misc_feature (275)..(275): n is a, c, g, or t
  misc_feature (278)..(278): n is a, c, g, or t
  misc_feature (292)..(292): n is a, c, g, or t
  misc_feature (297)..(297): n is a, c, g, or t
  misc_feature (303)..(303): n is a, c, g, or t
  misc_feature (306)..(306): n is a, c, g, or t
  misc_feature (315)..(315): n is a, c, g, or t
  misc_feature (318)..(318): n is a, c, g, or t
  misc_feature (322)..(322): n is a, c, g, or t
  misc_feature (341)..(342): n is a, c, g, or t
  misc_feature (360)..(360): n is a, c, g, or t
  misc_feature (369)..(370): n is a, c, g, or t
  misc_feature (436)..(436): n is a, c, g, or t
aaangattgcagaatttattctgaaattacttaaaattactgtatgcataaacttacaaaaacatatgctataccaaggcagagaaaagaaaaaaagtgaagtggctacaaacgtccctggngcatcacctgctcacctaggaaccaggagtactggatactgttccgttactggtaacctatctggatgtaaaggttcataagtnacaangcntttcttgtttaaaaaaaaaaaaaagtctgtcctttacannccaaanntnaaacnncnacanatnctctttgggctttnagggncactangtnactccattnggntganaccaactaagatacaattnnggggatcataatcttttnatgaaattnnagcagaaaactgtccaggaaaatcagacttcaaagttggtgcaacttagctgatctcatgaaaatnctttggaatcttc

SEQ ID NO: 725299 - DNA, 84 bp, Homo sapiens
gttaaggattggaaaagtctaattttatttttagaaaaaagggaaataaatttgtttttgcttgattaaaaaagctttttccta

SEQ ID NO: 725300 - DNA, 731 bp, Homo sapiens
actgccgtttcctcatctgtggcgcactgactgactggtctgctggtctgctgcagtcctgaggctgcacctggctgctacttctgtgtgtgcacctgagtgacctgcctgtcctgcttcgctgcagacggtgtcccccgccgagaagtggatgctgtgcacatctgccatgcaccctcagtgtcaacatcttacatgctgtcaccctgtaatgctgctactgcgcaccttgagctgctgctgtgcctgtgccgactgagatctgcctgttgtgacctgctgactgtgccctgtgtgtgctgtcgactcgcttcatcaccctcgccttccatgtgaccatgctgctacatgcgtgcatgacctgcctgaccacctgcttcctgctgccactgactgtggctgcctgtgctggctgctgcccctgatgcctgtgccagctgtgctacacagcttgtgcatgttcctgctcctgtgcaatggttggccttcctgctgacttgctgagggcctgttacctggctgcctgtctgtgtggcccatgctggcactgctcaatggctgggcaagtgccaccaatgtgtgtgtgcaatggacgatgctcttttgctctggagcatgatgctagcgcccagtgtctgtgcttgcagtgctggcctactgagacggaactgtgtccacgcgccagggtatggacctgtcttgccaatcaggacgaggaagacctgacagga

SEQ ID NO: 725301 - DNA, 293 bp, Homo sapiens
tctgttccgcacttaacacgtattaccctgcattgtacaccatatgaaacatcctatcatcagtatgctcatccatttctctaacagcagtaatattaataatttacatgatttgataagccttcgcttcgaatcgcacatgtcctaatagtagaagaaccctccataaacctggagtgactatatggatgccgcccaccctacctgggttaggtctacctggcaggtagacctaaattaatctgcatgaaaagacaaatcacgatggttggggggaaaacttataccaaaga

SEQ ID NO: 725302 - DNA, 244 bp, Homo sapiens
tatcccccccctcacaggatactcaattcatagatatagcgccgtctagtgatccacattcgattccctggagctacttggcatcacgcttcttgtctcccgctatcaaccttgagatctctccgggggttgccgatagactgtgaccgcctcccaggcgctgtccaggtcaaatttgcggaactctcgggccaactccaccggctctcgccatcaccccgcttcacttcatcatcattcacgt

SEQ ID NO: 725303 - DNA, 135 bp, Homo sapiens
agaagagcggggtcggggccggctgaccaggaacctgggcgagcagcggcgggggcccagggattctgaggaagatttccattaggtaattttgtttattcagttcagcgaaattagggaaaaatggatttggaa

SEQ ID NO: 725304 - DNA, 366 bp, Homo sapiens
  misc_feature (148)..(148): n is a, c, g, or t
  misc_feature (338)..(338): n is a, c, g, or t
  misc_feature (363)..(363): n is a, c, g, or t
ttcttgctctgttgcccaggctagagtgcagaccatagctcactgcagtcttgaccttccgggctcaagtgatacttctgtctcggcctcctgagtaactggaaacacaggtgtatgccaccatgccctgctaatttttttaattttnatttttgtagagacaagttctccccatgttgcctaggctagtctcgaactcctggggctcaagggatcttcctgtctcaacctccgtaagtgttggggattacaggtgtggggcttaccatgccttaaccttgtttatttatggaaggatgggggtctttgctatgttggcacaggctgggccttcaaantcctggggcttctagttaattcctnttt

SEQ ID NO: 725305 - DNA, 525 bp, Homo sapiens
gatctcacccactggtgctgctggtcctgagaagaggatggagaagaagacggagcagcagcggcggcgggagaaagctgctcgcaagctgcgggtgcagcaggctgcactgagggcagcccggcttcagcaccaagaacttttcaggctgcgtgggatcaatgcccaggtggcccgaaggctggcagaactggcacgccggagggagcagcggcgcatacggcgactggcagaggctgacaagccccgaaggctgggacggctcaagtaccaggctcctgacattgatgtgcagctcagctctgagttgtctggctcactcaggacactgaagccagaaggtcacattctccgagacaggttcaagagcttccagaagagaaatatgattgagccccgagaacgagccaagttcaagcgcaaatacaaagtgaagctggtggagaagcgggcctaccgtgagattcagttgtagctgtgcagatgtcggagccccgcccctcaataaagttctgtgaccaaaaa

SEQ ID NO: 725306 - DNA, 981 bp, Homo sapiens
  misc_feature (5)..(5): n is a, c, g, or t
  misc_feature (507)..(507): n is a, c, g, or t
  misc_feature (981)..(981): n is a, c, g, or t
ggcgnatttttgtggcatccggcgtcgttcgtccaacggggagggcgacgcgtctactaaacagaggacagaaggagccgttatttttacatcttccctcggcggccggcgtggcgcgggagccggccgcgtctgcgcggcgccgattgagatagcgcgagaacgaacacacgagtcttagcccgagcgggcgagctccacgcggagatgccgttagtggcgttggtgcgcagggtgccgagttgtggtaggggcggggcgttcctcgtgtcgtcttcccttcttgcagtttttgttttctttatattatttaataatcttatctagtgttatattatttctgtggtctctaacgcttttgatttattcatgtttaatgtgatttttggttgttctgggtgcggtcgttgttgcgtcggtggtactgctgtgcttacacatcacatctccttctctcatactagacacctccgagcgccgcttcgtagactcatcacactgtcgcgnaccgcagtcttaccggcggtcagcaagacaggtaaactaaactcgacactcgacctcttatccaatctgcactcaatcgcctactcactactcataatgattgatgaatcacgcactcaacatatgatcacccaacaccgaacctctttacctgtcactgccgcaacactatcacaatctatagtaccacattgctagatatgtcgtgcctcgcactggcgttcactcactgcacgtcggctctcgattcccgtcatcgcggtgcgctagcactctatcttatcttgtattaatgtctgcactctcttgtttgctccctattgtatagtagagtccgcgctgcgcggcgcgtcgatcgggtgaagtgtaggtggtgagcgacatgtttctgttctgccgtgtatctatatgtagccacttctgaagtcgatatggtcacgggagcccagcgggtctcgccgcagcgcagcggcn

SEQ ID NO: 725307 - DNA, 197 bp, Homo sapiens
  misc_feature (1)..(1): n is a, c, g, or t
ngggacgctgaaagcgtccactgcacgcacagcctccactgcacgcccagcctccactgcacgcccagcctccactgcacgcccagcctccactgcacgcccagcctccccatgtagctaggcattacatgtgtgctgtgacactatgcccagctgactttaattttttttttttgggaggcggggggtgcaggggt

SEQ ID NO: 725308 - DNA, 324 bp, Homo sapiens
gacaatcttgcacacacgaagaacagtgtaaattaaaaccaaaccaaaggctgggtgtggcggctatgctgtaatcccagcactttgggaggctgaggtgggcagattgcttgagattaggagtttgagcctgggcaacatagtgaaaccctgtctttataaaaaatacaaaaattagccagacatagtggtgcacatctgtagttccagctactcaggaggctgaggtaggaggattgcttgagccagggaggtggaggttgcagtgagctgaaattgcaccactgcactccatcctgggtgacagaacaagaccctgtctca

SEQ ID NO: 725309 - DNA, 450 bp, Homo sapiens
ccccccagtactgctgggttgaaccttggtcgtgagctggctgcgtgccgttgggtacgaataccagcatctcataatctggtcacttccagatatggaagagtatacaattgaatatattatgtcactatttcgtcttctctttatagtatcgtatcgtatgactgggacaggttgcctttcccgaccctgctacgctggctggtgcccgcacaatacctccactgtcatggtttgtcactgcatggtccgtcggggttgtggtcaccggcgcagaggacatgcacacggccacgctacgctactgttaccaagaggtgacttcagtcactttattatgtcaataggttacacatctaccttctgaatattatcacatacaatgacttataatgtgactacctgcgtatcagcaagccaagtacagtcaaggttgctacgggggtaccg

SEQ ID NO: 725310 - DNA, 161 bp, Homo sapiens
gggaatgtcaaaacgagaggatcactgtagcccaggcgttagagaccagcctggcgacatcgtgagacttcgcctctataaaaaaatagaattagccagctgtggtggtgcacacctgatagatcccaggctacttgaggggtctgacggtgagatggact

SEQ ID NO: 725311 - DNA, 248 bp, Homo sapiens
gggagcatctgaagcgcgaaccgcagctggtggagggcgcgatcgaggagagcctgcgtttcgacccgccggtgcttggccatttccgcaccagcctgcaacccaccagtctgcacggcgaagccttgccgaaccgggccaagctgatgttctccatggtgggggccaaccgcgatccggacctgttccctgatcccgacgtgttcaaggtggatcgtccggcgaacgaggcccgtaagcacctgtcc

SEQ ID NO: 725312 - DNA, 776 bp, Homo sapiens
  misc_feature (533)..(533): n is a, c, g, or t
agcggattggtccgaccgatcccgcctccctccggatcgccgttccgggtgcactcggactcggtccgaaattgcagagctctgtggtaagcttagcgccgtcgtcgatctcgccattcagatcgtccagtcgattgatatatctaccgggtaccgtctatcgagcgcatgcatgaccatagttctccgcacatctacaagatcctgaggatatacgcctgaaccgggttgtcgccgtggaggtggaggggaagatggtcgggaggacgatgaaggtcacagttgtagtgactcagctcattggtggatatgctcgtcctgctgaagagacccgagggcgatagtgtaccccaaataggcacaagtaatcactggtgtctattttgtcttttaaccatcaccttgcgagtgaagacatagttttcctcaacatagaagcctactagactgtactagtctacaagattgacatagataatcactcatacacgtggaaacttggaatgaacacgagagccagaaaggagtaaaanccttttaatggacaggggtctgcaagaacaaatcgagggacatccttgattaactttacagagaaacttaccagatatctgttgatgggtgaataatatgacatggcagatggcatggttggctctaattgggcactaccgctgagtgatggtgtagacgcccatatatgattctctgtatggatggtgtaggtaagatggaaatggtgttaagggaatgtggcatgtatgtgttgtgatcga

SEQ ID NO: 725313 - DNA, 164 bp, Homo sapiens
  misc_feature (73)..(73): n is a, c, g, or t
  misc_feature (88)..(88): n is a, c, g, or t
gcggctgcaggcggccttggccaggccggcgccggggggctgcagccaagaagcgtttcgttttcaagacccngggaaaggatgcttnttcgtctaccaaagtagacgcggctccttgcatccccccgcagttgaaagcatacagggctccccgctgcccaaga

SEQ ID NO: 725314 - DNA, 103 bp, Homo sapiens
  misc_feature (79)..(79): n is a, c, g, or t
  misc_feature (87)..(87): n is a, c, g, or t
taactttcattcagtttcgttgaaactgttcgtttctttacagatttaacctttacatatttcgtttgaaatgctttgngagagatntgaccctcccttcatt

SEQ ID NO: 725315 - DNA, 1549 bp, Homo sapiens
ggatgttgtccgcgcgactttccggcttcaaccagggcttggacgagaaccctgtgcgctctttaccataatccgtgccgtggtggcgttatcacatggcctcaggccatctctgtagcgggaccactcgcgtagcacttgaggacggacgcccgagctggtctagaggcgtcgccctccatcgccgatcggcgccctgtctctctgttaaggtgctgtcgagcagtcgcacagaggcggagatatgacacgtcgcaagcgatggcagcaccatgcgtaaccccaccctaggcgcaccgtccaacagtggcttgttgagtccaagtccagcttcaaggactccacataactcgcgcattggtcccttaagccgtcccttcacatgagcggtattggaacacatcgttcccaagtgggttctctcaccttgacctattcggaaccttggcgcactagaacttgattgtgcctattggccacacgccactaggtttctaggcttgaacactcacttttctcttgtttagcgaccagcaaaaatagctttgcactcgttaatgataagctagccgaggcacacactatcgcgcctcgggaaggaaataggccttgcgattgccccaaggaatttgccgggggaagaaaccaggagggctaggggtagagttgcacgggagggtaggcttcgctctcttccacgatccattacctccattgtggacaaaaaatcctcaaccaacttgtagttttggagttcggaaccgtggcgcgcaaggcacgcccgcgagcccttggcagactttggccgacacttcgaggtacacggtggctttgcccaatgttatcaactccccttttttggcggtatcgcgaggagacaccaggtaggattgtaactcattaccaagtcctgcgataccctaacgcttggggcgaacacactgtgtgccaccccaagaaagcccttcgcgagcgccaaacgttcgtagcactgaggaaagacaaatttgcagcacgccgcagccagaggtatagtggatggggtagaaccctcgtttcccaattgtttggaatcgaacgacgcaaattatataaccccctttgcaataattcgaacgccatggggttgaagactagtgagcccatgtctcaagcacgcaaaagtttagggagtttgaacggcacaccaagggttgaaagcgccatagaaggttgtgcgccagcccaccacgatagttgcgttgaaggtcggcccctctggtaacaatttcttgggtccatttgttgtccggggacacgtaactcctttcgtttgaggaaagtcaaggtaccagcgaccgcttgtggggaacgcaccacggtggcactacagatggaaagaagcatcgttaagaggccctttgtggtgaccgttaaatttttaccccgccacattagagctcgctcctggagcgctgtaacagattacgccctggtggctgtccaccccaaaagggccagggcctggcattgcgcaattgttaatggggggcttacccctataaacgga

SEQ ID NO: 725316 - DNA, 1053 bp, Homo sapiens
gagccctactgttctagtcctaccacgaggatattacctctcatccagcaccttccccttagtgagcgtactccggggcaccgcttggaccaaagagcaaggcagaatgtgagattctgatgatggtgggcctgcctgctgctggcaagaccacactgggccatacaaacatgcagcctccaacccttccaagcaagtacaacatcctgggtaccaatgccatcatggataagatgcgcggtgatgggcctacaccggcagcggaactatgctggccgctgggcatgtcctgatccaccaggccacccagatgcctcaaccgcctcatccagattgctgcccgccacgcaacacgcaactatatcctacatcacacaactgctcctactgcgactcacccacagcacgaaaaatgacaccatctgaacgcttccagcgcaaagctatagctaactcgctcccacctgacgagcgacctaacaagaccgaccaataaagccgaaccgacgaggacagggaaggcatgtcccacactcatgcggctcttagaaaatgaaagcccaaacctacacattgcccacactgtcgaacggacctcccctggcatgcagagtacactgtccactcgacgccattgcaacggccacgaacgaccgacacgcctacctgaaggcaatacaaccaggaaggccacaacggcatagaacacaacccccccatgaaaacgcagtcctgcgacaaccgaaggtcctacgtgcgcctaacagacgcgacaggcgacaaggaaatcgcaatcccacaagacacacacacacaacagacccacctagaagcaacacagggccgccaccacgaaccccagacacaatctaccctctgacagacacacttcccaaccaattaccaatcatactcatcctttcttcatattccacaacacacatcacataaaacatacatactaataccacaaacaatacctaccaccacccaccaacctcaactaactcacctcaactatccctcctactcctcgctatcacactcacataa

SEQ ID NO: 725317 - DNA, 794 bp, Homo sapiens
ggtgtggagttgccttgacctgcagctccgccaccgcggacccgccttctgccctcagcagcagactgctctgtcccgcccgggcagctctgcgaggcagcggctggagagggaaccatggggactgtgcacgcccggagtttggagcctcttccatcaagtggacctgatgttcggaggattacggagaatgaagctgaatatgttgaagtttgagcctgaagctaaacaggaaattcttgaaaacaaagatgtggtatgtatcaaccatgttcatttctgatggacttggaaggactaaagatcgatatcatcgatctgtgaaattgcgcagatgtttgtcaaggccgaaaaacctcaagtgacggtacatgcgcgaaatctcatgaagcccgtgaaaaattgctccgtcttgcgaattatgagaacaagtgagatgttttgatggacacattgtcaaggtgattgacgcacttccaaatgggttagacgttacctttgaagtaactgaatcgaggagattaacgggcagcttataacaccatggttgggaacaatgaaggcagtatggtcacttggcctcaagcttcctaaactcattcgttgggtcgttgcagaatgaggtgaccatatcagcagttcccttatggaacaaagagaaacattcgatatggacttgtaccttctatcaacaccacgtgcccggcaaacttcgaagcgaaatttctcttgtaaacttatataaagttcctggacaggtaccctttggcagctcactgccgggaagacggaca

SEQ ID NO: 725318 - DNA, 201 bp, Homo sapiens
agcagctgttcagggctatagggacaattgattcagggtcttgacagaggactatttgtcctgcccctagtggcccgagatgtgggctcaggagtgacaggtcggtctgtggaggtgggaggctggagctcaggtgctgcgggcacaactgtttcaggagtcttgacagaggaccgattttttcttcccctagtggtccga

SEQ ID NO: 725319 - DNA, 458 bp, Homo sapiens
  misc_feature (220)..(220): n is a, c, g, or t
  misc_feature (274)..(274): n is a, c, g, or t
  misc_feature (387)..(387): n is a, c, g, or t
  misc_feature (392)..(392): n is a, c, g, or t
  misc_feature (403)..(404): n is a, c, g, or t
atgcgcgacgcttccctccatattttcttttaccctggaggccgggaccgccaagaaatgtttcctctccagatccactattaactgaaaattcccgtgctctgaatacttgttttttttttatttttaaaaagggacctgaatttctattaaaggatttcctttattaactcctgctgaagaatttacatattggcaggttggaaagtaagccctgtangaaagaaatcggacttgtttttcatcatcaacatgacggtctgatgatgggtgnatgagtttcctgttgacacccatgtcacatttactgaattactgttgagaccacagggtagacccagcttatacaattcttttgtcttctttctgcttcacagatcattcatnatcanacacggggtannaaatgagggagcgaaacttgtgtaagctaattttcactgttgctggaagcggaa

SEQ ID NO: 725320 - DNA, 106 bp, Homo sapiens
aacatttacatgaggaagaaatgcgaggcttgctcatcgtaggaatgttttaccacatgcctatgttacatattgattacagaataactaatattaaacaagaaag

SEQ ID NO: 725321 - DNA, 210 bp, Homo sapiens
taggaacctattatccggtggcaggtaggcgcctgtgagactgggttgcctctgctgtcgtagaaactttctctcttggtgtgcctagattgatcggtataaggctcactctcccgccccccaaagtgtttgatcgttggaacgagaacagggccatgtccggagtgtatgacaaacatcgggatcctgggacacactttgaaaatgcac

SEQ ID NO: 725322 - DNA, 178 bp, Homo sapiens
ttcgagctcggcaccccttaagtgccctcatcgcgagtcttggctgtgacgaccctgatttttcagtgggacgacgacctggcggcggacgatcctcggcggtgctggcccttatcagcgaggaaaggaacgacattgtcctgactcgacgaccactgtccttgcgtcaccatgctgg

SEQ ID NO: 725323 - DNA, 778 bp, Homo sapiens
  misc_feature (476)..(477): n is a, c, g, or t
acctgtcccaatgggaagcggctggacagcggcacatgcgtgcctgtgccctctcgaacgccccccccagatgctccccgtgcctggaacctgtaacctgcatgtgcttcagacggtggcagcatgtttcctcatatgcacggatggcagccgcaaggtgccgcgtgcctagacctcgcgcttacacggtgctgacgaagctgctgaacgtgtgaccatgtgcatggtgtagctagctggtcgcaaagtggtgggctaccttgtgctgtcctcgcgcacctctgtgcatggcccacggtgctcgtgtgcccgcacgggcgttcacgggtgccccaatatgcggccgcgagcaaggatgtgtgctgtggcgtatctttggtgccacacagagcatgcacactgtcgagcatgttcaatcgctatggtgctagtaccatgcaccctatggttgctcgtgaatgcgcgtaactcctgtnncttccgtaggtgcttgacctgctagcgcaatgtaaccggtgcaagctgcgtcgtgagtcgtactatgtcgagcaatcttttgtgcagcgatgcgcatgaatagagctgcgtgtataggcgtctccgaactaattgaccgcgtagcactttgccgtacgtttgaagcggcatcggacgagttgtgatggtcgaacgaagctgtcagctcggctgtactcgaaagtggcgccctagtgatgtgtctaacgagagcaagagctagggtgatatgtcagcgtgcgaagtggcacggtatttgccg

SEQ ID NO: 725324 - DNA, 146 bp, Homo sapiens
aggagagtcagcggctgcatcctgtcccaggggccctggacacttggacctgagaatgtctacttgcctgctggctctgcttgagtggaaccccacaggctaacagagacagcccgaggacccacctggatgactatgtgaccact

SEQ ID NO: 725325 - DNA, 1653 bp, Homo sapiens
ctggtgctggcatgttgctttgctcttagtttcttacatccatattgtctactgttgtttctctccctgctgtcttctttgttacactttcttcatcttaagtgtgcttcatagtggttgtgttaactcccccaccttgtccacttttttcgtccttcttttaatatgtaatataaattcgtgtcacaactatgccttatatagatagttgtttcatgttttacttataactgtgacaaatgggtgtttctacgtgtgttctaacaattattacgctttcttctctgcccccccctctatgtgtaaacactcgtttcccagctatatggcttcccacatagtcctgttttccaagccttgtccctgttgtgtgtcctactcacccggatgggtatcaatctgcttgttcttttgaactttgttattgccaattgcgtgcaacgcttttcgggctcttcgtaataaaattctctgtcggctgacgtttttttcctgcaagttattaaccctccggtctgtgtgccccaatctgatctgttgcttcataccactccgagattaatatcggccgaggaaacccacgctattaaatctttctgggtacataaaattcatacttgtctgggtggaagcccatcttcgagataaatgtggcacagaatatggttacgctgaggcctcaaattagctttgctgttatagaatctgttggtgctttaacgtatttttattggtgttctgggctcttttgggagccttaaaactcggtggtgtgttcctatccttacgtaaacttttgttaatttcacttgggagacctctctgccaaatacttttttttaagttacttatattcgcctcggtccaatgttttgggccctctttaaattagtcttatgcactctcggttagaaagattacattgttattagtttacggaaaattcgcaagtcatacgaacaattgctctttctttcccgtttgctattattcggcctaagtacctatttttctcttaagcacctattgcgggtagtgttcctgttgcttttgttctagtcgtagttgatgtgtttagaactccggtacatctggggagtttttaacaataacatattcttggtggtcaattattattgtccgagtaaataacattatgggtggtttaaccgtatgatagaaatatcagaaaggaattgtacacgtgaaaagtttttcctagcgacacccctatataaccagtaaatctcagtattaataacatctactgttctggttctgtctaagacgagataataactcatagaagtactacgtcttgtattaactgctgtaagcatgctgtcttgtaaaccagcagttcttcgacaagctgatgttgtcttttgagatagttgtgctatctgttcaagtactgtgactctttgtttctggaaaagtgagtaaaggccatgagacgttggtgcgaacaatcaagtgttccagctattatagatattaagtttgtaatgtgagcatcacaatgtgtagtgtaaaaatacttttataccagtctggaacttgggaaaatccagggaatcttgaaacactagattataatgagcgccgtaaaccgcaattactgtcataaagtatcacctctcccgccccccc

SEQ ID NO: 725326 - DNA, 244 bp, Homo sapiens
tagagacagagtcttaactctgtcacccaggctggagtgcagtggcatgaacatgacctactataacctcaaactcctcagtgcatatgatcctgccacctcagcttcccaagtatctgagtctacaggcacatgccactacacccagctaattttttaaaactttttgtggagaagggatctcactatattgcccaggccaatctcaaactcctggcctcaagaatcctcccttcttggtctc

SEQ ID NO: 725327 - DNA, 358 bp, Homo sapiens
ccgagtttcggcgccaggtcggtcatggcctgggagttgatgtcggactcacgaatcggcgtcaggcccacgatggttttcttcagcgacacggttttcgaggtcacgaactgcgcgtacagccaagccgccagtttctgcttctcgggcgtcgacttgaggaaggtccaggaacctacgtcctgataccccttcttcatgcccttttcccaataaggcccaacgggtgatggcgccatgcgccacttcggcgtgccatcggcgttgaccaccggcaggcccggcttggtcatgtcggcggtaaacgcggtgtaccagaagatctgctgggcgatgttgccctgggacggcacggggc

SEQ ID NO: 725328 - DNA, 922 bp, Homo sapiens
agtgcgtgagaggagacatctgtgcgctatgcatcgttcgccggagctgatttatcatatctgcgcatgtctctctgggttgcccgtttttttaattgccacgcggtttccccccctgttttgcctcaatcgggattgccaactctgtggggcccccacattgggttgccttttgccccaccccgttgccggtgtccgcgtattccccccgtgggggccccctccccctctggacttggttccgggggttccaaaaccaacacttctttggtttaatttcgcccccatattctgtttgtcaatgctcagacccatttttcgcgccatgccctgcatatcttctggtttctacggcttttctcataatctgaatcacaggatgtcgtgcccagcgttttctcccggcattcaagaacccccctcatcaagagtatcgggtttaaccccctcgagccgcctctaggtctcctcgcccgtggaagttaacatcacgccctggcccctctctggatctttcacgcttcgtgggtgttcccccggcaggggaccctcctctttttaggagacctctccgagggtacccccccttctcccaaaatagtgggagacgtcaacccttccacaataaagatgggggaccccccccggcatccgccaccgcgagtggtggggcccccaagaatggaggctggccacgtaattctttgcgatagcgatctctcctctctagcacggagatagaagcgccgttgagtgcgctcccggaagttttcaagggggccccttcatacgtatatacggtcttaggccctagaaacgaggtcgctccctccggaccaaatgcgcggcgctttctatcaatgggtgttccaccaacccgtgggcccaaagaggaaaaaaagttttcgaacacacaaaaaca

SEQ ID NO: 725329 - DNA, 657 bp, Homo sapiens
  misc_feature (583)..(583): n is a, c, g, or t
  misc_feature (627)..(627): n is a, c, g, or t
  misc_feature (650)..(650): n is a, c, g, or t
cagaaacccataaacttgtctaagaccaccgaagttgtccaaaggcctgataagtcacaaagaacgtttttagagcgcctccaggaggcttatcggatttacaccccttttgacccggcagctcccgaaaatagccgtgctcttaatttagcatttgtggctcaggcagccccggatattgaaaagaaactccaaaaactagaaagatttgctagaataaatatcagtcagcttttagaaatagcccaaaaagtttttgacaatcaaaagtttaataaacaaaaacaagcaacacaggcagctgaaaaggccgctgataaagcattcaaaagacaaacaaaaatcttagtggcagctatccaagaagtacagaatgaaatagcccattaatttagcattaactgaagcccctgctttagccttccctaatatctccatgccaaggagttgctaaagacgtgcttactcagactcttagaccctaaagacgcccagtggcctatttatctaagaggctagatcctgtggcctgtagatggccaagttgtctgcgagccgtagccgctacagcaagcctggcccnaagagatgataagttactcttagctcaaatctacccttacagcntctcatgccgtagaccttagtcntgcttct

SEQ ID NO: 725330 - DNA, 171 bp, Homo sapiens
ataactctctctttgaaagtattctgaatttcctaatgagtgtaactgttagcacgtgtaatttgtttccaactgttggttgaagttgtttctcaatccccccggccatgtgcagtagtaactttaatttgcagtcacacagaataaaacaggaactttaatttgtggtca

SEQ ID NO: 725331 - DNA, 597 bp, Homo sapiens
  misc_feature (3)..(3): n is a, c, g, or t
  misc_feature (89)..(89): n is a, c, g, or t
  misc_feature (130)..(130): n is a, c, g, or t
tgngaatctccccacgtaggaggaaagttcggccacagaggacagcagcagataatcgccttgtgcagcagagcactcactagtcgcgngtcatcgtgacgcgtagagcgcagaaacagcgtgcttttanattaaaccgcgtgggcgtaactctcccagtactcagcgaataattccagacggaacaccttaagttgcacactgctcattctggaccaagcacttgcacatcaactttctccgcctgacttcctccacagacatatttctgtagccgctctggaacactcaatcactccactgggagcggtcctagacatgccttaaaaaatgacgccagcattgttgcatacctggtcaaaaggaggaccattctgacaatctggtgtatgccaagtgttaatcagtggcatctccacgagcgcgtctggtgtttggagagtgttaatatttcccgggtctacctttgtagagatcaagcacagctttacaagccaatttttttgaccaaggagtcattttatttggcgccccctttgcatcgcgttaccacggcggttgccatttatggttattttgttggacttttccttgggt

SEQ ID NO: 725332 - DNA, 515 bp, Homo sapiens
  misc_feature (7)..(7): n is a, c, g, or t
  misc_feature (12)..(12): n is a, c, g, or t
  misc_feature (59)..(59): n is a, c, g, or t
  misc_feature (357)..(357): n is a, c, g, or t
aaccccnccccngccctgtgaagggtcccctggcctccccacttgcccctggtgccccnaaggtccagaggtccccctgagcccctccccccagaatccagatgggtccccctgcctccctgaccagcccccagacaatccgtgagccccagtaaccccctttttccttataaattaaaaagaaaagaaaaccaagtgtaagcaagggatatgaagaagagaaccccttgtacactgttggtgaaaatgaaaatcagtgcaacccactatggaaaatagtatggaggcacctcaaaaaatttaaatcagaaataccatacgatccagcaatcctacttctggatatatattcaaagnagttgaaatcagggtcttgaagagagatctgcacttttacatttattgcagcattattcacaataggcaagatatggaatcaacttcagtgtccatcaatgaataaatggacaacgaaattgtgatattaaaaaaagtatatacttatggtatatgaa

SEQ ID NO: 725333 - DNA, 143 bp, Homo sapiens
  misc_feature (143)..(143): n is a, c, g, or t
gggccgggaccatgtgcgcgttccgggacgactggcgctgttgcgggctccaatgcacgagtttttcgccagggacatcgacggggcacatggtgtaacctgggacaagtaccgcgggtcttcgtgttgcatcgtccaccaan

SEQ ID NO: 725334 - DNA, 132 bp, Homo sapiens
tgtgaaatagcatgaccgatcccatccgcattatgcacccccgccctagggcccgtcctaggaatggattaggggattgtcgctttgtaatgtgctggttctcttttttttcttacccctactaatgcccta

SEQ ID NO: 725335 - DNA, 746 bp, Homo sapiens
tggcaccaaaggcgtatcctagctttattaaagggcccgcgccgcagagtcaatataaaaacacaaaaagtcccatcagttaaataacaaataaaaaaccccaaaaggtggaaaacgtgagggggcaggggaagagaccccggggccaggggcacgaggagcccggctcagtggcaccaggccgtggccgcagggccccccggatatggctggtgtggctacgaggtttgggggggcaagcgattggtgcctggtggggacgccaccggttctcctggggctcggggaccggtcacttcttctgggggtggtggctcagtttctggcatgcccgggatctggtccagcaggccagaaatgaagggcctctggggggtttggtaacagtcaaccagcagctccttgaccctgggcagcccggggcatcgtcactctccatgtccaggagctcatccaggtcaatctccagttcggggatctcctcttccgggcagtcgtaaaggcgcgtgagctggctccaggatccactcctctaggtggaggcgcttccgtagctcctggcgggcatacttgacgggtgaccttccctgtggggcctcactggggccctcatcgtccgccccgccgcgggccctctcctgcgggccacgggggggctctgaacagtagacgcgtggtcctgggccgccagtgccggccgggggctggggacgcaacgccggcccccgggtgcagtgtccgcatgg

SEQ ID NO: 725336 - DNA, 497 bp, Homo sapiens
gacagtacaaatagtatcgtagatatccaaggagaaataatcatagagtaaactattctggggtgatccagataactatgtgtatactatactctctgcaggcatgtatgtagtagtatactatctatctcatctctccagactaataataaagctgatgtatcttcacaacagcatatctattgttcatacaggtcaaaagccttatacacttcactaaagccacctctaccaagcagatgaagtaataaatatctttcatttaatgttgggtgatctttgaactgtgaattatcttcattgtttattcttttcagctcacgtatgtgaagatttctgactctttccaaacgttcaagttctgcctggatttctgcctcttccttatagagatgtcctagtctaagtttgaaaatttcttcctgtacatgatattctgccaaagtcaacagttgtggtaaatttggtctaacaaagggatcatactctgctccata

SEQ ID NO: 725337 - DNA, 678 bp, Homo sapiens
aatgtttcaagtggcctgatttgacaaggcagagaatggaacagtgatattgtttggctctgtccccacccaaatctcatcttgaattcccatgtgttgcgagaggaacccaaagggaggtaattgaatcatgagggcaggtcttgcccctgctgttctcataacagtgaataagtctcacgagatctgatggtttgaaaaaggagagtttccctgcactagttctcttctcttgcctgcctcgacatgagatgtgcctttcatgtgccgtgactgtgaggcctccccagccatgtgaaaccgtaagtccatcaaacctctttcttttgtaaattgcccagtctgggtatgactttatcagcagtgtgaaaatggactaatacagacaaattggtaacagtaaagtggggtgtcgatgaaaagacacctgaaatgtggaagcatactttggaactgggtaacaggcagaatttggaacagttggagggctcagaagaagacaggcaactgtggcgaattttgaaacttcctagcagaccttgtagaatagctttgcccaaatgctgtccaggctgaggtgtctcgctggcctgaggacttgttgggcactgcccagatgcatctatgtttcgcacagagacgtggtttgcctgtctaattgtgacttcgcctcggctt

SEQ ID NO: 725338 - DNA, 797 bp, Homo sapiens
  misc_feature (18)..(18): n is a, c, g, or t
  misc_feature (36)..(36): n is a, c, g, or t
  misc_feature (46)..(46): n is a, c, g, or t
  misc_feature (61)..(61): n is a, c, g, or t
  misc_feature (67)..(67): n is a, c, g, or t
  misc_feature (72)..(72): n is a, c, g, or t
  misc_feature (74)..(74): n is a, c, g, or t
  misc_feature (82)..(82): n is a, c, g, or t
  misc_feature (141)..(141): n is a, c, g, or t
  misc_feature (228)..(228): n is a, c, g, or t
  misc_feature (788)..(788): n is a, c, g, or t
aagcctatctaatcaatnctattattaaagaaagtnaagcggtatnaataatttcaatagntcgctnaatananaatcactnaaactctatttatacatacctattcaaataatttcctagagtatattctttaaaattcntttatagcagtacactaacaaagaaaaagtttcctgtgtctttgctgttatcaaatgtaaaaaagccccttaaatatcaacagtttncaacaatgtatacatacacatatattttaaatgcaagttacttaaatgtaggtttacatccacagagacattttaatacctgctacgtactctatagcacttctatataatatatattgattaatttcaagtactttaataggtttttaaagttcattcaatttttttcttgaaatttgccttctttatttataaaaagtacctttgttctccaaaatattatttaaaatataatggtgttttgcagatggggaagagtatagtatgccttagtataggcgtgccttgaagatattgcaggtttggtccagaccactgcaataaagcaaatgttgcgataaagcaaatcacgcaaacgttttggtttcccagtgcatataagttatgttgacactatactgtactctggtaagtgtacaatggcatgaagtctaagaaacaatgtatataccttaattaaaaatactttattgctaaaaaatcataatgatcatttgagccttcagcaagataatctttttgatgggtggaggctcttgttttgatgttgatggctgctnactggtcag

SEQ ID NO: 725339 - DNA, 811 bp, Homo sapiens
gtcttcccctactccctctcggctccttgtggcccaaaggcctaaccggggtccggggtctgcctagggatcttccccgttgccccttggggcggatggtggggaagaagaagagaggtgagtgggtagtgagagcatcggggttcctggaggccagatgtccatccccatcttgacttgtggaaccagaatgtgaagttgggatgatgaagaagaaagcaaatggactatacagagattcatcaggaatacaaagaactagtggaaaaggtgtagaaggttacctcaaagaatgtgaattcagtgaagatcaatttacaagaagcatgcatttctcctctgtgaaagacccatacatcacaggccatttgtgaaacttgtgtgtgcagcaagaaagatttaactatcttaaaaggcaatggattgctccagaaaaaccttggaaattgcggttgcaaggcatttccgaataattcaacgagagaagtgctgtattaccctgagtgttaaacggaatgggtctgattgtgggtcagggacttggaacacgaaggagatgaaaattctgagggaagttcttaagaaaatcaaaggaggattgtgagcaggaagacggaaggaggaggaaaaaccagttatcagggggtaaaaagaagagcaaagtggtccaagtggaagttggactatggaatattccaggggtgtgaactttgggaccacttcgagtaagggttggatacgcataacttgtgggaaatgagggtgaatttcctccaaaggggaattgggttaggggttgggacaaatcttt

SEQ ID NO: 725340 - DNA, 743 bp, Homo sapiens
  misc_feature (18)..(18): n is a, c, g, or t
  misc_feature (36)..(36): n is a, c, g, or t
  misc_feature (46)..(46): n is a, c, g, or t
  misc_feature (61)..(61): n is a, c, g, or t
  misc_feature (67)..(67): n is a, c, g, or t
  misc_feature (72)..(72): n is a, c, g, or t
  misc_feature (74)..(74): n is a, c, g, or t
  misc_feature (82)..(82): n is a, c, g, or t
  misc_feature (141)..(141): n is a, c, g, or t
  misc_feature (228)..(228): n is a, c, g, or t
  misc_feature (734)..(734): n is a, c, g, or t
aagcctatctaatcaatnctattattaaagaaagtnaagcggtatnaataatttcaatagntcgctnaatananaatcactnaaactctatttatacatacctattcaaataatttcctagagtatattctttaaaattcntttatagcagtacactaacaaagaaaaagtttcctgtgtctttgctgttatcaaatgtaaaaaagccccttaaatatcaacagtttncaacaatgtatacatacactaatacctgctacgtactctatagcacttctatataatatatattgattaatttcaagtactttaataggtttttaaagttcattcaatttttttcttgaaatttgccttctttatttataaaaagtacctttgttctccaaaatattatttaaaatataatggtgttttgcagatggggaagagtatagtatgccttagtataggcgtgccttgaagatattgcaggtttggtccagaccactgcaataaagcaaatgttgcgataaagcaaatcacgcaaacgttttggtttcccagtgcatataagttatgttgacactatactgtactctggtaagtgtacaatggcatgaagtctaagaaacaatgtatataccttaattaaaaatactttattgctaaaaaatcataatgatcatttgagccttcagcaagataatctttttgatgggtggaggctcttgttttgatgttgatggctgctnactggtcag

SEQ ID NO: 725341 - DNA, 1434 bp, Homo sapiens
  misc_feature (1295)..(1295): n is a, c, g, or t
gcggaatcaggccgtagcgtctggcggagccgatctgcggtgagccgctccgggttgcccccaacccacgtgcgcctcagtggtgccggccgagggcagtggctcgcggttgcgtgggctcgctgccgtttgatctaagttgctggcgtgggctgctgcgaagcggacgccctaggattcgcgtgtccaagacgggcaatcacagcagtaagcgtgagcgagggggggtaagcgtgcgggcgcatagagactagcgaacgagtccctgtgcgttgtgccccagacctcttcctccgcagcagccggcacttttattctccacttctcccaatagactctcgccggtagactgcggggaaaagataaccgggcattccttatccacaatgactgaagctgaactttccattccatatactcttcttggagcggcgagggtagaaggcccaataattccctcagaagggaaacggtgcgttgcttgaagcgcatgtaatagcgcaaaaagtgacgggaatacaacgtcttgtgagcttaagaggcttcaaatccaggaagggtttaactttgagttgaggactacccagttgttcccttgaaaagggctttacaaggaggcaaacggcgagatggtaactccaaaacgaatagaaaattgaactcccaaaaagttcacatcccaacgtcctcggaggttctttacaatttgggaaacaacccttccaaaagcagacatgcctccatgtgttgaaaggtgacacattccacgacaattgttggggcacgaacccatacattttcctcattaaacgataattggtgcccagatggattgcaacccgaatgcttgctgttatcattgatggacaaccagaagggggactttattgatcccttttgaggattcccagacataactttccccaaattgataaagagcgcccgaatggtgaccgcggtgagtgcacagatcgtggtttgactttgagtgcgagataacgaacaattggtgctggcgtgggcggtattgcctgttggtacccgagggtggtgaacaatcagagcccgcattgtgtgaaaccattttctacacccaactgatggctctggcgcaagatatcccccttaaacgacccttgatacgagaaaacaccaaaagagagagcccataaaatgcaagtaggaacaagagcaattccttgcacatatattatcacaaggtgtgtgattataacaactcgtattgtaacgataatttgagactttcaactataccgtagggatcacgcaagctnttcttatacgagcaacacaaggacatccattttcggaacattacacgggtctggtcctcaatactgtgatatcacccacgatgcgccaagactatccccgaaggtacagagtttcccttgtgatcaagaataataccgc

SEQ ID NO: 725342 - DNA, 121 bp, Homo sapiens
tgctgcgtcgttctagaggataccctgtctgtctaggctggaggtgcagtactcctctcaaaatgaatgaatgaatgaaagaaggagagggaaaggaagctcctctctcttctattcccag

SEQ ID NO: 725343 - DNA, 1056 bp, Homo sapiens
  misc_feature (419)..(419): n is a, c, g, or t
tgtctttcatataactagtgtcgaattgcattgtatcgccgtacacatgcgaggtcactttcgaggtctcgatatcttgatctcgggtgtacactggagcttctacgtgtgcgagcatgctcgactatatgctcactcattgagcataggttcgtactaccatgcgaaagtatgtgtatgtcatattactcgacctgattgcgcttctatatctgcatgcggcacgaaagacaccatttattctacaggtgcactcagcacgatacaaccaggacccactatcaggaaacatctcgtctctggggtgataactccataattataaattagctgtcagtaactgtttttatatatactgtacaacggtgtaatctttgtactgtaagcacatgtattacactgtgtaccagacactagantgctcatgaggtcacgcgattcataaggggacgagggcgagtgtgacccgcaaaatctggaaaatacatcacacacggcaattaaacatacacacacgtacgcatagatactggaaacttgctaaaactactttttgaatacttagggtacgtgctatacagagtagataattgacgttaatactgatagcaacatggatatacgattctatttagaatgactatattacgaaaaacgcgattataactttcgctgaacaaacatgtactcattgatcaagggattcaaattgagcgttttaactagtgtaaaatacgtacacctcacaaatgtggcatacccgtatgtaattgtgtcagaaagttacatcaccatatcaaagcgactattgcccgaacgtgcgattcttacgtgcttcctaaaatcttgtgtcggtatgttcaaccgaaggggagcccaggggatttatccaagaattgagtatttttgggagctatctatatttccttatttcatcttggtttgaatgctgctcccaaattgtttatgcccgcacgttacaccggtctaagtcaatccatggatttggtcttttgcagattaacaaaccgcctttgtcctggatagttttccgga

SEQ ID NO: 725344 - DNA, 154 bp, Homo sapiens
  misc_feature (13)..(13): n is a, c, g, or t
  misc_feature (73)..(73): n is a, c, g, or t
  misc_feature (103)..(103): n is a, c, g, or t
  misc_feature (130)..(130): n is a, c, g, or t
taaaatgaaaatncaggctgggtgtggttgtaatcccagccggggaggggctgcagacagcagggggagaggnctgcttcttattttttcctttctccttagnctttccctccctttaaaggcttctaantattaaattgaaatacatgagaat

SEQ ID NO: 725345 - DNA, 931 bp, Homo sapiens
  misc_feature (824)..(824): n is a, c, g, or t
tctcagcaaaggattttatgggggggtcacctggtgggcacaggttaaagaaggccgaagtgctgtgttcgggggggggggggggaccaaaaaccccggccctgccctcttgcttacataggctctcccgcctaaaagcgcaccaaaaaatgccgtacggagatccggagtaggtagtactgaggaagaagctgagctcaaggggggccatatccacgccactggcgtgagggcatgtgggtcaataagatggtactaggagaagcaagatctcacggtaccacacgggagcatccacctccagaaacttccgatgtttctcccattacagccaggggtgattgcgggcagtgacatatggtcaagagacggctggcggatccgagaatggtctctctcacacaacaggagagtgtattgggtgcccatctcttaaagaatagaaagaatacccagggggcatcttctcatggaaggagattagtatattagtgagcccccccgagggcgctacaactactatcaaaactactctactcgaggaggagggaggcagcacgtgaggagggataaaccaaacaaggaggcggaggcaatttccaacatcgagtgcgcccctttgttgggccaagtgaggaaccagatacccaatttctagtggtgctctcagaaatttcaacaattctcgaggtgctccaacaacgaaccaaatatgtgtggtgtttgcgctccccccaaggaaaagcgccgcgggtcttccatggcgaatatatcgaccaggaactaggtctaagaagaggtgggttccggtggggacaccaccnctcttgtggtggacaatataacagctgttgggttgagtggggccccaacagagcacagacccatagtactcgcccaattgtgtggtgcttggcgaaccaagcgtgtg

SEQ ID NO: 725346 - DNA, 490 bp, Homo sapiens
  misc_feature (100)..(100): n is a, c, g, or t
attaccgttttctgtgaatcgaactgttctgcgttaatgctttattattgttcaccgtccaattaatgctaaatcgaattttggcaaaggcgtacagaancgaacagtaaccatttttggattagataacccgaatagtctgattgttgtttgagttgatagtgtcgtcacattgaccgtaactagcgtatcattaatgatttctgacacttgaccgtggttgcttggtctgtcttcacctttagtaatcttacgcaacgtaatctgtttgttcaaaatcatatcaaccaccacttaccatgagttggtttgtagaagtcgtcaccgtttttataggcgttaatttctgctaagtaaggtgtgaagtcgtcttcattgaacgtcatacttaaaccgtcctgtgtaggtgacttcataccctcattaccaatacgggcatatcaggcgccaacaccattagttaaaatgtactgaagcttgtcagggactg

SEQ ID NO: 725347 - DNA, 117 bp, Homo sapiens
ccgtgggagggggacacactgcatagctttgtaatagggagccactacatggcaatacgcaagcgcacgaaccatggggccactctttaactttaaaataataaccctgtctgctgt

SEQ ID NO: 725348 - DNA, 942 bp, Homo sapiens
gcctcagcgggtggccgtccgagcgccgagaggtgaggtgtgcccccgacctcacctgtcagaggggccgttccgggtctcgaacccgggaccttccggaagatgtgggctgccagtgcccagcctgcgtgcgattcctcccagagtatcctctgtcctgttcctgtgctgtagatgcatgagtagcaacgttccgcccataacgatcgtgcgtacttccacacaggactcgattctcagatgtgctggccgccatgctcaggaaacatggagccctggtaacttctagaaccgggggacttgcaggtccactgtggtgggtcggacgcctgttcctcatgggcaagacaggggttgtacccgggcctggatgtggtcatgtggccccgtatgtgaagacaaggagcttggatgcccttcgcttccttgcagccctagtacgtaatcgggcctcacagttcatgcagagcattgatgcgcgcagatgccggtctgagacccgcgcaaggatgtcaaagggaagatgtcccaggaatagagggtctcagttcaaagggggtaggtcccccagggccacccacaagggaccaaggctgcgaacctttgcgtatggggaccctttcgtttgtcgagaaaggggctccaacggcagaccttcccgtcttactccttccgcagagttgtatgacattcgccaagaggcacacctggtgcctttggaatgggggtacattggaccacaaatcacgttcgccttggtcgaagccgcgcgggaacacccattcatagagtggggcaaagtggccccgtgtttcggccacccactagttcggcccttggaagttcccgccatattggaacgttgcgaattgccggagtttcacaatcgccagggggaagtcttggtgccggcccccacgcggttttgaatcgtggggagaa

SEQ ID NO: 725349 - DNA, 156 bp, Homo sapiens
aatatgtcataaccatgttgtaaagtaaaacataacagagtcatggcaaagcagacatcaccaccatacatcatcaccatcatcatcactatcaacaccaccaccatcagcagcatcatcaccatcatcatcatcaccaccaccatcatcaacatc

SEQ ID NO: 725350 - DNA, 347 bp, Homo sapiens
gagagagagagagagagagagagagagagagagagagagagagcccgagagagctccctctatggagtccaggtgtttcacaggaggacgggcattatcaggtaccactggccaacttatcattctatttttcagtaagattgtaatttccgttacacacaaccctgttatgtttgtacgaaacacgttccttaaagctcactggctttccttcggttccagcttcggtctgcattgcattacacacatgagctcgaggtgagcaacgggcacttagtgaagcgtctggtcacgcctggttgatgactgtagagcattgtttcataggcttttctctgtcctgctgg

SEQ ID NO: 725351 - DNA, 81 bp, Homo sapiens
ggctgtgtgtgtcctttgccaaattaaaaagtcttactgaatgcggtgcatccaggaaacaggcccaggtttggactggta

SEQ ID NO: 725352 - DNA, 340 bp, Homo sapiens
ctgtggtaatatcaacctaaggtcagttgtgcaggtggtaatagtcattaaacaagattgttgtaggttagagcaagggcagatgtcttaaagaaatcgtgaaagtatgtagcagtgggcagttcagcagagaaggggctctgcacaagaggccagggctggaggagagttttatagggtcctgcgtgatagggtgctacgtgtggaatgaggtcattgtgcccgcaggttgtttgtgattagctgtttctaacaattgttcatacaatcattgtccattattgttctcaacttggggctctccccaagctggggacccttccttattgttgctaccaca

SEQ ID NO: 725353 - DNA, 133 bp, Homo sapiens
acataaacaatgtagagtagtgttatatgtaactttctatctgtaaccttagttttgaggtttatcaacagttaccatgctcacagctctagtcattttcatcattgcatagtattccaactgaatttatata

SEQ ID NO: 725354 - DNA, 181 bp, Homo sapiens
  misc_feature (31)..(31): n is a, c, g, or t
caaaaatttttaaaaaaaagggccgggggcntttttttttttcccggggcccccctttttgttttttaaaaaaacccccctttgggaaagggggggggggccccttttttttttcccccccggggaaaaaaacccgggttttttaaggggggccccccccattaccccttgggccccggga

SEQ ID NO: 725355 - DNA, 596 bp, Homo sapiens
tggattcccgtcgtaacttacagggaagacttttcatcaatgttccgagtagcgccatgtgactgttccgtgcaatactgagaggatggatggatagtcctctacatgttccgttgacagccagggaaactccacttaggtgtggtcaaccgaatcgttgtactctcgcagaatggtaatcaggtaacacttcggtataaaacgagaaacaatgtcgatgcgtgccacttcgtactcagttccaattaaacaagtcccttcacaaagaacgggaacccctttgtgcggacaacgaaaaagcctttccttcagggacttagcggcacaagacattgatcacgcgttagtgccccaacaagttcggtgttttgggcgccgcaaaatcttgggcgaagcaaaaattcccgccgctggtgtcgtattgtggaaactgtcgttaccaagcaacaggggtctgacaacagtcaagttcctgttacccccaaagcgagaaacaacttcaaccttgggggcccaccaagacaagccagcgcgtcactggcatgaccacgtctggaacagaggatttccggggacatctgtcactagcagtcacc

SEQ ID NO: 725356 - DNA, 176 bp, Homo sapiens
ctcgagctcggtcccgaacaccaggctaaggagatcgtcgccacccgcgttcccaagctgccagccccattttgtcggcaactacattcagagcttccgccccaagccccgtcctgctggtcttgaggactctgctgaggtgtctgctgagactggccttggcaagctgcagcgtg

SEQ ID NO: 725357 - DNA, 203 bp, Homo sapiens
aacgaccggcatggatagaggtggtctgccactgatagctgacacggcggctcgaggagggggcctgcatgtttgcagcacttactaaggaggcgagagacggcgccgaataaggccaattcatagtgcatcaggtggtctgcaggcccaggcgaggctgtcgccactggcggcgctctttaagatagtgctgagcagagtcc

SEQ ID NO: 725358 - DNA, 135 bp, Homo sapiens
  misc_feature (94)..(94): n is a, c, g, or t
ttgggttgtagctttggtggtggctttgctggtggtgatgggcttctggtggtgcagtgataaggtgtgaccatgcagaacctcaactgaccgnctgtgctcctaccgtggacaatggtgctgtgctcgtgtgag

SEQ ID NO: 725359 - DNA, 492 bp, Homo sapiens
aaagagcaagagggcgtagggaatgtaagatcttatatctcctgacctcgtatcgctgagagcttaccttatgatcttcgtcccgtcacctgcaaatatatagcttgagtagcagatgaggcaggacatcataacgccctccatattaactgagttccgtgaatagacaggatccagaaaataaacccatctgtttgatgcagagactaagaacattagattgagaaacttgaggtctcctgctgtaagcagccatcagccagcatcagccagatcccctaggaatctgcatcagaacaaactacctattcttatcatctctccactgggcctggtcatctgtgagcagggttcccaggcaggtgattgtcacagggcggcagatcagaacagacagactagttccagaccaggatcaattcctggtgtctgctctggtcttggtggccccactctgggccctgggggaatggacctgcccggggaggaaga

SEQ ID NO: 725360 - DNA, 388 bp, Homo sapiens
cccggtattgctattaaaactaatctgatatatttcgtacagttactgccggttgcaaatctccggtaagcagtagcatggaagagatgagcgctgcctggtgaaatctccggaacatgatagatgttaacgccaagcaggattttttagccctatattctctgctaagatcatgtattatcgttgtacagatgatgattttatacccttctaggtatttgtcccgtatggtctagggtgtacgcccagtcattggcggggtacaactagttcctagagaatgctttgagagacacgaggcagctggatacgcttggcacctattcctatggcatgcccgtgactccctgggatagtggtctagtgtcatcctgtccggtgaaatcgt

SEQ ID NO: 725361 - DNA, 115 bp, Homo sapiens
ggccgcgcgctgtactgcttccgatatgtgccacagagcagcaacgagaagtggacagagccgcggctctacacgcttgggtagcgggataagtcactgttttctttatttcttt

SEQ ID NO: 725362 - DNA, 274 bp, Homo sapiens
  misc_feature (71)..(71): n is a, c, g, or t
  misc_feature (126)..(126): n is a, c, g, or t
  misc_feature (238)..(238): n is a, c, g, or t
  misc_feature (253)..(253): n is a, c, g, or t
  misc_feature (262)..(262): n is a, c, g, or t
ttgtacccatttcacaaagaagaagcaaacaaattaagtggcttgctcaaggtcatgcagttagtaaatgncaaaacagggacttgaaccaaaccctctactctaaaaaccgcgtcctaaatttcnacactaaagcttcctcatcaggttacccacaagtgggtcccatccaccatccaggtgtgcttggatgttctccaccctcaaggtgtaccctgtgaaaagtttggaagcactnctttataataaaatnaaataaacnacttccaaaaaa

SEQ ID NO: 725363 - DNA, 186 bp, Homo sapiens
gttgagttgtataagtggtttgcatattctaagagattaagcccttgtccattgcatcatttgaaactattttctcccattctgtaagttgtctttttggtttctttttggtttcctttgctgtgtgaaagcttgtcagtttgatgaggtcccattggtttatttttgcttttatttctgttgcct

SEQ ID NO: 725364 - DNA, 379 bp, Homo sapiens
gcagtgagtggaacaaagatccatgccaacggacgacatctgcggacaggcgagaaggccgtggtacgtctccgctgacctgaaacaccctgagtaccttaaggtgggcgccacactgcagttccgggaggggtgtcagcaagggcatcggccatgtcactgatgtacaagccataacagcaggagaagcctcaggcgaaaatgggcttctgaatccttcaggctgtgggcagttctatcgctgtccctacaatatataaagtgactactggccatgctgccgctgccgttgcagggtgctgtgtgtcaatagggcaagggagacaggggtgcagtctgtcacttgatccgctcgccagatttctgtagagggtgccat

SEQ ID NO: 725365 - DNA, 336 bp, Homo sapiens
  misc_feature (327)..(327): n is a, c, g, or t
aagctttcggctagtcgggacaattttaaaagaaacctttcagggccaggtgcagtggatcattcctgtcatcccagcactttgggaggccgaggtgggtggattacctgaggtcgggagtttgagaccagcctgaccaacatggagaaaccccatctttactaaaaatacaaaattagccaggcgtggtggcacacacctgttattccagctacttggaaggctgaggcaggagaattgcttgtaccggggagggcagaggtttgcagtgagccgagattgcgccactgcactccagcctgggtgatgagcaaactccatttccanaaaaaaaaa

SEQ ID NO: 725366 - DNA, 82 bp, Homo sapiens
gatcggggaggggcaggggtggcacacgatgctacgcaaaacagccacatctaacagttgaaataaacagacagcaaaatgg

SEQ ID NO: 725367 - DNA, 109 bp, Homo sapiens
catcgccacattgacctcctgccagcatctctatgggattgcagagaacacactggccccagctacctgaccatgaacaccacatatcagcaaacttcttcctccacct

SEQ ID NO: 725368 - DNA, 634 bp, Homo sapiens
cggtgggtgtcatcaaaaggtcgaggcggaggctgcttaatcctacaaggtcaccaagtctgcccagaaagctcacacggctgaatgaatattatccctaatacctgtcaccccacttcttaatcagcagacggaagaacgggctaagaactgttcgtttcaattgaccatttaagggaggagcaaaagactggttaatgataacaatgcatagtaaaaccttcagaaggaaaggagactgttttgtggaccactttggttttcttttttgcgtgtggcagttctaaggtattagtttttaaactcagctctttttaacgctaacaccttggccaaatttttgtcacagaattctgggacccattaaaaaagttaactgagaaaaaaaaaaataatactttaccaatcccgttattattaatactgcctagttaccgaaatcctggccggcccccaactacccaatcgagtttaagacacaaaaaagatttttcctcccaataccaattttcggggccccctaaccacctctcccccttttgtatgcattcatatccgttcaagtggcaggacctctcacaacccccgcaccaggtaaatccctcggcgattcccacataaattgcccaccacc

SEQ ID NO: 725369 - DNA, 175 bp, Homo sapiens
accggtccgcactgccgctatctgggcattttccgcgccgaatgggcggattactatcggctgaaacgcgtggcgccaaaaactttgctggcagagctgcaggatcagggggagatttcgccggtgcgggtagaggggctggaagggcagttctatgtgcatggctcactgacgg

SEQ ID NO: 725370 - DNA, 1375 bp, Homo sapiens
  misc_feature (244)..(244): n is a, c, g, or t
  misc_feature (1375)..(1375): n is a, c, g, or t
gtgcagagagttgcgttggtgttgggccggaggtaacaacgtcggtgacatggactcatcggagcgtgtgtgattctgatctcgccgctatttctttaaccctagatctcgaagactgcatcgtgacttcctgtccactctgtgcactgtacagcgtttatgatatgcgcacatcttggaagcccatggcaaccagacggacattgcgaacggcgctttatgagtctacctgatgcgcaccacntccgatacgttgatgtggcgttgcctacgtaaatcactcgaaaccggccttttgcctcttagcttcgaacttctcgcatagattcccccgtacgactgcaggctgattgccagttccgagcaaggctacgactggcatagacaccactactgttgtgctgcccgtgctactgacgttggaacttgttcgatactggtgacaaaacattgacagtacgtaaaatcgtgggcaccagccgtacccatctttggcggggtcagtacagtcctcctctgaatggattgatttaatcgttaagcggagtgagttccctttcccaactctcagtctgcaaacgtattcttccgaataggaaatgcgcagtaaaagactctcttcctacgcccacgtccagtgcaagcaaggatccccctatttcctacgtacgtagtactgtgaacgacaccgacggacggaatgagtttcggacttcgttctggcggggacggaagaaaatgtacagtcaaatgccctgtacccccgatatgcacttgtacttcctaccggggtccctacgttaagcttccgattctccatacggttttcacacagttgagagacggggaaatacctaggaaacgtaacaagcgtttcttggccaccatggacgaaaacggttgcggtgcttacccaggcgcagcacagtttgaacctttttcccaattcttgttgcacctaaggtgtacggttactatgttagcccgggacaattatttcccacaaggtcttatttgctttttaagcaagcaccttttcccatacacaccgtcatatgcggatggccaactatattcttaaaagcatttaggtggatataacagcgtcgtttttccgaaacattcccatcggtcttccctccctttcttatatggcaaacttacacaggtgtggcaccaactaattagggggtgtgtgcaacttcttcctgccttccctctgtgggctttttcggagacaattggggaactctcccatgtaacccgcatgggggtcgacttgggttaaatttaacccccaagggaaaattcggtgcgccgcgttttttttacccacattggtttcccccttattagaggctaaacagtcttgccn

SEQ ID NO: 725371 - DNA, 1523 bp, Homo sapiens
agcgggggggaaatgttttcatactttttcaacaatacggttctttattgttgaactgtacatctaccccagcccctcaaaaaaaaaactgtttacatagaaattcctacacacgctttgcgctatatgtccactttcacaacatctttgctggctgacgcaacttctctttcccccgactattctcccttcatgctcaaccgctcagaaccaaactctcagggcaactttacttctctctgcgcagctgcgctgcctcccagtccctctttacaacactcgctccactgcacacactgctctcttacacacacaactactgcgcacgcgcagtgcactgccactaccactgctccggcctccaagccttccacgccgccttccgcaacacctctctctactgcgcacacacgactctctctcttctacacccctctaccccagcgcaacactcaccttcaacctcacctggtctctaacgcttgcaaacttccgaccctataactcttccaaccctctctacgcttctacttgcacaccctgctcgactcacacttgcgcctactcaccctgctcatactcaattccctttcaaaaccctgtgcgcacttctctactgcgcataacacccccccctctttctcagccttctccatatgcgcacgcaaccccaaaacacaactccccgccgcggatacctacgctactaacaactaacgacttcacacggcaccgcccacccccaccacctgcccacaccacttgcgtcacagctaacttctcttcactctctcgctcgcactcctctatggaagaccaacttcccaaccgacaagcttcgaatccacacagcccaaaagtggactcgtaacgacactcacggcgcaccgccaaggccacagtgcctctggccaatcttcacaacccaccacacgccctgagctctcaactcgcccgtcggcgccacgtgacaagcggcgcccccgcggaaccgccgcgccacgcccacccggacgctaaccgcccaaatgcccacatatacctcagacatgcgaagctgcacaacagacatcggctcacgccactacccacatctgcagcacgaaccgctgtacacaacgcgccatgccggaccacccgcactcgcccactcctcgcatgtcccaacgcctcgcgcaacccgccccccgacaccccctacctccccgccacccctccgcaacacgcggcgactcccacagggaccaccacagtgcgcgacgactgcaaccacgagccacacacagcgcacctcagcgacgacccacacccgtagccgcatccacacacacccctcgacgcgaccagtcgccccagcccactgtgccaccaaccggacaagcgagcacacagccgctcaaacacacacgataccacgacagcccacgacacgcccacccggcggtgacacaccacaccgccaccaccacagaagcaccgacgagaccacacagccacccaccaccggaggactactacaacgg

SEQ ID NO: 725372 - DNA, 410 bp, Homo sapiens
taattcgcggatcagtgaaagtgagcctggcgcacttctttgcgctgacctaaagctgacatactactggcttatgtggccacaattctaccgttcatttctgtgactgctttagtggcttcttctgggtaggagaaatatacaaaatcaaaccctttgactagcgatccaccctccataataacctttgcactagtgattgtaccaaatggagaaaactctttccggagacgttcatcatcaataccatcatcaagatttttcacataaagattaacaccctggtatctggtgatcctatcttgtttcatctgttcaaatttgcgcttaagttccgtctgccgttccacctttttctgagctcgaccaacataaatttgttttccattgagctcctttccgttcatctc

SEQ ID NO: 725373 - DNA, 135 bp, Homo sapiens
atcagctcggtaccgatctcctgatctcgtgatcacctgacctcagccccccaaagtgcggattacaggcgtgagccaccgcgcccagcctcttcatctaactttctaatgaattactacttgtttccaaataag

SEQ ID NO: 725374 - DNA, 392 bp, Homo sapiens
  misc_feature (259)..(259): n is a, c, g, or t
  misc_feature (281)..(281): n is a, c, g, or t
  misc_feature (376)..(376): n is a, c, g, or t
  misc_feature (386)..(386): n is a, c, g, or t
aaagagagaattttaaagctggatgtccagggagacatcacacgtcggcaggttccgtgatgccccccaagccgcaaaaccaacaagtttttattagtgattttcaaaaggtgagggagtgtacgaatagggtgtgggtcacagagatcacatgcttcacaaggtaataaaatatcacaaggcaaatggaggcaggcaagatcacaggaccacaggaccggggcgaaattaaaattgctaatgaagtttcgggcgcgcntgtcattgataactcttatcangagaaagggtttgagagcagacaaccctctgaccaacatggcgccccgtttctactataaccagttagctggggcgttgtggcacatccctgtgnatccagctantcgggg

SEQ ID NO: 725375 - DNA, 211 bp, Homo sapiens
gttgacgtgcagtggcaacggtctcgcgctccctgtcactccacctcctgcagttcaagcgattctcctgcttcagtcctcccaagtagctgggattacgggcatgcaccaccacgccccgctaactttttgtgtttttagtatgggcagagttggccgggacaggtttttctagctgtgtctcggaagatgaagtcgaatcctctgtcta

SEQ ID NO: 725376 - DNA, 201 bp, Homo sapiens
  misc_feature (68)..(68): n is a, c, g, or t
agctggttaagtgtgttttttaaattttggttattgtatttaagttctaaaatttccacatggtcatncttcggttatgtcatgcaagctggttaatgtgtttttttaaattttggttattgtatttttaagttctaaaatttccacatggtcattcttcgtatcttctacttctttgctgagactttctgttttcctgtt

SEQ ID NO: 725377 - DNA, 885 bp, Homo sapiens
cgtgcaagtgccaaatgtctcaaatggcgagaagattcgtttctgaaaagaggacaagagacattcctggagagcgcctgccaactgagctcccccggttatattccgcctggatccccgattcctttctgggatttttctccccagaagggggttacttccccacatcccagaatgtgggccactcttagggtgttcataacaaccgggggggtccaccagggtctctaacggtaccttcttcctgaagtggtttgcccaacacagctgggccccctggaggggaatacacgcatttccccactcactcgtgggggacggcctgccgtggcacagaaattttcttggcggcaaccctcccacgagcgctatgttagaacctccgcgcctaatggggcccggagcccccaatgtgggtaggcacccctcctttggaaaagcgagaattacaaatagaacaaaggcagtgagttaatgacattttttgaacaagtcccctggcccttttatataagagaaaagtgttcttgacgccccatggtcaccacgtaccggaggatgcactcccgcccgtctttgtgcacccacaaggcactttttgataaccacgcacctgttccacacataaaagaccaccttcctctctcacgtggtgtcgccaaattcgaccttgtcacacccctcctttgttattttctggcaacgaccttatcttcactgataaaaatcaccacatccttgacgaagagtcatctctccctggttaataccatcagtcattctccgaaaaatcgtgtgggaaccccctcgcgccgtgagaaccctccttctatcgcgccccaccactgtccacacccagccccccctttttttcgccccacagca

SEQ ID NO: 725378 - DNA, 161 bp, Homo sapiens
ttcccgaacatcatccattgtcatatcataccactcaccaacccatgcaaaagcctgtctatgtccaatcagcagaatgtcttcgaccacctttgtgacagattgttccactctggtctgaagcccccagacctcaaacttcacagtcaccagcttggtag

SEQ ID NO: 725379 - DNA, 222 bp, Homo sapiens
cgactgctctgctgggtctctccaccgcaatgcttctaggcggtactatacttagattgcgtttacacccgtttcttgacaaaacctaacttgcgcagaaaacaagatgagattgtgcatggctattagtctgctatatttgttttgttttggttttttttttttttttggtttgattcaggatttaaaaactggaccggtgaaggtgacagccgctcggtg

SEQ ID NO: 725380 - DNA, 456 bp, Homo sapiens
agatactcaatggtgttagtcaccaggaaaacactatttaaaaccatattcatatgcaactacttgcccactcaaatgcattaaataaaaaagggatgaaaataccaaatgttagcaaggatgtgaaatacctgaccctgtcatatgttgctggcaagaattaaaaatagtaccatcggccgggcgcagtggctcactcctgaaattccagcactttgggagccaggtggataacctgaggtcaggagttcgagacgagcctggccaacatgacgaaatcccatctctactaaaaatacaaaaattagctgggcttggtggcaggcttctgtaatccctgccacttggaaggctgcggcaggagaatcgcttgaatccgggagatggaggttgcagtgagctgagatcgcgccactgcattccagcttgggtgacagagcaagaccctgtctcaaa

SEQ ID NO: 725381 - DNA, 411 bp, Homo sapiens
aaggcaaaaaatgtggattaattccggccctgggggtgggggggttttttataaacccaaggtggttggtttaagcccaaaggagatcccctcctgataagctctgtgaaaaaaaaaatgggcctggtgtgtgtaatgcggctggggtatgaaaaccctgaaaaggagatgaaggagtgtgtgtagcatgggggggtgtccaacttaacccctgggctttttctgggggagtgggaaagtgattttgtaaccccccttagaattcctttgggtttgtaatcagattggttttatgatttgtctttggctattcccaaataattgtaaatgctggttttataagccccagtccttttccctttgcttttcccaaatgtattaaattggaattttttaatcctttttatccca

SEQ ID NO: 725382 - DNA, 120 bp, Homo sapiens
taccaagtaagaagtatattggtatcgaatgatgtcactcacgtcagcaaagccaaagagctgaaggaccggcaccgggacttccagacgtgatctcaggagcgtatataatgaagtatg

SEQ ID NO: 725383 - DNA, 133 bp, Homo sapiens
tatccaatgagctggtacccaaccggcgatggctgggcagacttggcgaggcgcgatcagcgtgccaccaccacgtggcgctgggccgccagcaccgcgtcgatgtcgtcggccatgtagcggatctctgcca

SEQ ID NO: 725384 - DNA, 615 bp, Homo sapiens
  misc_feature (120)..(120): n is a, c, g, or t
cagaatcacactcaaaacggggaagttccagcccaactgtaacatcagtgcacatgtatgatggcgcgtggctgcattctctgtgtcccaagaactatctctcccaacttggctgtccanacctcggctggtcaaagtttacggggcagtgctgcgaggagtgggtctgtgacgaggatagtatcaaggaccccatggaggaccaggacggcctccttggcaaggagctgggattcgatgcctccgaggtggagttgacgagaaacaatgaattgattgcagttggaaaaggcagctcactgaagcggctccctgttttttggaatggagcctcgcatcctatacaaccctttacaaggccagaaatgtattgttcaagcaactccatggtcccagtgctcaaagacctgtggaactggtatctccacacgagttaccaatgacaaccctgagtgccgccttgtgaaagaaacccggatttgtgaggtgcggccttgtggacaggcagtgtacagcagcctgaaaaagggcaagaaatgcagcaaggacaagaaatcccccgaaccagtcaggttacttacgctggatgtttgagtgtgattctggcggggtacg

SEQ ID NO: 725385 - DNA, 419 bp, Homo sapiens
  misc_feature (407)..(407): n is a, c, g, or t
ccaagttcctttcccaggaccaaattaatgacaagaacggagagctggacttctccaccttcctgaccatcatgcatatgcaaatcaagcaagaggacccaaagaaagaaatccttctggccatgctgatggcagacaaggagaagaaaggttacatcatggcgtctgagctgcggtcgaaactcatgaaactgggagagaagctcactcacaaggaagtggatgatcttttcaaggaagcaggcattgaaccaaacggccaagtgaaatatgacaccgtttatccagaggatcaccattcctgtgccgagactactaaggggagccaagatcaagagagcagatggagagccttcggggccttgaaaacctagactgattcctttttgtaagggaagttctagagntgacacaaccat

SEQ ID NO: 725386 - DNA, 94 bp, Homo sapiens
  misc_feature (67)..(67): n is a, c, g, or t
gcttttgggaaatgggggtccctttttaaacccctgtaaaaaaggtttttggagcctgaatgtcttnctgtgatcaattaaattttttaaatga

SEQ ID NO: 725387 - DNA, 1128 bp, Homo sapiens
gcaataatcccagccaattcagaaaatctgacgcacgaggattacttgaggccatcactgcgcaatatagcaagaccccatctctataaaaattaccgcagtggctggatgcactgccgtgtatttcccagtcgtacgttctgtgagtgttgagagtgtggatggatcaactttgtcagcccgagaatgttccatgtgctgcaactgagccgattgattactagccagcgggtcgactcacatatgctttgtgtggcacacgtgatgaagccgtgactcgttaaaggagttgagcatgagaacgggcataggtgcccatgtcatgtggcacctgaaagctgttcgatgataacaaacttcttcgttcgttagcatcatatgactcgaagatgagcgaacatcccaatcgtcgagtgtaatgccagcagtatttgggcttaaccacccagtactcacatatcatcaataagggtctctttgagtgcgaggtagttctaaagggcgaccccgtgttgacacccggtggtgattggcacccgggggggggacccctttccatataaggcccacttgttaccgccacgtgaggtgctctttagagagttcacgcgatcaacgcgctgtggcccattgccaagaggtattgaagcgtcccatgtgtctgggcccccccggagatacacacgtattttgacccccttttaccccgccgtttgcacacgcgagagacctctgttgcgcctctaaaataagtcctggtgaagtgaagcgcaccctttgtgggagcccccgaaaaaacgtgtgcgactcgtattctcccacaattttgtgtacaatgtgccccccggggggcaagtttatgacattgctggtggacctttttctacaatttagcgctggctcatttttaacacacggtggacacagctgcgccacatgtggggctttctacacattgggggccgaaaaaaaacacatatacatatgcaccacaagatccaaggaacaaacaaagccagtagctacatactagacacatagggcgacaccaccgcgcggcagccatcacattttgttttgccgtgtgggacccgccgcagaaaaaacacacgtgtgtcagcccgccag

SEQ ID NO: 725388 - DNA, 191 bp, Homo sapiens
gaagcagatctagtggagcagaggaagctgctggacagtgtgccagtgatccgctctaagtctcccatgctgatctcccagcataacgctttctttgctatatgactgtggtggatgctagtgatactgctccgcttcgatcgcggcgaaggcagataaagtggagcagaggaagctgctggaaaagtgtg

SEQ ID NO: 725389 - DNA, 439 bp, Homo sapiens
ccaggaggagctgcttaagatctgggagcccatcttgtgtcagtggagctggatatgagacatacagtcaaaggagattatttttgacctttaaggtttaatgactgccctgctggatttcaggcctgcatagggcctgtagccctttgttttggccaatttctcccttttggaatgggagcatttacccaatgcctgtactcctattgtaccttggaagtaactaacttggttttgattttacaggcacataggcagcagggacttagcttgtttctgatgagactttggccttggatttttgagttaatgctggaatgagttaagactttgggggactgttgggaaggcatgattggttttgaaatgtgaggacatgcaatttgggagggtccaggggaggaatgatatggtttggctctgtgtccccacccaaatc

SEQ ID NO: 725390 - DNA, 579 bp, Homo sapiens
  misc_feature (22)..(23): n is a, c, g, or t
  misc_feature (74)..(74): n is a, c, g, or t
  misc_feature (384)..(384): n is a, c, g, or t
aaatggcggatgacgccggtgnngcgggagggcccggaggacccgggggcccaggattaggaggccgcggcggnttccgcggagggttcggcagcggtcttaggggccgtggtcgtggccgaggccgtggccgtggtcgaggccgcggggctcgtggaggtaaagctgaagacaaggagtggatccccgtcaccaagctgggccgcctggttaaggacatgaagatcaagtccttggaggagatctacctgttctccctgcccattaaggagtctgagatcattgatttcttcctgggtgcatccctaaaggatgaggttctgaaaatcatgccagtgcagaagcagactcgggctggccagcggaccaggttcaaggctttcngtcgctattggggactacaatggtcacgttggtcttggtgttaagtgctccaaggaggttgccactgccatccgaggggccatcatcttggccaagctttccatcgtccctgtgcggagaggctactgggggaacaagattggcaagccccacactgttccatgcaaggtgacaggccgctgtggctctgtgctg

SEQ ID NO: 725391 - DNA, 1032 bp, Homo sapiens
gtttaacgcaatgcagaacggaacccatgatacttgatagatttgtgaaaacttgttcagcctggattattcattacttgtaaatactagtgagaaagcgatattctgcataggagaacaccaaaagtgtggggcatgcgtactgttcccttcagttaatagagcttattggcattatgtgaggtagaatagctactgccagtttgaagttgaaggtggttggatgacatggaagtaatcgaaggccggacagttgaacttcgttggatttgacggggatgtagatgatcagaacgtgttcagctactaaagagtgcagttattcttcaaggaaaagggcgtacatacattagtgccaatagtgtgtatttactgcggtcttgtagggctatccacctgttctcaacaagtcagctaggcctctagcccaaagcctcggcgagctagaactgaacttcagagccactagaagcaggaccctcacctagagcactggtcggtgaccttgcctaccccgagtggcctggtgggcagagtcatggaactgaaacagacttattctcaagctctaggagtctaatggaatttggcttgctcggttttgacttccttgggatcatcagcctttttttcctgtgtctcctattggagtggggatggtctcttctataacttgccttagccttagacttttggaaagccacgttactcattctggtttcacgtgattcccagctggtgaggacattttggctcaagatagggttgtacctaagaccaatgctttttgttttgaatggaaactttggaattatagccaatagaggtaaaagctagaaagtagtaagaacacattgggagaatatgggaacagaaaaagtagatataggagtatgaatatagaaagggaaatatataagaggccaaaagaaatataataaaaataggtgtcccaaaaagattttgagaagaaacaaggtgtggttagaaaaaagacggaaaaaataataaaaagacaaaaaataaaaaaaa

SEQ ID NO: 725392 - DNA, 438 bp, Homo sapiens
  misc_feature (36)..(36): n is a, c, g, or t
taccccccaatggaatcaagcccagtctctctctcntcaaaaaaaaaaaaaatctctcttaagttttatttacctaccttcttaaatagagtatgagtctgatttatactttccctctcattaaaaatattgagtgtttgttgtgtgcaaggtgctgtgctagtaaacaaggagttgtgatgagcatccttaaaatctgtaatacgtattatgaaaaaaaactaaaagttgctgtgagagcttaaaataggattatccttaatctagatggagtccaggtggggctttctgtagcagtaatgttctgactgagataaaagatgagtggtatttaagcagacgaggggggaagaggtgttgctagcagagtcttttataaagaccccttattgtgaaagaagcaggttatactgaagaaactagaagtccagtccagaa

SEQ ID NO: 725393 - DNA, 865 bp, Homo sapiens
  misc_feature (2)..(2): n is a, c, g, or t
cnaataaaaatagtaaaagtaagatagaacgcgatggtagataatatttgtgactatgttcacggattcttccccagttggcacatttcatttattgtatagagcttagtatatcaacaccgtggagccctttaatttcaagcactgtttaagttccgcactctagattccttgtccgaagctcaatttctgatgcataaagtctattcccgtaattacactcttcacacattttggcaacagccttgtaaacttcaccagcagtcccgggtaataatgggtagcgttcccccctcgccataaataacgccctggggttcagccccctccccgaggggtcaacccctatagcccccctatatatgtgattcatggaatctccccctgccaccctcgcgtgcaaattccaggcagtcattctcctaatgtctttatggacaaagccacaagaacagtttgcccgagaacataagtagagaaaacattttcaacagtcactgcctcaatacagaaatatgcctttgttcacccaccaccccccatagattcagataaaacctggttcataaaaagtatgtcccgcagacttttgctcccacagaagaatcgcataccccgccatgtgcacgccatacccagactatgggcttcgggtaacgaaacggagcacagcccaaagcgtgttcgcaccggaccccgggaagccccgatgcttctttaataataaacccacaaggggtacaatcccacacactgctgaaaaatctattctgttgttttaaatctggaagaatcctcactctaacaggcggaaaccgggaacatcttttgtttacgaaaggggcccggaaccaaaaaacatgac

SEQ ID NO: 725394 - DNA, 108 bp, Homo sapiens
catattcggtgcggatattgccagttggtacacgctgacaccacctaccgcgctatcctcgccctgctgaacctgaccggttgccaggtcgtaacggtggcggttggg

SEQ ID NO: 725395 - DNA, 516 bp, Homo sapiens
  misc_feature (169)..(169): n is a, c, g, or t
  misc_feature (513)..(513): n is a, c, g, or t
tgactcctgaggaaaaactacggctagctgctgcagaaggatgctgatacgttgttaccggcttataactacccagaggctgtactgaggcaggggccaactgaagctgcggaggcagcctgcgcagaatgttctgcacacaaaccttgtagaagatgtgtgcatagcnggtccactgctgctgcccctgccctgactcccagccctgcctgaccccacctcaacctgctcaggctctggcgcaaccctggctgccctgccactgcctctgccccagagttggggccttgacagcctggttggaaggggacaccccagccctgcctcaacacctgggggtctccataactaccacaggcaggtgggcaaccccaaagatcccaggactcacagtaccccctgagaacatggacagtatgtgggggtagcaatggagggcaggatggttatcttctcccaggtaaaagccatttaatcctttcagtttgggacggagtaaggccttcctttttngtt

SEQ ID NO: 725396 - DNA, 442 bp, Homo sapiens
gctcggcccttgatgacgaatgtggaagatgcaaacaagtcgtaaagttaaagcttctacagcttctaaataccccattgagtctattgtaggacagataagcctagtattttacttgcctgaagatgttcatgtaggggcaacgcgtagtgaagtgctctttgcttggggtgcaccgcggagctatgtggcgggataatacagatggttctttgttatggctatatgaaggcgttattggtaaagaacaaactattacagaaaatacacaaaactctctattcaaaaagaggagttttcacatgttggtgaacaatacttatactagtgactctttatcaggttctaacagttctgtgggttatgtatggctttcattgaagcacgggaaagtcacgcatttgggaatgattgcgggtcatggactggcctcgttttgcta

SEQ ID NO: 725397 - DNA, 174 bp, Homo sapiens
tgtactggccatagctgattcttgagtatcctggttaccgtgggactcactgacgtactgtattccagatttctcttgagcgcgtttctggagccggcccagaacagagggaagccagacacaccataccgcggcccagacagtaggcagggctggctgctgggtgctaggtca

SEQ ID NO: 725398 - DNA, 1110 bp, Homo sapiens
caggagtatcactgcttgatctgtggctgacactgtatcttctacaacaacaagtcataccacagacaagcctgccgctccttcatttggtgtccttatcaaatctgccattacccattcccacagtggatagcttcaataccgacgaagccgaaaatggctttgggatacaagatgccgagatgtccctgtatgcatgtccagaactctcagaactacgtgtgtcacaagtcacagatatgaatgaacaagaggacggtataactagacacagttgtctgactttgactcaactaacaacgaaagtaagttaccgacacaaagatgacttagtagaaaagtagttgaggaactcagcaggaaacaaatctccttgtggagcccagcttggaagccaaaagagactaaattggtaagagataacgtatgaattatcttacacaggatgcacgtctcacgtattacgataagaggaagactgctagaggcagcaatgacacttaggtgagagctgtagtgcaagtgcccttcaggacaagattgaacagtaggctgcagatgaagggtgaggacagaactctgacttcaatattgcaggaagacgttcattggacgggaaagcatggacaactacgctgcatcaactccagtcagctcccaatggcaaaagaagaagaaaccaaatacgcaccactgcacgacacgacgccacagggcaaggaagacacacgtaccagaccacgggcgactcagcgcactgccacacagcacaaaatcaatgactccaccgtgacttcagaactcaccctgagcaacaaaccatgcaacactggccccacgacaagaaaagaaccaagcgggaaagcacaaagcaacgccaaccgcacccctgagccacactaaatccaaacgggagaatggcacacagaccaatgtgaccagttagccactcccagatgggagcgttagacatccacaccggactacagcccacgacaacaggacaccggaccaaacaccgcaaaacctgacgacacagcgaccagtgacacgtgccagacgcaaagacacaagtaaaagccagcaaagacaccactcggcacgctaaca

SEQ ID NO: 725399 - DNA, 147 bp, Homo sapiens
cccacaatacaaacccctgaccctcctctccagccctgcatctcaccacctcctctatgcgtctgcactagcctagaccatcaatggcttctggtaggcgtcctctacatctctctcccacagtaaccccgtgccccattcggcccc

SEQ ID NO: 725400 - DNA, 348 bp, Homo sapiens
ggcatatacactgcgatctctgcaggcacactcttcacagcgctatgctagcactgatcttttacctgtagtaggcctagaaatatacatgctatctccaattcccgttttaacccaaacaatgaaccctggatacacataaactgccatcaagcatttcctgacgccagcgaccgtatccataatccttctaatagctatgctctttaacaatatactcttcggacaatgaaccataaccaatactaccaatctgtacttatcattaatactcataacgggtatagcgatccctatgacatgcgaactggttagtctcacatgacacctatcccctatctcaatctg

SEQ ID NO: 725401 - DNA, 1673 bp, Homo sapiens
  misc_feature (1344)..(1344): n is a, c, g, or t
ggcgagctacggagatctcgccggatttattgttcaccgtcggatggtctgcagcaacctccgattcctctcctaggcgaactagagccactggctaaaagttcacccatgtcatattctctaagatccgatgccaatggggagatctattgtattcttcgcgggaagtccgctacttgatggaggttgcactctcattcgatctacaaaaaggtcatcattcaagcagacttgcatgttgcaccaagtagtgtgcttcaaacctggtcatactatgaagagcccctagaaagctccgaggatcagatgataatgatctcgactatattgtggtgaacggtgtagttcttcgtcatggacttgtaagaagtcccagtaacacatacatataactaattagacggcctgctcctgggttacagtcagaggaatactggataacgtacatcgatatagcaaacgacgaatagactctgaacgaaatcttgaatggagtccagacgaaatagggctgtagagcataccaagcacacgaaatcaagagtatcatagacgctaagaggctaagccaaaaacaccggcccagtatcacttggcaagcaccagtagatacccccattctggccctggtctactagggctaaacatgtacactagagctagagaccaggcttagaaccagaaaaggggggtggggatccccaccaatatggatataccccagacaccaacgaatcctggcattccgataaccttttagcggcattgggcacaaaccaagtcagtcggacacggtttccacgtacccattcgcaccaacgatacccccagggaccggtttccaaatttggtacaattcacaaagttgcgtcccggatgatgaacctcacaattgagcatagagacagatacgactagcacttggggagcccactagacaacagtagaacgggttaccatatttagcaattgcccatcctgcaccaaggaactaggggatcgcacaagcaacgaggaaccagttttccaaagagggacaaaggcccagcattgccgagcaccatttggagaaacgaccaaggacagcgaatgttgaaccccaggacaggccccatggaagcgcaaactgtgtcgccatccccaaggggcacggaacacagtaattgggggaacacaaggaattgccaaaccagcaaaattgctggagaccgcaatgaacacaggtcccacggatatgagactcaccccagatagtcaagtctccctgtcaacgaaccgtaaccggaaacgggccccttggcaagcctagcacaaacacaagaagtggctgatactatgagcganaaaagacatgtggctggaaacacacaggacatataagagctcggggctcatactcaagaaaactgagcagagcatcagacccacgcaaacctaccgcgaaagcataacccgctcagcgtcacgtacgaaacaaataactgaacacaacagtgaaaactcatataaaacctaacaccacggacatcacaccgaccacagaccaagtgaacaaatatacatagcactgtacacaaaacgtcgcactgaaccacatccacaccagaacacaatgaacataacgaacaaaaccacgtcaaggtagaactaacctagacgaaccacacatggac

SEQ ID NO: 725402 - DNA, 842 bp, Homo sapiens
  misc_feature (765)..(765): n is a, c, g, or t
  misc_feature (785)..(785): n is a, c, g, or t
  misc_feature (825)..(825): n is a, c, g, or t
ccaaaatccaatagggcagtcattgagccttaaagttccaaaatgatctccttagacccgatgtctcacatcgaggccatgctgatggaagaggtgggctcccatggccttgggcagttccaccccctgtggctttgcagggtacagcccccctcatggctgctttcatcatgggctggcattgagtgtctgtggcttttccaggcacacggttgcaaactgtaggtggatctaccattctggggtctggaggatggtggccctcttctcacagctccactaggcagtgccctagtgaagcctctgtgtgggagctccagacccacatttcccttctgtactgccctaacagaggttctccttgagggctctgcgcctgcagcaaacttctacctggacatccagggatttccatacatcctctgaaatctaggcagagctttccaaatctcacttcttgacttttgtacaccaccacatggaagccattagggcttggggcttgcaccctctgaagccatggcctaactggaccttggccccttttagccatggctagagcagccgggatgcagggtaccatgtcccaaggctgcacagtgcaagggggactgggcccaaaccacaaaaccttttttcttcctagtcttccaggcctgtgattggaggggctgctcttaaggtctctgacatgccctggagagattttccccattggcttcgtgaataacattcatcttcttggtatttaagcaaattctgcancaggattgaatttctcccanaaaatgggttttctttggcatcattaggcttcaaattttncaaactttcatggtctg

SEQ ID NO: 725403 - DNA, 240 bp, Homo sapiens
gtaccagctgaaccgttttgtattaaactggccgtctcccggtcactaatgccctcttgtggttatccctaggagcggcccatgacggtccctgtattcttgtgtcctagaagtcaccgcggaggacaaaaccaaggaggagaagccagaagccaaagggtgaggaaggagtctgcctgtgcacatctccctagcataggagcaccagcccctttgtccaccactctgaggaaaggcaca

SEQ ID NO: 725404 - DNA, 155 bp, Homo sapiens
gtgattacagcgctatctacaaagttcttccagcactaaaaaaactagcgtcccaaaatgatgtgtatctgttacacatactctacgccctagccaagctttgctttttcttttatattctctttgtagagaacggaattctggccctctgttcg

SEQ ID NO: 725405 - DNA, 157 bp, Homo sapiens
tactggcatttgtggagaaagttgaacagcagccctttcagtagtttggcatctcagtgcactcaggtagctcctcttctgctaccactggcatcctccgcaggtggcacccagactggactcgagtctcactcctactgcagtattcgtgcatcta

SEQ ID NO: 725406 - DNA, 197 bp, Homo sapiens
ctagacgctgtaactatgtgcatttgatgtagaactactgttacattgcacacgttctttaaaattccaatagcaggaaattgctgtctactggacacgaaattgaaggttctaaattagttccattctggagctggctacatatgggtaaagacctactttttatacgacttcgacatttgactggtgcctggagg

SEQ ID NO: 725407 - DNA, 217 bp, Homo sapiens
gaaaggtttgttaagcatctcttaagtgccatgatgagcataacagccggccgtggtggctcacgcctgtaatcccagcactttgggaggccaaggtgggaggatgacaaggtcaggagttcaagaccagcctggccaacatgctgaaacctcacctctactaaaaatacaaaaattagctgggcatggtggcacatgcctgtaatcccagctactt

SEQ ID NO: 725408 - DNA, 1673 bp, Homo sapiens
ccagcctggccaacatggtgaaactccgtctctgctaaaaatacaaaaatagctgggcgtggtggtgcacatctgtaatcccagttacttgggaggcccagttacttgaggtgggaggatcgcttgagcccaggagtttaagacctgcctgggcaacatagtgagaccccatctctacatccaaataaaataaaataaaataaaaaggtaaaaaaaaaaagagagagagagagcacgataatttttgtaccaggaatgaaaagggagcccaaaaatctaagcagtgagcaggtgctgaaaccaacgtactcacagagcaagccaaacaggattagactttattactggggactgggcttgaacctccgggctgcagcatcagaggctaacagaatggagagtaaaaaggtgggcaaaagacttggggctggaaagcagcagatgggagcagaattgacagaacagcacatggccaggatatccctccccgctaaaatactaggatactgacttagaaaagcagagggtcagggaaatctaaaaaaaaaaagactgacatttctatttaagagacattgcctaaattgctgattaaataaacagatccaaccagatctaaataatattggacatttaattagttttcctattacactgcaggtacagcctcaggaatacttataggcaaaattaaagtgctacttttctatctgcctctctgagttggagtgagttaaatgtgtaacccccacattgtatataataatctcttacaatcttgttcatagtgccacctatggtcacgaccaattagagctggtaagacagctgtactgtttgcttcagccaatgagggtaaatgtactatgttgctaaaactctcagcccatgagtactctcctgagctatcctcagccaggcatgcactgcaagatgggtcatttgtgcttctttggcttaactttctgccattgactttgggttctagggaacagattgaccccaaacatctgacataacctacgtaagtgacagtgttggcttagaataaagaaacaaagactatcatggcatttttttaataaagcaagtgttacagtgacctgttttggggactgccagagattaggtggcagttgccttctagatctagccacaggagaaaaaattaaagagccatatgactgtgaggcagatcctcatcagggaggaggcgcagtgtctttttaaccactttgaagaccaacagccaagacatcttgagctagttgtggtggacagagagttccaaacacctcagccaccaggaaaagggagtggccaggaagaggctgcaggctcaagggcagggattctcccacccacctaaggaacctactgagcatcgaaccactccaacttgccttgggaggaggacttgaatgctaccaaagactgctcgacaggcctgcaaggcaggactacttttgtgagaatttgaagaccatgccgacctgtcatttaaagacacccatctctgcctgagctgtcagatttgccaagttctgggttgtctcataattatttactcagtacaaaataataccagccatgatcctcagtggtaagtagcagaaatcaactgtatttgtttgctaaggctgtgctaataaagtgctgtaaaccatgtgaaa

SEQ ID NO: 725409 - DNA, 858 bp, Homo sapiens
cacaggtgtcgtgaaaactatcccctaacacattccaacttgggataggtaaccgactcatatcaaacacttgtcgtctaggttggatcacgtactattcgggcaagtccaccactactggccatctgatctataaatgcggtggcatcgacaaaataaccattgaaaaaattgtgagaagagaggctgctgagtatggtgaaacgggctccttcaagtatgcctggatcttggataaacttgaaagctgaggcgatgaaacggtaggtagtcaccatgttgcatagtctccctcgtggacagtttgagaccaacaatgtactatgttgaactactcacttgattgcccctagggacacatgagtagctttatcagaatacaacaatgcatttatcacgggaatcactcgtcagggctgagctgctgcctgtcctgcattcgtgtcgtcatgctgggctgttggggtgaactttgaacgctggtatctccaaggaatgggcagacccgataagcatgcccttctgtgcttacacactgggttgtgacagacacacttaatagttcggtgttaacagaaattggattccacttgagccatccctacagccagaagagatatgaggaaatcgctaagtgcattcatgtacttacattacggaaaattgggtaccaacacccgatcatcagcagcatattgtgccaatcctctaggttgcgaactggtgacaacaatgtctggtagccaagggtgtcgtagacagtgccttggtgtcaaccggatggcaaagtcacccgtcaaggatggcaaatgccagtggaaccacggctgcttgaggcatctggactgaaatgcctac

SEQ ID NO: 725410 - DNA, 143 bp, Homo sapiens
agaggtccctcacaacgtattctcaattagaccccctgccattaccccataccaagacgcccctcttcgtttgatccgtcctaatcacagcagtcctacttctcctatctctcccagtccttagctgctggctatcacgtata

SEQ ID NO: 725411 - DNA, 833 bp, Homo sapiens
gctacaaagatgccatggagcagtgccagaattacaatgctcgcctctgtgctgagcgcagcgtgcgcctgcctttcttgtgactcacagaccggagtagcccagagcaattgttacatctggactggaaaagctgacacctgtgggtccatggattggcctcctggacagctgtactcctaccctgccctggctgctggctgtgaaaacacgctggcgatgcccatccccctgaggatccacgactttccttcccatctattaagccagacacagaccagaccctgaagacggacggggctgatctctcagcgatggcagcactttagaggctctgctcgctgcactgaccccctgcagaacgcgaggtgccccggatccccgagttgatgactcgacacgcctgggcgagtttcctgtgaccaacagtcgagcgcgaccgcggatcctagaaccagatgacttcctggactgacctcgactgatgaacgacctctgacacgaacgactcctacccaacgccgtcgggcgaacacgcggcgaccatcccaaagggcctacacggcgtgtcggcgcagaggcccgcaacggaaccgctgtgatgtctttccaatccctgggcagcgactccgggtgcatacgcgcccgtatgccctgctgcaccactagggatgggaaacaccggtacacacagcgaaacccgacccaggggcctcccagcccccccgaccttcatcgccccaactaccacaccatcgcgctacgacaggcacggagcggccgcaccgaaccccacggacaacacacccacccaccacacccccccccccatg

SEQ ID NO: 725412 - DNA, 500 bp, Homo sapiens
  misc_feature (79)..(79): n is a, c, g, or t
  misc_feature (395)..(395): n is a, c, g, or t
cctttggcttgtgacctttattggacccttatcagtggttctgctttttccttttgtcctgttccctcagaagcatgtnatctttgttctgctttttgccttttaaagcctgtgatctttgtacctactcccagttttacaccccctccccttttgaaacccttaataaaacacttgctggtttgaggctcaggtgggcatcacagtcctaccgatatgtgatgtcacccccagcagcccagctgtaaaattcctctctttatactgtctctctttatttctcagctggccagaacttatggaaaatagaaagaactacattgatatattgggggtgggttccctcgatatactgggtttcaatttactgtattagtgtgttctcatacttccgntaaagacataccttgaaactgggtaatttataaggataaaggatataatggacttacacttccacatggctggggaggcctcataatcatggcagaagacaaagg

SEQ ID NO: 725413 - DNA, 831 bp, Homo sapiens
tgacccagcagctctatatgaacttactaatacaatacctcaaatcttaaatatacctctttaactggcctccgattttgaggctgtaaagggcatgtctgtagctctcgagtcgctgtggtacaagtgaacgatagttgtccagtagtagtccttagtggtcgagcggactgtggcgatatcataggaccgtcactcttctttgctgcatgcccgagaatgaaacacacgtgagtccgtgaaccatctccatgtcagtagtcgcctgagtgtaaggtcactcatgtctattcaacggaaggtgcacgaaactgggctacgacgaacaccaggacctggaaagttcggcatctaaccttgctgtacatgcattcaaaatctaagggagatagtctctcgccattttcagaccatactcaatgcataataagcgcatttggagcgtgtcgaacggggcatgtcagtatcttctttgttcggtccttgggcatgaagaggtacactctatggagtgattcttggtgaagtatactcgtaaaaaacgtagagggttcaagtggtcgcattattagtcgctgatctagtagagacgctgtctcaaaacaatatatagaaattggggattgaaagttaaaaaaaattattctgtggtctgttgtgggggaggaaggcctagaagatcagagagtgagtcctgtttgtcggtgcctcactgtctggtactattttggggtagtgaatatgaacccagagtgccttttctgtcaagaatatatgtgatttagtcctaatgtgtgccgggtgtccttggatatattaccctgtgttggg

SEQ ID NO: 725414 - DNA, 110 bp, Homo sapiens
  misc_feature (71)..(71): n is a, c, g, or t
ggggggcttctacttagggggcaggcggacttcgatggcaaccgcagatcagtttttttctctttcacagntagacattcatacaactacttcaaagatatagtcaatag

SEQ ID NO: 725415 - DNA, 513 bp, Homo sapiens
agcggggggtgcggggagccgccgcgcgtcgccgggcggtccaccccgacccccgcagctctaggtgacgcgtctcacaataacagctcgccgtggagccgagctcaggcacagccggaggacgcgaccccgaccagaacactcatagagtgggccagagggacctacatagaagagactgtgaaagcgacttactgcaagacccaggagacaaaggcctgggaggctagacagggctctagcagacactatccaggttggagaggactatgctagtatctccatgcccgagactatgaacatacgattgctcatcggtcaaaagatcatgggagaaacacacatgagagttactcgcgttcacaggaaaagaatggattgtccaaatgtggaaggatgaatacagggattatatacgtgacaatgatggaggtgtcaagaaaagaagatggggcgcatggagcaaaggcgtggagatgtacatcaccatagggatgtagtaaaggtggaaac

SEQ ID NO: 725416 - DNA, 228 bp, Homo sapiens
cctatctctatataaagaaaaacaaaagagatcccatttcatattcatcagtatggtaaaaataaaaaaaaaatctagccaaagccaagtctggatgagatatggagtaccagtaagctaactccccaccggggtatggttcacatagaggactaactacttatggaggacatggaagatacctcaagtttaaatgctttataacccaaggctcagtcaaacggacgg

SEQ ID NO: 725417 - DNA, 110 bp, Homo sapiens
gaggatccctgtgcgtgtgtgtatgtgtgtgctgggcgaggtaggaaacaagagatattgaccatgactcccaggtctctggcctggctggttattgccattagtggaga

SEQ ID NO: 725418 - DNA, 137 bp, Homo sapiens
  misc_feature (127)..(127): n is a, c, g, or t
atagaaatagtagtttccatagagaggtgaaaacaaattcacaaagggacatagtggcattgtctagacactaagagcaacagagttgagagctatgatttctaaactttcacaggggagcattagnacgagctata

SEQ ID NO: 725419 - DNA, 421 bp, Homo sapiens
ctttctgtagcaagggccatgcgaacattacaactatggtttcaaacagtgggcccatcatcgctgttgactagagtactgaacctcccgaagtaccggacaccttgggaaaatgcctaattgatactttaccgatgtgacatggccaggaatgacttccataggaactggttacttcattggacactctgtgctgctgaaattagcctggccaatagcttgagcgaaattgacctcagggaaccctaagtctgcgcagtgtccatgttgacagatggaaccccgtgcttaaccctatgcttccggacagctgacagtttgcgaccaccacatgatggctcatgatggaacatgcagttggactcgggcactttaattccgataccctgcctagattacatttggttccttgggtcccgct

SEQ ID NO: 725420 - DNA, 1155 bp, Homo sapiens
gcccacacgccgggtccggctcatgtgccggtcggacgctcctcgccttcttgcggtgcgatggcctcgctccgggtgtgagcgcgccggcggcccgcgtctccctaggatccctgagtacggtgcaggcggtggctggctctcgcctaccatccttactagcatgggcgcctgtccgtagaatcctcgccacggtaacggtcccgtgtggcatcagtcgccatcttgctccacctagcaggggcactagccatgggtcagaacggggtgtgactggtgaacgagactagtgataacagctgtccgagttatgcatggtaatcattactggggatccaaatggtatccttactcgaatgaatgcgaattgagtgctgaacgtaggcgctcgatatgagtaagacaaggggccctttaaaaggcaatgcccttggccaagatttgacgtggaggctaaattgttgcgaaaaacgtgtgttgtagacaccttgtggcatttaacgcctaattctcgcattgcggcaagaagacatgaatcaaatccttttggaaagactctacccgagaattccagacattttgtcactgaattttggcatccactggagctgcatagattcgcgaaactttcgttgcgtgaataaccccctgcagagagagcattgttaactaccatgtgaacctaatgatagtgcaatatagtgccccccgatacatgtgccttgcaaataaccccgtgttccttacaatccaaagtacctatggctaagttcatgggggtgctgcacgcttgaacgccgacccaagaatgtgacgaagtcctaacagtagccgtgaaattcgggggcttccaaattggagggcttttcccatacagtatccaatatccgtttacaccgattaaatattaaccgaccgattgtgcccccaaatgtagaaccgggtaaacccagtttggaacacggcgcccatacaagcacaagacctttgcataggtaggcaggactatagattgggggcgaaattgggcgatagacacaagtttcccgcacaagacaaggggtggcttcataagggcaacaagcagcaaagagtccgttaaattgaagaaagaaccccttccagatagcccacatggaggaggatcgaaaggaa

SEQ ID NO: 725421 - DNA, 253 bp, Homo sapiens
tccttttgcccccctgaagcccctgtatttgaccttacgtgcccttttacctaggagaatcgggctcctttattaatgatgataattataatgtatctgtcccgcccttttttcctttgcgaagtgctttcccatccctgttagtttctagtttttaccactgtaaggataaaacccgtcatgtggattcctttttaattggtgctattggtatttcctctgttattgctaataaattaaaatggtggtatta

SEQ ID NO: 725422 - DNA, 411 bp, Homo sapiens
gtatcatacatgctgtttggttacatagagcctgtagtatatttagaagtccaggtagtgtgatgccatccagcttgtccctttgctcaggattgcttcagctatatgggctcttttttgattccatatgaattttaggattgtatttactaactttgaaacaatgatgtaggtgtactgatagcagttgcattgaatctaccaattgccttggatagaagagtcattttaacaatattaattcctccaatccatgagcatgggatgtctttccattcgtttgtgtcctcttcgatttgtttcatcagtgctttgtagttttccttgtagagatctctcatcttctgggttaaatttattcctaggttgttgggtttttttttctttttatctattttcttttatcttttt

SEQ ID NO: 725423 - DNA, 344 bp, Homo sapiens
gagatgtcaagagaagagacgagataagtcttgctctttgtcactcaggttggagtgcaatggcacaatctcggctcactgcaacctccgcctcccgggctcaagccattctcctgcctcagcctcccgagtagctgggattacaggcacctgccaccatgcccagctttttttttgtatttttagtagagacaggttttcactattttggccaagctggtctcgaactcctgacctcgtgatctgcccatctcgtctcttctacaagagaagagacgagatgcatggggaaaatatttgcactctaaacatacagagatagaggttgggcttgtggtacttaa

SEQ ID NO: 725424 - DNA, 292 bp, Homo sapiens
caggttccccagatttgtgaaccagccaagcacagtggtggcagggcctagctgctacaaagaaaacatgttttagacaaatactcatgtgtatgggcaaaaaactccaggcctgtatttgtgactaattgtataacaggttattttagtttctgttctgtggaaagtgtaaagcattccaacaaagggttttaatgtagatttttttttttgccccccaagctgttgattgctaaatgtaacagtctgatcgtgccgctgaaaaaatgtcttttttttaatgtgctgtgta

SEQ ID NO: 725425 - DNA, 379 bp, Homo sapiens
  misc_feature (375)..(375): n is a, c, g, or t
gatccacaaaacataccacctcccaaagtattattattggaaaatcgaggaagtgacgcacatttagggaaaaactactcaccttagaaaagtcactgaaatcctttttttttttttttgagatggagttttgctcttgtagcccaggctgggatgcaatggcatggtctcagctcactgtaacctccacctcccggattcaagcaattcttctgcctcagcttcccgactagctgggattacagctgcctgccaccgtgcccagctaatttttgtatttttagtggagagggggtttcaccatgttggccagtctggtctagaactcctgacgtcaggtgatccgcccaccttgggcctcccaaagtgctgggnttag

SEQ ID NO: 725426 - DNA, 442 bp, Homo sapiens
ggagctcggccgtgttagagtaaggcagtacccaacattatacttattgccaatagattgttgtacataatactatctcacttccaaatcaaaccgtatttgctgcggtgataggtgtattacgagttccaacatgaggcgtccggaatagatctcttgtaatagcagagatgaggtttcttccacttcgtcttccaaactgccttgcttacgagaagtgggaattccttcagctaagacatttggtgttgggacataggggctttcatgtgtaaaggaaaaaagaaatagaagaaaagtctgcagggagaagggggaggaccttacacatagcaatctcagctggcacacctaattgccgttttccccttagctcagctgaactgacagtctcttaccttggtgtcagttaagtactgttcccaggtgcctttcaggcact

SEQ ID NO: 725427 - DNA, 581 bp, Homo sapiens
  misc_feature (83)..(83): n is a, c, g, or t
gctgatcgcggagctggccgccgcgtgcgcgccctgcggcagcaactgaacgaggccgcgcgactcccagcgtctacgcggtnggactacggagaccgttgacggcggccggttcatcgtggacggccaggctatgccggtgtccgagggcctggggaccggtacgtgccgccagcgaagatgccggccgtcttgcgagctggctcggccagccttcccggcttcttcgggcctggggccggcctggtcgaggcgccaagtcctggcgcttgtgggcaaggcaacggaacggaaggcccggtggcattaaccatggagcggcccttcagactgctgtgtgttgctgggcccggaactaacgacggtgcggcaagggtaggaaacctttgggaacccaacgggcgaacagcgccgccccgtggggggcggcactattctcttgggaacctcttttccaacacaggggggcaacagaaccttggaaagcaagcccggaagagcccgcccggggggcaaggcaattccgggaaagcgaacggtttcgcattgggttaaccccaaatgggaaccctgggggccgg

SEQ ID NO: 725428 - DNA, 541 bp, Homo sapiens
tgggctctgggtggggtggagagggaggccaaagcagtaggctgtagaggggcggtaaatccaaggggaggatagcagttatggcatgtagtgaggacaagcagtgggtcatcagtgaatggctgtttatgtccctgccagtggtcatggtgagtccttcggaaatgggataaggttttttttacagtcatctcaataggctgaggatcatttagatgtgcacggagatccatgaggagcgggggcatccaggtgggaacatcgtatggactagaaagaacacttgcaccaagtcctagcaccccagcatggcgttggaccaactctgcagaaggaagggtatctcctacagaaccagggtctcgctttctttcctaaggtagtttggtcctgcaaagtggctcaaaaggattctgcttaggacggtccagggtaagaaagttacatggtagcagaccgcttaaggtagtagcagccatttctcgaacctccagtggttcgtcctccaaaagacttataaccagccacctgatatctttaa

SEQ ID NO: 725429 - DNA, 780 bp, Homo sapiens
  misc_feature (405)..(405): n is a, c, g, or t
  misc_feature (408)..(408): n is a, c, g, or t
  misc_feature (411)..(411): n is a, c, g, or t
  misc_feature (422)..(422): n is a, c, g, or t
  misc_feature (432)..(432): n is a, c, g, or t
  misc_feature (435)..(435): n is a, c, g, or t
  misc_feature (484)..(484): n is a, c, g, or t
  misc_feature (507)..(507): n is a, c, g, or t
gccgggagtcgctgggtgcgtggggctgcctcgccgcgtctcgccacgggctctgccagcagacagccttggacacacaggcacaagggctggagcccagagatgagagtgcccaagggagatgtgagccgtggctgggctgcccgctaacctgtctgctgaagccccagaagcgggccctcaggccaggcctaccctgcctcctggcccagcatgcgcctgtcggtgcggagggtgctgctggcagccggcttgcgccctggtcctggtgctggcggttcagctgggacagcaggtgctagagtgccgggcggtgctggcgggcctgcggagcccccggggggccatgcggcctgagcaggaggagctggtgatggtgggcaccaaccacgtggaataccgctntgncanggccatgccgntcatcttcgnggntggcgtgcctcgcagtggcaccacgttgatgcgcgccatgctggacgcncaccccgaggtgcgctgcggcanggagacccgcatcatcccgcgcgtgctggccatgcgccaggcctggtccaagtctggccgtgagaagctgcggctggatgaggcggcggtgacggatgacgtgctggactccagcgtgcaagtcttcatcttggaggttattgccaaggcccgagagcctgcctccgtgctggttatcaaggaccgatctacttctcagaactcggtataccttgtaagacttgatcccgatctccaaacttctgcttgaaattcctaaaccgacatactctc

SEQ ID NO: 725430 - DNA, 932 bp, Homo sapiens
tgtcgggcgacgggaggtggctcccgcgaggtgagtccctatcgctgtgaaggcgggaggcaaaacgagggtcaggttaggatggctgatggggatactcaccggctgaaggccgactgtgattccgcctacccccacaaggcgattttgacccccgtagggtctgctctagagggactcaggccccgaagctgtcccagtggaggtccccgctgcatccaccacccaagtctgtgcctcatggagtcgcatgtttagcagccctgccgaggcggctgctgcagcgagtagaccggtggtgccatgtgactgcttactcctcttccggacctggactggaggtgtactgaggctggagcgagtctgctggatttgtcctgcgacctgggggtgtgaacggagggttcttggccccccggtttctggccaggttccctagacgccaggctaactttgggggaatgattgcctaaggtttgtggccttagtaggggctaggcacggactagcgagcgaggacggaacatggggtgtccagaaagtattggtttccaatatagctatgtgggtatgaaacggaccagaggagcccccttttacaacacccccagcgttgcgcgtgtggtcccctcaacaggtgcgtgcggacgcgcccgtattggcaccactacttggcccaggcctgcggaacttggattggccccccgacaccttatcaacagcggggcgcggtgccgcgccagtaacacgcatcagtactattcaggggtccctcgtcaactgtcccatgataagccaacagagcaaccgcgtagcgcgccgcccctattgctacgagacaaacagcagaccgcgccgctacattctatccccagcaagcgtgggagggctacaggaaatactcgcgagattccgccacaacagctctttta

SEQ ID NO: 725431 - DNA, 502 bp, Homo sapiens
tcagtatgaaaattgatatcaatgaagtacgagatagtaatactgaaggatccatatcttcaggatgtgccaaaggcacccgggaagtctgcttatctaggattgataccaataccagcttcaattgtttataaaaggttaggatctgagttttttcacatatgtcttaggtacaacgtggtttaggtttaataggtagaggcactttatggttgcgttcatggtcatgacagtttggggtactatgaataggatactcatttccttccaaatctaatctatatctggaacggtcactaggtgttggaagcaactgtacatcatccccaattggactataaggaggtggtgcttctgtgtcatcatctgaatcagggtagttattatagggaaaacagtctctgggagatggtagaaaaacatcttcactttgatgggttgattcccttgtattatcagacaaataagaattatctatcatatttattttctctagaacatc

SEQ ID NO: 725432 - DNA, 135 bp, Homo sapiens
ttcgtggcagcagggtttacaacatttgacctgatttcaagaatgagcattgatgacattagaagaattggagtcatacttattggacaccagagacgaatagtcagcagcatacagactttacgtttacacatg

SEQ ID NO: 725433 - DNA, 945 bp, Homo sapiens
gtaaatatcagatagctcagaaatatctaaggcactgacacttcagacattacagtaaatcagaatgctgagtataaaaaataatccagaactaaagttgttagataaattatttgtgtataactttaaaaggtgtagaaaattttttgaaaagttataattacattgaaagtatactttttccttaaaaaatacagattatttgcaacatgaataatgtaattcaactctcaaaattcaaaactcttcttgttttcttcatttctattgtattcaacttgtgactaattgttgcatcagagataggagaatttttttttattagttgggcattatgatcttttttatggaagggtaaggacattaaaatgtaacacacataaaaatctaagtggagaggctcttttgttaatataagtgacacatgaggtgggtgttcagggtaatattctgcattatagtgacaaaaaagcattttaaattttagttaaaattagtaaattattttactaatgtacttttatgtaataaaatgtacgtcttaaaattttaagttatgtgtgaacttaatattattaagattttatttaacatttataaaactgattttaataagttagtatgccattaatttagctatctaactttactcactggtgtacgcaaaagatggtacatactattggtaactaatggacaaacattgttatatcctttgagtgattaactgaagaggtacgatgtctaatggtaatatatatgtagttaggtaaatgaatatggggacatgagggatattatgcaatagagaattggataaaatagggaaaagtcggaaggagtaagatgagataaaggataaagaaaaagatagagaagtgaagaaagaggaaaaagaaagaggtgaaaaaaaaaggaagcattcatttattttaattttattgg

SEQ ID NO: 725434 - DNA, 590 bp, Homo sapiens
  misc_feature (118)..(118): n is a, c, g, or t
ttttcccgggcgttggtttaccttggtgataaacgccctttccccttttccccccacggttcaatttcaactcccctggtggaatattaggatcctggtgttttcccattttcaagcnactgattcctcctctatcttgaggcaagcagtagatgatagaacaaaataatctaaaggaaatatagtgatgatcattttgtatttctatagtattgtttctccctttttaattctcatggacaaaaagcaaatcaaagagtacttcaagtaagcagaaaagctgatgagactatcaagacaactttaaaaaaattgtaagctcatgtttataaagggaacaaaagaattttcttaatttgaatggtactcgtagcattgaaggcaattggaaaagcttttgtcctcttaagaactgttaaagatatcctagctaattttgtttcatttttcagattacactagatgtgttggctgatatgggtcatgaagagttgaaagaaataggcatcaatgcatatgggcaccgccacaaattaatcaaaggagtagaaagactcttaggtggacaacaaggtaagctattcaaaaaa

SEQ ID NO: 725435 - DNA, 213 bp, Homo sapiens
tgtcagtggtattatggccgccatcatgcgagtagtttctggtgctgttagaccagtacactcctattttcgtcaagcatcatcctgtgtctgtttcagcgtgcacaccagtctggttgttatggaccaggaactcctttctctctgtcagaagccttgcctacgggagtaatattccgcggtatttaagtccctattgcaaagtcagccgca

SEQ ID NO: 725436 - DNA, 695 bp, Homo sapiens
ttttgcaagtgcgctttcctcgctctctttcagtaggcgggcgtattttatacacgggcctgcctcgcgttctggcctgcttccattgcgggggcttctgcactcgagcactcgtggtgttctccccgcgcgtgtttggtggtgggtctcggcccacaaaaacacgcttgttctcggtggccacacaccaacttcttgtgggggcgacacacattgaatgctgctccttgtccgtgacggacggctcccctcgtctagcaaaacaacacgtggtcgggtgccgaagacgagcctccggcgtcggcacatttccttctgcatatgtggggcgccaaaactcctctccttgcaaatgagtgcccacatatatgcggataattttttctactgcgcagtgtattcccccccgcatatctgtgtacaacacgatagatgacatattttcttgtagtatatacagggagggagttataaaggtgcggagcccccgggctgttcttggcagcttcaattattcttgtgcgcctgtcctttctatttttaattcccccccgtcaacgtctatatatttgtacctgttttagagtaatacccacttttcttccttgggtatataatacgaaaccaaatctcgcgaccaaaatttcccaaacatattacagtcgtgtaataaaacaacccactcaatagtcaaa

SEQ ID NO: 725437 - DNA, 693 bp, Homo sapiens
  misc_feature (340)..(340): n is a, c, g, or t
cttgatgcgcccctctgttattcacatcggtgcgacagcccgttacatatccgctgcgcaagtttatctcctctgtcgcgctcgagtatttccggcaacagccgatggctgagtgaggcaaaacttaggtctctctaataccatttctatttctacagttctatgcaatctctctatattggtaccaatgagaccctggccttcgagcttactttcgcgggagctttctgagaaggtttcccactgtttacttcccttttatgatacactagttgacaaggcaagataggcattatcacacaagacatacaaaaaatatcctgctttgctactattatgncatgtgtctgctaaaggacggcaaattggttcacaccttcatgtaagttcttttagctttagggggttgtaaagctactcttattacgatatagaatggcagagttctctcgactttaacaacgggcctgagtttcgtattattactgattatgaacgaattacgagtaccaatgtcattaattgatttttcttgttaatcagaattcctattcctgtacctttcctctaacttctcagatttgtaacttcttcttcttgggagctgagctagtgcttttaggagaacagataaatgtggtctcaagccagccctagagactgcttaattgtcgtatggtgtcattctgtccc

SEQ ID NO: 725438 - DNA, 314 bp, Homo sapiens
  misc_feature (19)..(19): n is a, c, g, or t
actacattgaataaaatanaaagcaaaggccctgaggtaggaataagctgggagtgtttgaggtacaattagagttgtggagaggagctgtgtgatatgaaatgatgtggatgatatttaacgaggccaggacatgttgtgctttttagggcacagtaaggagtccgttttattccaagtggaatggcatccactgaattgtactaagtgcatgacttgactttataggttaacggacgtttgtcctgacttctgtatagggacatagacttgtaggtggacaagaagtgcagactggacgtctgggtaccgag

SEQ ID NO: 725439 - DNA, 343 bp, Homo sapiens
atggaacgaacatatcatgcgattcaaaacaccagtgacagagataatcactaaagtttcccaaaagaaaaaaagtaacctgaatacccagaaactggagcagacatgccttagactttaataccaatactgtgtattagaagatagtaaaaacaaccttttaaattactggctgtggaattatattttatagtacttcaggccaaaatattatatcggcataaatatatttttaagattattgccaaaacttggaaaacagattggcccacctatctccagggaagcctaggtaagagggaccaccaatttcatcacaaattgatgcagtaaagccccagga

SEQ ID NO: 725440 - DNA, 119 bp, Homo sapiens
tcatccccaagccatccttgtgtcatccttgagtgatgaacactgcgttccagaaatgaggaagaggagagtgaagagatggacagaccacagatccattaaagtgtttgcacttcaga

SEQ ID NO: 725441 - DNA, 110 bp, Homo sapiens
ttataacgcacaaaagagagctgaccccagtggtagcagtgggtggtgaattgcccagcctctatacccccatcttacagccatcacagccagtggtgggtggagagcgg

SEQ ID NO: 725442 - DNA, 1339 bp, Homo sapiens
ggacacaacacatagacgcacacactcaggaggaaaagaaaataacaaaggcagaagaagaacacccctgaccgactcccagaccggaccaaaaagacaaaacacatagacgcacacactcaggacggaaacagaaaaaacaaaggcagaagcagacagacgaagacataaaaacccaaccaagcaagaagacaacaaggtaaagacgcgacgtatccaaactctcggagacagcacaaggaccgacaaaggacatggaagaggccaagggacacaccgacacaaacacacaccaacgggaagaccccaggagaacaaggcacgatcttccataaaaaataattacaatcaaccatcatccgaactgcatgatcggagacaaggaaccagacagcccaggacagacaccgccacagaaacacacacggcaggcacaatgggacaacatgacaagaaaaaaaacaagagatgacgccacaaagccatagggaaaccatagaaacaccaagaggacccagaccaggcgcagcgaacaaaccccaaagacagaaggcaccaaaactccgtccaccaaggagaccacaaatgatgaacctacatgtcacgggaaaaaaaagaaaccaagaaacccaaaaacaagacacccacaaaaacaagaagagcaaaaacaaaacacaaacaggacaagacgaacaaacacgagaagaccaccaaagcggataaaaacaacagagacacaggaacacaagcacaaaaagaaaaaaaagaaaacacaacaaatagaacacaaagactagaagagacacaaaaaaaaaaatagaatgaaaacaagagaaacagcaacaggaccacctagaaccaaacacaaaacaaacaaaagaaaagaaaaaacagaacgaaccaaaaaaaacaaagaaaggacacaatcaaagagagacaccagaaaataaccaaagggaacacaaacacccacgaagacacaagccaaagcaagcaggcacaccaaacaaaaaaccgacagaagaccaacaaaaaaacacacgaagaccaccacaagaggagaaagaaagaacaaacagaaaaacaccagaacaaaaaacaaagaaaaaccaagaaaaaagaaacagacaaaacagaaagaaagcaaaacaagaagagaaggagacaagaggaaccgcaaaaaaaaaaaaaagaaccaaaagagaataaaaacaaaaagaagaaggagaaggagaacacacacaaagcagaccagagaacacaaaagaacaaagagacacaggagcgggagaaagacagagagaagaggagacaaaacaggaaaaaaggaaaccacaag

SEQ ID NO: 725443 - DNA, 128 bp, Homo sapiens
ttgactcttccagcttttaaagaatgcttgtaattacatgggctctcctagatactccaggataatcttgttttcaacggtcagactgatgagcagagcattacatttatatctggcactcttaattc

SEQ ID NO: 725444 - DNA, 421 bp, Homo sapiens
ctagaggatctcgtggtcgatcactgtactatatgcctgttttcaactacctgagcaattgtggtatttttttaatctactttttttttttaagaggtgagggtctggctatattgctcaggctgacatcaaactccttggactcaagcactctttctgcctcagcctcctcagtagctgggtattatggtatgtgtacatatttacttttagagacagggtctcgttctgttgtccaggctggactacagtggtataatcatggctcactgcagcctccaacacctgggctcaagcaatcctcccacctcagcctcctgagtagctagggactacaggcgtgtgccaccatgcctaatcttttttttttttttttggagagggagtctcgctctgtcacccgggcgggagttcggtgttc

SEQ ID NO: 725445 - DNA, 342 bp, Homo sapiens
  misc_feature (129)..(129): n is a, c, g, or t
  misc_feature (295)..(295): n is a, c, g, or t
  misc_feature (304)..(304): n is a, c, g, or t
  misc_feature (332)..(332): n is a, c, g, or t
  misc_feature (337)..(337): n is a, c, g, or t
tgagacagggtctcaccctgtcacccaggctggagtgcagtggtgccatcagggttcacaggagcctcaacctcctgggctaaagccatcctcccgcctcagcctcccaagtagctgggactacaggtntgtaccaccatgcccagctaattgttttccagagacaaggtctcactatgttgcccaggctggtcttgaactcctgagctcaagtgaccttcccaaagtgctgggattacaggtgtgagccctgcacctgggccctggtttaataagaaccagagccacaaccctntcagagttnacccagtggagccccagttacctgcctnaattntgtag

SEQ ID NO: 725446 - DNA, 258 bp, Homo sapiens
gtgacctcgcgacgtgtatcccagaattaagtataaaacctttttttaaaaaaattatactttaagttctgggatacatgtgcagaatgtgcaggtttgttacataggtgtacatgtgccatggtggtttgctgcacccatcaacctgtcacctacattaggtatttctctaaatgctgggtcaaatggtatttctggttctagatccttgaggaatggccacactgtcttccacaatggttgaactaatttagcctc

SEQ ID NO: 725447 - DNA, 240 bp, Homo sapiens
gggggggggggttttttggttccaggggggttttccaaaagggggcgggggtggccattccggtccccccaagggggggggggtttaaaggggttttgggggaaaatttttaaggggggtttaaaatttccaaatggggggttaatttagggggggggatttgggggggggaaaaaatccccctcccccccccccggggggccctttgggaagggggttttaaaaatttttttttaccca

SEQ ID NO: 725448 - DNA, 246 bp, Homo sapiens
gagtctgtgtatattctgaatacaagtctttatcaggtacatgattgtaagtatattctcccattccatggctagtcttctacttttcttaataggccgggcgcggtggctcacagctgtaatcccagcacttagggaggccaaggcaggtggaccacctgaggtcaggagttctggaccagcttggccaacctggcgaaaccctgtctctactaaaaatacagaaattagctgggtgtggtggcg

SEQ ID NO: 725449 - DNA, 262 bp, Homo sapiens
  misc_feature (71)..(71): n is a, c, g, or t
  misc_feature (181)..(181): n is a, c, g, or t
  misc_feature (249)..(249): n is a, c, g, or t
gaagctgtgtggagtgtgctgtgtacacatctgctttgttccacacacattgcaagttcctgcttgggtgnttatcaggtgccaaagccctgttctcggtgctgggaagtacagcaagtgagcaaaggagacaatattccctgctcacagagattgacaaaactgggcatcctttgagctngacaacacttttccatggaccataggtcacttgtctacactggggtacacttttgtaccagtgtcggnctccactgatgct

SEQ ID NO: 725450 - DNA, 267 bp, Homo sapiens
agtcaggatatgcatgcacacttcccaggcaccgctctgcttttctgtcagctcacaactgctgctcatgcgcacagagtacaggcgagcattcttctgcacaaacttacactgccaaacttctcagcctactaattatactgtggctcctgcgtctcaaactggaatgtctccaagccaatctggggcctatcaaccattgacaggttttacttcacttcctggaagtaccatgacccctcctccaagtgggtctaatccttaagc

SEQ ID NO: 725451 - DNA, 1528 bp, Homo sapiens
tgtggaaaaagtcatggaggccagggggtgggcttgaaaccagtttgggggggttcgattccttccatttttggtctagaatttcatgtactagcgggtttctctcgaagtgtgtgcgtagggtggagaaaagggccatctgtgccgtaaagtgtaaccgtgctagctctccgaaggccctgcgggacctgtgggctgggtgttagacgcgttggtggaacaggggcgtggccggaggacgtggagccagtgcaatcggtgtttgcgctataaattgttcctcgtggcgtgtcttagaggcagagtgcttatcaagcgctgtgaaacccacatcacactgttgcgtatctaatatagaatgttgttctcctattgtggaacgttttttataaaaatgttaagtatatgtggatgttgggaaagaggttctcaaagaaaaccaagacacaggacaggagagcgggtgggagcggttccttcaaacagtatattcgtcgctaagggaggtggccgcaaagacatatctatagcggactatatacccccgcgttttatctcttgggtacacaaagggggacccctctctattcgtggaacgtccgtctttactaaacgacctttacggacctctggggcgccagctctattttctatcccgaagctcgctcgcgacgcatcggggatacacacgcgtgcacataccgtctggaccaacatctgtgtgacgaacggacgacccccctatccgacacccgtcgtgcaggcagcccatctacttgggcgaacacacactctccctgatcacgaacatctttacaaaacaggccgtccacaccggcgcacactatctcccccaccctctcccagacgcgctgacaaacacggggtgttcacaccaactacaacggcgaggccatctctccagtgcaagagctatgggacaacagctttcggcaacccaccgggccacatccggcacctcgtcaactaagccacagacatctcactcccccccccgggacctccgtggcgaaccaaaacaccacaacaacgcgacacacgtgacactcctatccacagcgacaccatagtagcgtaacccatacgcactccaccgaaacgacacacgggacaagcttccaatacaacgggatatagcatttaccacgtagcagctggaatataaagcattctctgtcctaacagagaacatgtgatagtaagtatcaaaagcagtaccgtcaaggagacacaagatcaagtgggggagtactcagcgcgacacaagaaaggcgtcaggaacaaatagacaggaggcaaggctaagcaacacagacagaacgcttcaacaatgcacgatgcaaggagcaaaagccaactcgaagacggacaggcacgaacgctatcagatgagtaccgaggcagcggcgcggaggctagaccgcagcaacggcatgacgacccagactagcaagcatcagagagagcaatgaagtgaaggactgggtgacacagggcgacacccgat

SEQ ID NO: 725452 - DNA, 431 bp, Homo sapiens
gccagccagcccccccccaaggaaacccttgccttccgaccccagggccggtgcccctcgggttacctgcccggcccagggggtggaatcccccccctattggtaccctccaaaacagggcccccccctccgacagggtcctcgctttacctttgacccctccggaggttcccctgccccccaaccggaattaggggttcaaaaggggggggggccctctggggtcccccccactatttaaggcgccaaaaactggcggttttttaaaactccgggccccccccccgcggtttcaaacaccccttttggggccccccggggtagtttcaccgggggcttggggaggggctgggggttggccgggatttaggaagggcccccccccccgtctttgccccgttcccataaacgtgccctcttgggggcgttta

SEQ ID NO: 725453 - DNA, 443 bp, Homo sapiens
ctaggctagtacgagctggggtaatcggccgagggcccatactgggagaggcttctgggtcaaaggaccagtctgctagcagggatcctgtggactggaagcgagtgaggctccacacgggcgttgcagactaccgcagccagtgatctgggcatccaggcacggccatgacccctccgtaggctcttctgggtgtggctgctggttgcaggatacccaaggcggtgaacgaatgggtgacaagtgctgagcctggacacgaatgtgggtgcgaccacactatactctagggcccgcagtgtggagaatcttctatcataggccattctggggcacgtgtgtgtgacatacctgtgtgaccttgactgatgccagcgtcatcttgccgggccctgggcttctagaacgccacccaggcctctggagctgagctgccttcgggc

SEQ ID NO: 725454 - DNA, 218 bp, Homo sapiens
ccccctcatacactgagccgcatacgtgaagttgcagtccgccgcgtctcagttacgcttgggcgtcatcgatgggcctcgcttgtcgtaacctttcgtgccccgaagaacacactaatgtcgctgagccccacgcaaagcacgagaggtagcagcagccgaggacccgggcccatggtgagcggtggcagcgtggctatcggcacggtgcgcagtcc

SEQ ID NO: 725455 - DNA, 512 bp, Homo sapiens
aggctaaatgacattcttatatgatgaaactcatgaactgctatttccttcttccaagtgtggactcccatccagaatttgccttctttttcttgctctccagtgccttttggtagatttttaaattctgttcagaatgtatagctgttatttgcaggaacactgatctgacaggagctatctggccattacaggaagcagaaccttcaaagttccttcttaatcttggctgcttagagtctgccctgcacatgtgtagttcaggtaaactgctttggacacgagcagcttaaccacacaactgaaggaattatcaggtgtgactaattataacaggacttggcatggagtctctgggataataacacatgagaacattatcccacagctgaaatccgtaactggagggctcataaaaaattgttgcataaaacacttaaattttgatttagtacaaatttagattccgtacaaataattcatcaaacttgagttgagcctggaatatatca

SEQ ID NO: 725456 - DNA, 332 bp, Homo sapiens
cgtcacggacatcggagcctgggtcagcgcccagcgaggcagccaggctattggcagaccctcctctagggctgtgcccaccctcgccccaggagcactcactccacctcccacgcctgctcctgggggcccttctctcgctctcatcctgcactgcaaccccccagcccaggccctttatctccccctctgtccaggccacagggatacacggatcggggctagagcccatgcacgcctaaaggagctgctcaaagcatctcctgcttcggccgttcgagtacatgactgcctctctcctcatcctggccctgaccctgcctgtctctctg

SEQ ID NO: 725457 - DNA, 329 bp, Homo sapiens
aataggaaagtggaaggaagggcagatttgatagaatggtgaaggcagccggccatgatggcacccacctgtgatcccagcactttgggaggccgaggcgggcagatcactcgaggtcaagagtttgataccggcctggccaacatagtgaaaccctgtctctactaaaaatccaaaagttagccaggcgtggtagtcgtcccctgttaataccagctactcaggaggttgaggcatgagaattgcttgaacctgggaggtggaggttgcagtgagccaaaattacgccactgcactccagcctgggctactgagtgagactctgtctc

SEQ ID NO: 725458 - DNA, 740 bp, Homo sapiens
ttgagctgcaggttgaatccggggtgccttgtaggattcagcacctatgtgtcggatgacagtggatgacctaaatatcaacgagactacaagactgccccttttgacagccgcttccccaaccacgtaaccagatctataatactgctggcagaacctacctggatcttaccagcctgctgatcacgaaggcaatgacccgctaaaggaggcgatatctctgtgtgtcgacatggtaccagcgatgtagtaccagtccctctgccccacatcctgggtcacagtactgggatgagcaatcggcgcttggaaggtcatcgttatcccggcgaacgagtctgaatctaggctgcatctccctttcctcttgtccatccatcgcttcttccacaggatggtgaagggggaccgtggttaacccaatgatccctagcccaggatccgtagatcatgacttacctgctcaataataatacgcgttcggaagataaacaagtgaaaacggaaacgtggaaaatcacagaccaaaactagtgactctgacgggagccactctatagtctaatataacgccaggcggtcccgaagtccattacgtgagcgcggagaaactcctggagcgaagaggctgcactcaagagggtatccaatggaccaagccaagtgtgtagacacatgtggacaaacgtgtcctacagagaggccaacaggttagagaacggcacatgagaatacggtct

SEQ ID NO: 725459 - DNA, 209 bp, Homo sapiens
tttacttttccgagggttcgaaaatattttaatttatccagaaatatacggttaattccctctatctacacttattaacggggctaaaataccttggaaaaaggtcttgggaaaggtgggggtcatagattccagggccccatggaaggtgtccacggtggcgcaaaaaaggtcttcggtaaaaaagggggggcgggggggtccggagc

SEQ ID NO: 725460 - DNA, 267 bp, Homo sapiens
atgagagacgtgttacttgggctttgctgttctgttgacacggtgtacatggccaagtgagtacagcgtgaacacggtgtgattaaaaaaaagacaaaattaaaaaaagagatggtggcctggtttagtaaaagttttaggtaaaattacaattgatggtataaggaatcattattaaaaattttctgcaaatcataaagctatatcgaggtgttgagcttagccactatgcacatggtaattagttcatggcaacacggtctctca

SEQ ID NO: 725461 - DNA, 149 bp, Homo sapiens
tagaggatctcctgtgctttgggacggcggctcccacatctccacttcgatgggaagacgtacaccttccacgggggactgctactatgtcctaggcaaggggtgaccacgacgattcctaacgctctctctagggcgagctggccccc

SEQ ID NO: 725462 - DNA, 158 bp, Homo sapiens
tcaggcagtggctcatgcctgtgatcccagcactttgctaggctgagatggggggattgctttaggctaggagttcaagaccagcctggtcaacatagcaagactccatctctattttatttaaaaacatttttttaaatctttataaaaaaagaatg

SEQ ID NO: 725463 - DNA, 123 bp, Homo sapiens
ccaaaggggagctggacttccaccagctggctaacagctttcgagagtaaggcctgcagccagcaagggaattaagcgttccctgctacttcctgtgctctggaggctgcagagcttgaaccc

SEQ ID NO: 725464 - DNA, 133 bp, Homo sapiens
  misc_feature (9)..(9): n is a, c, g, or t
  misc_feature (57)..(57): n is a, c, g, or t
gcatctccnattctccacgcgcctcgcagtagccggtcatcattcttgttccactcnattggtgtcactcttcctgaacttcgctttcaagctcttcatgtttagtgcattcagccttccaaagctctagagg

SEQ ID NO: 725465 - DNA, 234 bp, Homo sapiens
  misc_feature (54)..(54): n is a, c, g, or t
  misc_feature (202)..(202): n is a, c, g, or t
cacgctcccctcagactgcgctccagcctgggggcgcccggccgccgccgcctntcgctgccgccacgggcccgtcttcttcctccttcggctcccaggatgaagaaactgagtctcagagaggtgaagtgacttgcccaagatcacagcaattatcacttctccctgggctcccaggccctcctcgcagcagcccccgccntgggccatgtcttcctcagatgaagagacgct

SEQ ID NO: 725466 - DNA, 1141 bp, Homo sapiens
gcactgcaggcgccgggtagggacagcgtattcgctgctgctggatagtcgtgttttcggggatcgaggatactcaccagaaaccgaagaatgccgcaaaccaatcaatgtccgagttaccaccatggatgcagagcctggagtttgcaatccagccaaataccaagtggaaaacagctttctgatcaggtggtcacagactcatcggcctccgggaagtgtggtactttggcctccactatgtggataatcacacaggcattcctacctggctgaagctggcatacagcacaggtgtctgccgcaggcaggtcaggcaaggcagaatcccctccagttcaaggttccagggaccaagttctcaccctgcaagcatgtggctgaggcagctccatcccagggcacatccaaccccagcacaactctttcttccatccgacagtgcacaggcacaggcaatcccttcacgcgcatgcaggatctcactgcacccacctgcagcactgcgctgatggctcatttgcggcgtccttaacgcctcgtggccaggcgccacagtcggcgggcactcaagacacgacaaagcacagttgccaccacagtcctggggttcacctcccaggctactaggaggcagggctcgcatccgctgccagcaagcagctggccatggggaccccaagccgcaccaaacacattgtacccagggggcagccaaggtggggccacgtgcaccagggcactcccaggggtggctggccattggcgtgccaaccacccggttggcggcatgcgctccacaagtatcactggccttcatggttgggaaattcacgtgccaacaatgggctcccagagcaacccttggggacacaatggccattgcggacttcaagctacagtacccgcgcaagtaaacgccaccacacggacaacggggaacacgcccccccaggtgcccccggcagcctgcagatatggcccctgggcgcgcgcacagacactctacgcacgacaacacgccggcggcaagggcaaccgcgagacagactgggcgatcccctgccgccgaaacaccccggcacaccaccccaccacaggaaaccaacgaggacccccgcacccccccccagaacaagag

SEQ ID NO: 725467 - DNA, 321 bp, Homo sapiens
gaaaagttcccttgggcgctggggccaaaagctgttgatttttttaagttggcgggtggcaataaatcgaactgttccccagttagtcaagtatgtttccaccctagcctgatataaaaagggcccctgccgctgaatgaaaaagggatcaaaatcccctttggacataagttaaagtcctaattgggtttggcccgtcctccccttttgttttcggaagattaaatgctacatgggtaagtttgcctaaatagggagctttaacttatgtcaaaatgtttgcacccgtttgtcaataaagtttagtcctttttttatcca

SEQ ID NO: 725468 - DNA, 663 bp, Homo sapiens
  misc_feature (306)..(306): n is a, c, g, or t
  misc_feature (328)..(328): n is a, c, g, or t
  misc_feature (373)..(373): n is a, c, g, or t
  misc_feature (457)..(457): n is a, c, g, or t
  misc_feature (508)..(508): n is a, c, g, or t
  misc_feature (610)..(610): n is a, c, g, or t
  misc_feature (655)..(655): n is a, c, g, or t
agatattgcattgtagcaatgttgagcattttttaatgtaccctttggccatttgcatgtcttcttttgagaaatgtctgtttacatcttttgcccccccccccctttttttttttttgagttgtctctctctgtcactcaggctggagtgcagtggcgtgatctctgctcactgtaacctctgcctactgggttcaagtgattctcctgcttcagcctcctgagtagctgagactacaggtacatgccaccatgctcagctgatttttgtattttttttttttttttgagatggagactcactgngtcacccaggctggagtgcagnggcatgatcttggctcactgcaaccactgcctcccaggttcaagngattcttctgcctcagcctcctgaataactgggattagaggcatgcaccaccacacttggctaatttttgtattttgagtaaanatggggttttaccgtgttggccgggctggtctcaaactcctgacctcaagngatcctcctgccttggcctcccaaagtgctagtattacaggcgtgagctgcgcttggcccttttgcctgttttaaattggattatatatatatatttgctgncaagttgtttgaactctttacatattctgggtactaatcccttgncccttgtc

SEQ ID NO: 725469 - DNA, 503 bp, Homo sapiens
  misc_feature (48)..(48): n is a, c, g, or t
  misc_feature (59)..(59): n is a, c, g, or t
  misc_feature (65)..(65): n is a, c, g, or t
  misc_feature (68)..(68): n is a, c, g, or t
  misc_feature (74)..(74): n is a, c, g, or t
  misc_feature (90)..(90): n is a, c, g, or t
  misc_feature (148)..(148): n is a, c, g, or t
  misc_feature (288)..(288): n is a, c, g, or t
  misc_feature (291)..(291): n is a, c, g, or t
  misc_feature (309)..(309): n is a, c, g, or t
  misc_feature (315)..(315): n is a, c, g, or t
  misc_feature (341)..(341): n is a, c, g, or t
  misc_feature (358)..(358): n is a, c, g, or t
  misc_feature (370)..(370): n is a, c, g, or t
  misc_feature (375)..(375): n is a, c, g, or t
  misc_feature (386)..(387): n is a, c, g, or t
  misc_feature (457)..(457): n is a, c, g, or t
tcaggcgtcgggacagagccttatccaggcttcggcggccggtggcanctctcgatcanctctcncantcgganaggcggctaaggaaangtgccacagcagagacgcgaaggagaggccctagaaccttttcaaagaagaatggaanaaaccatgaagctttctacgatggaagacacattttattacttccttttccttataccatattattcaagggactcagataaacataaagagattcttcagaagtacattgagagaataatcactcggtttgcacctatnctngtcccctacatctggcanaatcancctttcaatcttaaatataaaccttngaaaggaggtgttcctnctcatatgtttngcgtnacaaaattttnngataacatttatgattaattgtttattgtttatgtaataaagcagatcacaaaggaatttccagagttantagcaaggatttaagacaattattgttaattctttttaatataatc

SEQ ID NO: 725470 - DNA, 449 bp, Homo sapiens
tggctcatatgtgtgccatgctatgtctgaatggtaatgcctaggttttcttctagggtttttatggttttaggtctaacgtttaagtctttaatccatcttgaattgatttttgtataaggtgtaaggaagggatccagtttcagctttctacatatggctagccagttttcccagcaccatttattaaatagggaatcctttccccattgcttttttttctcaggtttgtcaaagatcagatagttgtagatatgcagcgttatttctggggctctgttctgttccattgatctatatctctgttttggtaccggtaccatgctgtcttggtcactgtagccctgtagtatagcttgaagtcaggtagtgtgatgcctccagctttgttcttttggcttaggattgccttggcgatgtgggcacacattatggagggggatcctcta

SEQ ID NO: 725471 - DNA, 174 bp, Homo sapiens
gacgatcaacgccgcgctctcggacttagcgccatttttattggaaacctctgcgccatgagagccaggtggaggaagaagcgaatgctcaggctgaagcgcaaaagaagaaagatgaggcagaggtccaagtaaaccgttagcttgttgcgccgtgggggcgttggatgcagt

SEQ ID NO: 725472 - DNA, 1358 bp, Homo sapiens
cgccggcggctttctagccgctgtcccactggtgttggtctcgcgctttcgtgctgcgagctctctgtgggtgctggcagctgacatgtggtgcgcctcccgtggactccatgggcctgagctctatccccgtacactgggacctagcctctggaggtggtgactcctaagtccaccagcccagatgggcctcagactacctcctccactttgctggttcctgttgcctaacctcgacagtgtcagtgtccccatggcccatgtgcactgatgctgggggtccaagtgtcccatggatggaatgtgatgccttccaatggatgtcttccctgtgtctcccctgaacaccctatgggattgccagtatctatgaggtgcactctgtgccatgtgcttggcccttgcaagcgtggcaatgggcatgatccatatttccagtgcatcccgtgatcagccaggacactcatgctgggatagaacaaggtgctcctgtggcacatgttccccttggagcgtattcttctcaatctcccatttgttggaacccatgctcctcaacgttgagaacaacacgatacgtccaccaggccgcctgattgggccagactcccatggacacagctggcctcatggtgaaccatgtgcttggcccagtgacagcaagccctcatgattccaggctcgccgggaaactgtatctcaatagcaagcgtctattgacgaagggaagcatcagttccgtcagatttactccctcctgtaggggaagaggtcagcgggtgaataagtaggtgcatctccttgtcgattgtccaattatatgatacgtcactcgcaggttgccgatatgtggcatgatgtaagctcactgatcgctgagtcacttccagagtcgctccaggattagtgatgcaacacaatgtgggcatgcgaggtgaattacaggtatgctaagtagtgcgtctgtccttttttcccgtgtttatgagggggggcaggtgtcatctagggtatagcgttatcggaattttggcccggccgcgctattcgtttgtcctaggctgctctacagagttatgtcgcagtagtgcgttaatgacaacacttatccctttggtggtatctacataggacatgtactatctattagcacactagacggtgtgtgcgtacacgcagcccagcgggtaccagaactgcattgcttatttattatccatccaccatgagacttaaattgcgctttgtcgactcggccaaggcgtgggctttcgtgggtacgcacgtgatgtcgggccgtgcttagaggaacttcgtgctcgagacaatgtgatgttcagctcggtgcacggcgtatg

SEQ ID NO: 725473 - DNA, 392 bp, Homo sapiens
  misc_feature (240)..(240): n is a, c, g, or t
tgagaagcttcatgatctgctgtctgctagcttgcgatacaggaaagccagtggtgtagttcagtctgagtcttgaggcctaagaagtgggggagacgatcttgtaagtctcagaccaagggcagcagaaaacagatgattcaactcaagtggccaggcagaaggagtgagttcttcctttttccacctttagtttttttcatgtcctcaacagactgggtgatatcagtcctcattggngaggacagtctgtagatccaaacacccatttcatctgtaaacaccttgacagacacactcacaaataatctttggccaaatatctgagcttctgtgatccagccaagttgacacataaaattaaccatcacatgtccaccccttgccaactt

SEQ ID NO: 725474 - DNA, 277 bp, Homo sapiens
aaacttggtgggggtcccacgggggacaggtccttccaacggttcctttgcacccaacgctgcacgggcacggggggtgggtaatcagcctcccgaaaaccacgcgagttacggtcctgcctgcgaaaaactcccagggcgaccttggggctgaagagtgggcctgcttcggccttttgcttttttgttgtgtggtgaccctcaccaaaggacagcttcatgcttttggacttcccagcctcaaaaactgtaaaaaataaatttttttataagttga

SEQ ID NO: 725475 - DNA, 1141 bp, Homo sapiens
gaaataggtttctgtacagagaagctagaagaagactaccagaggggagtgtggggctaaggaacagtctaaaatttgaagggagttgatcctgttcactgaaaagatgaatgtgtaactgaagtaataattatcaagagatcccaaaggtgtagaatgtcaaaactgttctttaatagaactcatttctttggtagtagaggaaaagataactagagttatgtcagaatgaatagaagaacctagatgaccggttgtctagggccttcagtatcttctaacaacaattacttcctgagactgtccattatcatgaatgaaacaggtatgcttggctaaattgaaaatcttggctgaagttcatagagctctaggattaaaacttgaggtcccaaacttcaggttccttttcccttctttctacatcaggcagtttgagaaacacttggacaggagaggagtccgggaaacaactctgacatagctctggagccttggagcttacgtctgaggaattctctgtgatcaaaacttcaaactctacaatcctgagtagatcattgcactttagacgaagacagctgtgtgactatcctatttctaacagcataagaaactatcaccgcgcatgccagctactttcaagtttgaccaaagtacctatgacagaaaggatacaaaaggacacgagaccatcaaaatcaaaaatacatactggcgaagcgcaacaacaagcaacccaaaaactacgagaaacgcaaggaaacaaaaccaaaagagcagacaaacccaaaccacaccaacacagaccagaagacacaaaaggagtagtgatgcggacactgggaggtcaagtaacgacgcaagggagccaagcgaaaaaacgtcggtcagccagaacacatgaggaaagacatagggaaaggcgcgagcgggacaagcgacagcaccgacacacagacagtataccacgagcgaaggaacagaaacagcaaggagtcacggcaaggagcgaatagagaaaacaaaaaaaaaagaacagagacagccagcactcagacggccaccacacgaatcgcgaagacatgataggagtaaaagtactatcagggcgacactctcagcgtcgagtgtcaggacc

SEQ ID NO: 725476 - DNA, 105 bp, Homo sapiens
acagcatatttatgaacctatcattggctataagggataaatctatccaagagacataagccccaactacttcaaggcactgacacgtcacttcagaattagtaa

SEQ ID NO: 725477 - DNA, 452 bp, Homo sapiens
ggaagtactaagttcagctcctaaggcctacatcaggggagaaaaatcggtggactttacaaataataactgcctcagcaaaataaatccttttttccatggccatagctcactcagactggccccattccattgggcataactctagtctcccagtcccaagaggggacaaatgatacgtggtactagttttgtggagggacagctgaattaattatgagggaaagggccaaaaattgttgccaagtcctgccccagagtagagtagggagtctcacttcctagcccttcatacgttggtacttcccacttccttcttttaattatgaaattctagcaggtgtggtggtgcgcctgtaatctcagctatatgggaggctaaagcagaaggatcacttgagctcaggagttcaagactagcctaggcaacatagtgagacctcatctcaaaa

SEQ ID NO: 725478 - DNA, 964 bp, Homo sapiens
ttgtaacttagtatgtcgatcgcgctgggagcagcatgcctcggtgtagcaaggaataacatcaagatcgttattgtccgtacatttgcgatactgggtctgttctatgatgtctgtagccaactagttcagcaatccagtgcttccacgtgttgctgactgcgcacagaacacacgacgtgaagctccgtgcctgcatggtatctaaatggtggtagtctagtgaattttgctagacgtagctagtggcgtatatgactgaatgctgtctagccatcagagagcatttgacccggtgtattatcacacaatgataaaaaacacgttctcctgaggaggttgcggccatgtgtgttagtgtctcgaaggtcgctatgctcctgattcctcgtatgctcatgctggtgagcctactccattgtcctcatctgaacacctgtcagacaaaacgtgatatggggtactggtacgttgctttagtataatgagtcgatgcattaagtagctgtcatagttatactgtcaagataatgtatgactgtccttatctctgggaagcttctcaccacctcttgcggaagccacaggtctggcaggagaggcccatgtgtctgcacgagcactgtagctcgcgcagatctcgtgcatttgtggtaacctgaattgttgaccaggaatagacatgcataaggctcagggcgtggtacccaggcaacatttttggcgggggatgaaccttgacagacctggggaacccctggtggaagggagcgccgtgctgcggggaatgtgcagctgatggctcaacgccacgcccgggccttgtaaccctccccggttgctgttaacaccgcagggtctacggctttgaacacgcctgttactttccccgggagtttggccgcggtatagaatgtaataacgggcgaaaatcaaacgcccagtctgtaacacaccaactact

SEQ ID NO: 725479 - DNA, 371 bp, Homo sapiens
  misc_feature (15)..(15): n is a, c, g, or t
  misc_feature (50)..(50): n is a, c, g, or t
  misc_feature (158)..(158): n is a, c, g, or t
  misc_feature (198)..(198): n is a, c, g, or t
  misc_feature (212)..(212): n is a, c, g, or t
  misc_feature (256)..(256): n is a, c, g, or t
aaaaatcagctaagnctgaagtgcttcgtgccacataactcaacaggacntgagtttgattgtgatgaaaggagttaaagtttccttgattcttgtcaaattagaactcatgggtttattgtctatttatttgtaggcttttgttttgttttggtgcntgagaattaagcacaggtccttgcacattgcaaaatatcntgccatgacccacnttacccctagtctaccttcctaaagttttaaccatcagaacaancgtggtgagttagaggacaaacataaatgggaatctgcacccttcaatgctgctctgacaaggctgataaaataggaatgacatcttctcaaaagctcacatctcacaatggtat

SEQ ID NO: 725480 - DNA, 157 bp, Homo sapiens
agggagaggactcattgggggtgaggtggtgttgaggccagaggtggtggtggttgagctccaagtggtgcggggggcgggggaaaggtgttcttaagtgtggcaggagcctgatatcttgtgtgtcgaggcagacattacatgtgtcactttcttg

SEQ ID NO: 725481 - DNA, 640 bp, Homo sapiens
ggacgatgctgtacttctcttcgtagtgggcggctcggcctctgcagagatgtgggcagctggtcaggatggccattcgtggctcagcacagcatacgcagcccagactcagactggggaagcataacaggggctggacatggccaggagagcctgtctggtacagttgatctctgagtagtgtgggacgttgctgtcagatgggagaaggagcaggcagtgttcgtggcctggagactcattgccatcatgagatacttacatgcgagtccagagcatgcagctggagtgcccttgtgggtcctgttcgtgagacaacaaagttactcgtgaagggttatccatggcaacgagatacgtatggtgggatgcagagtgtggtgagatgaatacttggagctcgactgttgtcacagtcgtcgcggcgaccattaggaagtccttttgtaccctgtgtgatcctgtcaacaagtggtggaagttcaactgtaccgagacacgttactctcgggatcacctcaagtacgaaacacattggttgccgtgctacagaccgagtacactatctgtcaaacactaccacgtagcagggcatctaatggaggcatggcaaccttagctctcagcatagagggcggcc

SEQ ID NO: 725482 - DNA, 182 bp, Homo sapiens
ctccagctggttataaagactgcgattatgacagagttgcttgtggtgcttgcagctgtcatccagcattttgggaggctgaggcgggaaaattgcttgaggccaggagtttgaggacaccctgggcaatatagcaagaccccatctctacaaaaaaataaaaataaagaaattagccaggc

SEQ ID NO: 725483 - DNA, 556 bp, Homo sapiens
ctggggttcccgggaggcggaagggagatcagccccagctcagccggcggcccttagagacgcgggtccctccgtttggcatcttgcctgctgtccctcacaggctgtggcatcaacaaccttgtcgtcacatcgccgcgcattcgcaggctctgctggtccgtggctagtttcttaaacacccataccgcttaccgctgctgactctttctgttcttcccatactttgatggctggaataggataattactcaatgttttcttcagaagtaaattgtagagtaaataaagaggcggtagctctgtttgagatttcaaggagtcaaagaatttgactattgagatttgtagtgtgccaggtactttcataggtggcgatttaattcatttatttcattgataaaatgttttagtattttagaaattggacgatatgcagatacacgacatacattccagtgaaattagcctcggtcaaataaattcagggttttgaaaaattaattattttaattgattgtgccctatagcattgggagatttacaaacagtgaaa

SEQ ID NO: 725484 - DNA, 266 bp, Homo sapiens
gcacatggttgcatcaacaacataattgactgcacatttaatagagtcaacatataagtcatggagtgtttcaaagaatagtggcaatagaccaggcttgtagtttcacagctgaaaggacagtattgtccatatctcgttggtcagttctggaagtcctttccaaggggatcttacagaaagaaaaggcattttatgaaatataacctaacacataatcttgtaggatgaacaaaagaggcaatacacctggtgattccatgtgc

SEQ ID NO: 725485 - DNA, 281 bp, Homo sapiens
gccccctgttccctgacaagtttcaacaattgtaaatattttttccctaaaaagaaaaacttgggtgggggttgggtgggagggacttgggtctttggggctaggaaagggcctgtgccccccccacccgtggtttttttattttccccaagcccggggccccccttcccccccgcctgtgaaaattggaggttagggcctgaagctcaaagctccccctttttaatagtttttccctttttggataaaggttgaaataaagtgggggggggtttttccca

SEQ ID NO: 725486 - DNA, 425 bp, Homo sapiens
  misc_feature (1)..(1): n is a, c, g, or t
  misc_feature (103)..(103): n is a, c, g, or t
ntaggttacaagagcgaaatagtcaccactactgagtaatctcagtgtctcattcaagttcgcattgcacattgccaccgcgatctaaatgggtgtacagtcntgagtgctgatatattactcaaaggtttgaatttgcagactgtaacaaggcatgctagatctgtgtactctgacaatatccatccacaagaaagtagccaagcgtcagtttccaatggggaggatcattctcatgaaggtactgtaaggctaagtctgtacacttcatttcttgttcattgacagatccagtggtgccaccattgtcatgttcaggttcagagagctcattcagtggtattgcgacatcctcataagccagcctgtcttctcgtcaagcccctcagctttgatcgtgtcaaatcggcatgcggtcgcctggt

SEQ ID NO: 725487 - DNA, 543 bp, Homo sapiens
  misc_feature (82)..(82): n is a, c, g, or t
catactgtcgacagctgtatgcacgagagtagtatctacttcgtgtctacaactgtactatgaggtgtagtatgatgtaganatattcctcactatgtagagagaaggagatgcttcgtgtcacgagtgtgtggcgctatagacacgtcctacctctagaaagagacatcttgtgtagaggcgcgtcttccacagagagtctctgttgtgtatataaagaagagcgctctcacgcatcacacgcatgtctatatctcctctagagcgctcaaaatagtgtcacactctcgtctctacaagatgtgtttagacacatgttcgctatagctctgacaccttagaggtcacattctgtgcacttgcacctgtgtcctctctcacacacacgctctctgtatagtgttacgctcaaaagtgtagctctttctcgtgcttcacagcccagcgttgcaccagactcgtgtgacatctctacacatcttctccttcgtgccagttacttcgtacaagcgccgggagtgacacctactatgcttactagca

SEQ ID NO: 725488 - DNA, 959 bp, Homo sapiens
ccgcccttttttttattttttataaggtttacaattaatttaattgtcatggcaaaaatatattcccacaatctggggattctctcccagtccaaacagttcttggcagaacgatgcccatctggcctgggccaaatcggcagaaatgggaatcatctggactcaacccatcctaacagaatgggccccgggaagataggcataaatgtttaaaactgggcgcattaaaacctggcgctgtgtggaccttggtgacaacctcgggccacggtccatactgggatgggatggcggtgggcccctgggcaccccggcagagagatggcggaatgggcgtacagcgcgcggagaaaatatccccgcgcggcgcacacggctccagagtgctcccacacagaacacttctcgcccgagggcgggctcgcggtaccttgggcgatatctcgcacacggtggccgtggcgacagtgggcacccccgtgcagcgtgacgcccggggacactacgcagaaagaggaaagtgcccacaagacgggaggggacaaacacatctacaccatatacgggggtcacagtgtcaccgcgaaaacactacgcggcgggcatactacaaaatcgccgacacaactcaacaagcaacgcggcgcgctcttcacaaagccaaatcattgcgccgccgcgcagcggaaaaagcaattccccgacaagccccccccaagacgcggaaagacaatttccaacaagaagggcgtccagcataaaatacaccctctgtaaacgcgtggtgtccacccgcggagcaaagaggcagagcaaacaagatgtcgcgggatcgagcacaccaacagtctcctgggccgccccgctgggtacccgcgcacacacaagagaaccatgcggggcaccccccccgcgcgggggagacacagacggtgacccaaccacacaaaataacgaac

SEQ ID NO: 725489 - DNA, 429 bp, Homo sapiens
  misc_feature (415)..(415): n is a, c, g, or t
ctgaagatggaggttcaagcgatcctcctgcctcagcctaccaagtagctggcattacagatgcacaccaccatgcccggctaatttttgcatttttaatggagacaaagtttcaccatgtttgccagggtcgtctcgaactcctgaactcaagtaatctgcccatcatggcctcccaaagtgctgggatcacagacgtgagcccttcgcacctgagattgttcttattactctcatattacaaatgagggaaacaactagtgaaattagtgaaattgttctctttttcttttctttttttttttggggagacagagtctcggctttattcatccggggctgggaatgtggcattgggcccgattttcaggttcattggcaacctccattttttggggtttcaagtggatccttntggccaagtttttt

SEQ ID NO: 725490 - DNA, 276 bp, Homo sapiens
aggcccccggggaggggcagggcctggagcttccccctaaaaacatttttttatactgtgggcttttgggggggccttgggttccaggccctgggacccctttccagggaaacccccgaacctttgtgccaggacccctcctggtcccctgcccctttcctgtttggtttaaaccccccaactggagggggcatggaaaaccgtaaagcccaggaacgggtgggttattttaaagacaaaaacccattaaagtccctttcagacctccggcttcca

SEQ ID NO: 725491 - DNA, 855 bp, Homo sapiens
aaacctggcgttctgtctaacttggatgtctcctactgagcccgatccaggtgaggacgctctccatgtggtcgggttgagctgttgaaagctacgctgattgacgagccatgaggatgccatatttgacgcgcattggcgtacacagcgtcaccgcgagcttcgggaggtcggggtaatgttgatgaggaatccaatgtacccaggcagacttcagggggctctataagcgaggtatgaggtcacacctaatgctcaatctgagtgtgccgagacgtaggtgcgggctttccaagttctaaacttcatacgtggccatggggcacactatgcagacgcgtatgcctagtggggaaacgtacgtgtatggtgcgtacaccacaaatgcgcacggaacaaccattgttcatcgacctggagtagagggaaatttctactaacgagcatcccgaggggcactgggcgcccttgcctttcaggagggcgtagtattgcaaagaggacgatgtcattacattttgggtataagcgggggcagtgacaatttgtttaaaaaggggtaagaatcgaaacaaaccctaggataatacgacacaattgagatttccgaacccccgtttaatcgtggggacggaaactttgtgaagttatataagggggaggcgagccaatccaaatcaaatagggagggcaccgagtgcacaacaagtgtgttggcgacaaatgtgtttgggcacctgctagatatccagatggtttgtacactgtggaactcgttcgatagcagctcccgcaggggccccatacgatggggccccatttgagcctcgaattcgcagcccgtggcgattttcg

SEQ ID NO: 725492 - DNA, 2337 bp, Homo sapiens
  misc_feature (1868)..(1868): n is a, c, g, or t
  misc_feature (1981)..(1981): n is a, c, g, or t
  misc_feature (2044)..(2044): n is a, c, g, or t
  misc_feature (2221)..(2221): n is a, c, g, or t
acatattccatgaacaagcctcttcctaaggtcctgtaagtgatcctgccccactgattagcccctagaagacccttcaaaggttggatctccaggagggagtgggggaggaaagccctgtaccaggcagcctctgctccattgctctgggggggtggggaagacaaaccctggtcatcccctcagtctgtagcccttttgtgtgagtgcctggcaagggtgacgtggggctgtttctgcgggcacagctgcagcaattaccggagtggaggcagggcccaggcagcactgccctccaagatcttcccttgggcttttcagcagtaaggggacatgcaccccaagggcctccacttggcctgaccttgctgcgggggctctctgtccccaggaacagtagagatggcaagcttatcgagaccctctctgcccagctgcctctgctccttcctcctcctcctcctcctccaagtgtcttccagctatgcagggcagttcagagtgataggaccaagacaccctatccgggctctggtcggggatgaagtggaattgccatgtcgcatatctcctgggaagaacgctacaggcatggaggtggggtggtaccgcccccccttctctagggtggttcatctctacagaaatggcaaggaccaagatggagaccaggcacctgaatatcggggccggacagagctgctgaaagatgctattggtgagggaaaggtgactctcaggatccggaatgtaaggttctcagatgaaggaggtttcacctgcttcttccgagatcattcttaccaagaggaggcagcaatggaattgaaagtagaagatcctttctactgggtgagccctggagtgctggttctcctcgcggtgctgcctgtgctcctcctgcagatcactgttggcctcgtcttcctctgcctgcagtacagactgagaggaaaacttcgagcagagatagagaatctccaccggacttttgatccccactttctgagggtgccctgctggaagataaccctgtttgtaattgtgccggttcttggacccttggttgccttgatcatctgctacaactggctacatcgaagactagcagggcaattccttgaagagctacgaaatcccttctgagtgatgtcacatcttggcaggggtggaggagagcctggttgcccagggatttgtccttggggacatctcatccatcaagttgcacactcactggcatctttgctatggggacattccaatttgcactttcaggaacactctgaattccaagtagaattgatttcccttcttctgtcatctaccttttctcttcattttcccatttttattacccttctttccatttctctctccagtcttccacctggaagccctctctggctaaggacaggcaggtgcccctctctccatcagaggacacctgtactggagagcaacacaggatggtctctgccatgaactggaggccaggaatctcctcactgaaaattacagtatggtaactttgcaaatggtggttgtttcttccaagactccagccctgattgcgcaaaactgaaaggcatgtgaagggaaggaagaggaagagtgcaaaacattgaagagagagctgagtgagctgaagagtgaggatatgagtagccccaacccaaacctggagatggggagaaacctacagaatactagccagagctcctccttgtcttggcagcctactagggacctggggaagcaaaaacgaaagctgggcaacatgcctgctttagaatgttttccttctacttacacatcttccacaggtctcagaatctttccttcctctcatccttttctcctatctncatatctatcagagtatccactgtttattcaacaactactacttgatggtcagacacaaacaaacaagctaggtgctaattaataaagatacgagttttggccgggtgcggtngcacgcctgtaatcccagcactttgggaggccgaggcgggcgaatcacgaggtcaggagttcnagaccagcctggccaacatggtgaaaccccatctctactaaaaatacaaacaattaactgagcatagtggtgggcacctataataccagctactccggaggctgaggcaggagaatcgcttgaacccaggaggcagaggttgcagtgagctgagatcgcgccactgcactctagccngagtgacagagtaagactctgtctcaaaaataaataaataaataaataaataaataaataaataaataaaaaataataatacaagttttcataagcacacttctaaaaaaaaaaaa

SEQ ID NO: 725493 - DNA, 129 bp, Homo sapiens
  misc_feature (24)..(24): n is a, c, g, or t
  misc_feature (36)..(36): n is a, c, g, or t
  misc_feature (115)..(115): n is a, c, g, or t
ctttatgtttgcttgggccttccnccactcttgttncctatgttgataatctaggatttgttgtctcacaatttttccctgatgtttatatgatattcaatgaaataaaatacantgtgacactaaaaa

SEQ ID NO: 725494 - DNA, 2097 bp, Homo sapiens
  misc_feature (1628)..(1628): n is a, c, g, or t
  misc_feature (1741)..(1741): n is a, c, g, or t
  misc_feature (1804)..(1804): n is a, c, g, or t
  misc_feature (1981)..(1981): n is a, c, g, or t
atgtatgaatgtaaggatgagggaagcgaagccagggcccaggcagcactgccctccaagatcttcccttgggcttttcagcagtaaggggacatgcaccccaagggcctccacttggcctgaccttgctgcgggggctctctgtccccaggaacagtagagatggcaagcttatcgagaccctctctgcccagctgcctctgctccttcctcctcctcctcctcctccaagtgtcttccagctatgcagggcagttcagagtgataggaccaagacaccctatccgggctctggtcggggatgaagtggaattgccatgtcgcatatctcctgggaagaacgctacaggcatggaggtggggtggtaccgcccccccttctctagggtggttcatctctacagaaatggcaaggaccaagatggagaccaggcacctgaatatcggggccggacagagctgctgaaagatgctattggtgagggaaaggtgactctcaggatccggaatgtaaggttctcagatgaaggaggtttcacctgcttcttccgagatcattcttaccaagaggaggcagcaatggaattgaaagtagaagatcctttctactgggtgagccctggagtgctggttctcctcgcggtgctgcctgtgctcctcctgcagatcactgttggcctcgtcttcctctgcctgcagtacagactgagaggaaaacttcgagcagagatagagaatctccaccggacttttgatccccactttctgagggtgccctgctggaagataaccctgtttgtaattgtgccggttcttggacccttggttgccttgatcatctgctacaactggctacatcgaagactagcagggcaattccttgaagagctacgaaatcccttctgagtgatgtcacatcttggcaggggtggaggagagcctggttgcccagggatttgtccttggggacatctcatccatcaagttgcacactcactggcatctttgctatggggacattccaatttgcactttcaggaacactctgaattccaagtagaattgatttcccttcttctgtcatctaccttttctcttcattttcccatttttattacccttctttccatttctctctccagtcttccacctggaagccctctctggctaaggacaggcaggtgcccctctctccatcagaggacacctgtactggagagcaacacaggatggtctctgccatgaactggaggccaggaatctcctcactgaaaattacagtatggtaactttgcaaatggtggttgtttcttccaagactccagccctgattgcgcaaaactgaaaggcatgtgaagggaaggaagaggaagagtgcaaaacattgaagagagagctgagtgagctgaagagtgaggatatgagtagccccaacccaaacctggagatggggagaaacctacagaatactagccagagctcctccttgtcttggcagcctactagggacctggggaagcaaaaacgaaagctgggcaacatgcctgctttagaatgttttccttctacttacacatcttccacaggtctcagaatctttccttcctctcatccttttctcctatctncatatctatcagagtatccactgtttattcaacaactactacttgatggtcagacacaaacaaacaagctaggtgctaattaataaagatacgagttttggccgggtgcggtngcacgcctgtaatcccagcactttgggaggccgaggcgggcgaatcacgaggtcaggagttcnagaccagcctggccaacatggtgaaaccccatctctactaaaaatacaaacaattaactgagcatagtggtgggcacctataataccagctactccggaggctgaggcaggagaatcgcttgaacccaggaggcagaggttgcagtgagctgagatcgcgccactgcactctagccngagtgacagagtaagactctgtctcaaaaataaataaataaataaataaataaataaataaataaataaaaaataataatacaagttttcataagcacacttctaaaaaaaaaaaa

SEQ ID NO: 725495 - DNA, 927 bp, Homo sapiens
ggtcctttgagagtttcccagttctgcaagctgtaaacggacaggtctggacggagtcgtcactctgacagatctccatattgcctggcaggtcctggtccttagtcccttcatgcatgatccagcccatgtgcatctatctcttaacgtcgtttacactgggccaccaggagccagtactcttggatagcagcagcattctaggtgactgaattttggctgagggatacggtctttcagaatggtcatcttatctgtggtgagaccattagcccagtggcgtaaagctggctacccaggacatgcccgtgtatgaggacttgcaagcactcttctgcaggcaccactggatgatgctcaagaaagtgtctgccaagcacgcttcctcgatgccactgttactatcgcactacggagcatggaggcagtcaggctcgattccttattgtccaatagtgaacccatcgtcagagcacacaataaccatgtatgcttaggggacatggaaaactaggagcacccatcctaactgatgatgttagcctgcaggtgttcatggaccatttgaagaagactggtctgtctccagtgcctgttaagctgaggatacaaccaggaaatgcaacggctgtcagattgtgttcaaaatgtctagaaaggcttgataacattcctgttacttttctagcagattttaacagaataactcaaggacatttgtatatgtaactctgggagattagaatgtgattgtgtattcctgtctttgtcctttttcgttgcactatgaaattatagaggtactaaatgttttggtatcttgtagataggtgttactgtgactttttgtatcgtaacttttagaatctaaataaaatcagaggtaatgtagttttggcagcttgtgttaggtgagaatcttaatga

SEQ ID NO: 725496 - DNA, 2475 bp, Homo sapiens
  misc_feature (2006)..(2006): n is a, c, g, or t
  misc_feature (2119)..(2119): n is a, c, g, or t
  misc_feature (2182)..(2182): n is a, c, g, or t
  misc_feature (2359)..(2359): n is a, c, g, or t
acatattccatgaacaagcctcttcctaaggtcctgtaagtgatcctgccccactgattagcccctagaagacccttcaaaggttggatctccaggagggagtgggggaggaaagccctgtaccaggcagcctctgctccattgctctgggggggtggggaagacaaaccctggtcatcccctcagtctgtagcccttttgtgtgagtgcctggcaagggtgacgtggggctgtttctgcgggcacagctgcagcaattaccggagtggaggcagggcccaggcagcactgccctccaagatcttcccttgggcttttcagcagtaaggggacatgcaccccaagggcctccacttggcctgaccttgctgcgggggctctctgtccccaggaacagtagagatggcaagcttatcgagaccctctctgcccagctgcctctgctccttcctcctcctcctcctcctccaagtgtcttccagctatgcagggcagttcagagtgataggaccaagacaccctatccgggctctggtcggggatgaagtggaattgccatgtcgcatatctcctgggaagaacgctacaggcatggaggtggggtggtaccgcccccccttctctagggtggttcatctctacagaaatggcaaggaccaagatggagaccaggcacctgaatatcggggccggacagagctgctgaaagatgctattggtgagggaaaggtgactctcaggatccggaatgtaaggttctcagatgaaggaggtttcacctgcttcttccgagatcattcttaccaagaggaggcagcaatggaattgaaagtagaagtgtctcactctgtgacccaggattggttgcagtggcacgatcatggctcattgcagcctccacctcccaggctcaagtgatcctcctgactcagcctcttgaatagctgagaccacaggcttgtgtcaccatgcccagatcctttctactgggtgagccctggagtgctggttctcctcgcggtgctgcctgtgctcctcctgcagatcactgttggcctcgtcttcctctgcctgcagtacagactgagaggaaaacttcgagcagagatagagaatctccaccggacttttgatccccactttctgagggtgccctgctggaagataaccctgtttgtaattgtgccggttcttggacccttggttgccttgatcatctgctacaactggctacatcgaagactagcagggcaattccttgaagagctacgaaatcccttctgagtgatgtcacatcttggcaggggtggaggagagcctggttgcccagggatttgtccttggggacatctcatccatcaagttgcacactcactggcatctttgctatggggacattccaatttgcactttcaggaacactctgaattccaagtagaattgatttcccttcttctgtcatctaccttttctcttcattttcccatttttattacccttctttccatttctctctccagtcttccacctggaagccctctctggctaaggacaggcaggtgcccctctctccatcagaggacacctgtactggagagcaacacaggatggtctctgccatgaactggaggccaggaatctcctcactgaaaattacagtatggtaactttgcaaatggtggttgtttcttccaagactccagccctgattgcgcaaaactgaaaggcatgtgaagggaaggaagaggaagagtgcaaaacattgaagagagagctgagtgagctgaagagtgaggatatgagtagccccaacccaaacctggagatggggagaaacctacagaatactagccagagctcctccttgtcttggcagcctactagggacctggggaagcaaaaacgaaagctgggcaacatgcctgctttagaatgttttccttctacttacacatcttccacaggtctcagaatctttccttcctctcatccttttctcctatctncatatctatcagagtatccactgtttattcaacaactactacttgatggtcagacacaaacaaacaagctaggtgctaattaataaagatacgagttttggccgggtgcggtngcacgcctgtaatcccagcactttgggaggccgaggcgggcgaatcacgaggtcaggagttcnagaccagcctggccaacatggtgaaaccccatctctactaaaaatacaaacaattaactgagcatagtggtgggcacctataataccagctactccggaggctgaggcaggagaatcgcttgaacccaggaggcagaggttgcagtgagctgagatcgcgccactgcactctagccngagtgacagagtaagactctgtctcaaaaataaataaataaataaataaataaataaataaataaataaaaaataataatacaagttttcataagcacacttctaaaaaaaaaaaa

SEQ ID NO: 725497 - DNA, 120 bp, Homo sapiens
ggttttttcccaggggggatttttttggcccccccgggggcccggaaacaaaatttcccccccccggttaaaatttctgtcccccctagggggggggggggggggaatttttttttttta

SEQ ID NO: 725498 - DNA, 109 bp, Homo sapiens
ttaggaatgccccaccaataaggataatgtgaatatttcagaatccaagaaaattggccactcgtctggtcccgagcatttcagataagagatattctcctcatcctaa

SEQ ID NO: 725499 - DNA, 368 bp, Homo sapiens
aggtgagtggggctggcagatggcgcagcagcaggaagtgggaggaaatgcatctgctgagatagggaggacaccggggccaacgaaacggaagctctcggttaggtcagctgtcctcctgcgtgaacatatgtttgtccagagacaaccacttggctaggaaactatctcccacgatgccagaaagtgctgcggacgcttgtctaacgtaatgggaaaaccgaatgatcagctcacttgtgtcgttagctgggagttttggcacagttgggcaaaaatggaggattgtggtcccaagccatggagtttcagaccatgcaagctcaggccctcctttgcctccctcgatggctcggctcttccctccg

SEQ ID NO: 725500 - DNA, 2225 bp, Homo sapiens
  misc_feature (1756)..(1756): n is a, c, g, or t
  misc_feature (1869)..(1869): n is a, c, g, or t
  misc_feature (1932)..(1932): n is a, c, g, or t
  misc_feature (2109)..(2109): n is a, c, g, or t
acatattccatgaacaagcctcttcctaaggtcctgtaagtgatcctgccccactgattagcccctagaagacccttcaaaggttggatctccaggagggagtgggggaggaaagccctgtaccaggcagcctctgctccattgctctgggggggtggggaagacaaaccctggtcatcccctcagtctgtagcccttttgtgtgagtgcctggcaagggtgacgtggggctgtttctgcgggcacagctgcagcaattaccggagtggaggcagggcccaggcagcactgccctccaagatcttcccttgggcttttcagcagtaaggggacatgcaccccaagggcctccacttggcctgaccttgctgcgggggctctctgtccccaggaacagtagagatggcaagcttatcgagaccctctctgcccagctgcctctgctccttcctcctcctcctcctcctccaagtgtcttccagctatgcagggcagttcagagtgataggaccaagacaccctatccgggctctggtcggggatgaagtggaattgccatgtcgcatatctcctgggaagaacgctacaggcatggaggtggggtggtaccgcccccccttctctagggtggttcatctctacagaaatggcaaggaccaagatggagaccaggcacctgaatatcggggccggacagagctgctgaaagatgctattggtgagggaaaggtgactctcaggatccggaatgtaaggttctcagatgaaggaggtttcacctgcttcttccgagatcattcttaccaagaggaggcagcaatggaattgaaagtagaagtgtctcactctgtgacccaggattggttgcagtggcacgatcatggctcattgcagcctccacctcccaggctcaagtgatcctcctgactcagcctcttgaatagctgagaccacaggcttgtgtcaccatgcccagatcctttctactgggtgagccctggagtgctggttctcctcgcggtgctgcctgtgctcctcctgcagatcactgttggcctcgtcttcctctgcctgcagtacagactgagaggaaaacttcgagcagagatagagaatctccaccggacttttgatccccactttctgagggtgccctgctggaagataaccctgtttgtaattgtgccggttcttggacccttggttgccttgatcatctgctacaactggctacatcgaagactagcagggcaattccttgaagagctactcttccacctggaagccctctctggctaaggacaggcaggtgcccctctctccatcagaggacacctgtactggagagcaacacaggatggtctctgccatgaactggaggccaggaatctcctcactgaaaattacagtatggtaactttgcaaatggtggttgtttcttccaagactccagccctgattgcgcaaaactgaaaggcatgtgaagggaaggaagaggaagagtgcaaaacattgaagagagagctgagtgagctgaagagtgaggatatgagtagccccaacccaaacctggagatggggagaaacctacagaatactagccagagctcctccttgtcttggcagcctactagggacctggggaagcaaaaacgaaagctgggcaacatgcctgctttagaatgttttccttctacttacacatcttccacaggtctcagaatctttccttcctctcatccttttctcctatctncatatctatcagagtatccactgtttattcaacaactactacttgatggtcagacacaaacaaacaagctaggtgctaattaataaagatacgagttttggccgggtgcggtngcacgcctgtaatcccagcactttgggaggccgaggcgggcgaatcacgaggtcaggagttcnagaccagcctggccaacatggtgaaaccccatctctactaaaaatacaaacaattaactgagcatagtggtgggcacctataataccagctactccggaggctgaggcaggagaatcgcttgaacccaggaggcagaggttgcagtgagctgagatcgcgccactgcactctagccngagtgacagagtaagactctgtctcaaaaataaataaataaataaataaataaataaataaataaataaaaaataataatacaagttttcataagcacacttctaaaaaaaaaaaa

SEQ ID NO: 725501 - DNA, 316 bp, Homo sapiens
gacggcgttccactccagcggtgacagagcaagaacctgtcttagaaaaaccaaatagagtcaccagctgcgttagatcctaacaagagagtcaacctgccctttgaagctttaaagccaggcattgacttctctctagctatgagaatcctagatagcatcttcttccaactacactgaaaatctgtggtttagtgtagccaccaccttcatcagtgatcttagctaatctgaataacttgcagcagtttctacatcagcacatgctgcttcaccttgtgccattatgttatggagatggcttctttccctaaac

SEQ ID NO: 725502 - DNA, 2220 bp, Homo sapiens
  misc_feature (1751)..(1751): n is a, c, g, or t
  misc_feature (1864)..(1864): n is a, c, g, or t
  misc_feature (1927)..(1927): n is a, c, g, or t
  misc_feature (2104)..(2104): n is a, c, g, or t
acatattccatgaacaagcctcttcctaaggtcctgtaagtgatcctgccccactgattagcccctagaagacccttcaaaggttggatctccaggagggagtgggggaggaaagccctgtaccaggcagcctctgctccattgctctgggggggtggggaagacaaaccctggtcatcccctcagtctgtagcccttttgtgtgagtgcctggcaagggtgacgtggggctgtttctgcgggcacagctgcagcaattaccggagtggaggcagggcccaggcagcactgccctccaagatcttcccttgggcttttcagcagtaaggggacatgcaccccaagggcctccacttggcctgaccttgctgcgggggctctctgtccccaggaacagtagagatggcaagcttatcgagaccctctctgcccagctgcctctgctccttcctcctcctcctcctcctccaagtgtcttccagctatgcagggcagttcagagtgataggaccaagacaccctatccgggctctggtcggggatgaagtggaattgccatgtcgcatatctcctgggaagaacgctacaggcatggaggtggggtggtaccgcccccccttctctagggtggttcatctctacagaaatggcaaggaccaagatggagaccaggcacctgaatatcggggccggacagagctgctgaaagatgctattggtgagggaaaggtgactctcaggatccggaatgtaaggttctcagatgaaggaggtttcacctgcttcttccgagatcattcttaccaagaggaggcagcaatggaattgaaagtagaagatcctttctactgggtgagccctggagtgctggttctcctcgcggtgctgcctgtgctcctcctgcagatcactgttggcctcgtcttcctctgcctgcagtacagactgagaggaaaacttcgagcagagatagagaatctccaccggacttttgggcaattccttgaagagctacgaaatcccttctgagtgatgtcacatcttggcaggggtggaggagagcctggttgcccagggatttgtccttggggacatctcatccatcaagttgcacactcactggcatctttgctatggggacattccaatttgcactttcaggaacactctgaattccaagtagaattgatttcccttcttctgtcatctaccttttctcttcattttcccatttttattacccttctttccatttctctctccagtcttccacctggaagccctctctggctaaggacaggcaggtgcccctctctccatcagaggacacctgtactggagagcaacacaggatggtctctgccatgaactggaggccaggaatctcctcactgaaaattacagtatggtaactttgcaaatggtggttgtttcttccaagactccagccctgattgcgcaaaactgaaaggcatgtgaagggaaggaagaggaagagtgcaaaacattgaagagagagctgagtgagctgaagagtgaggatatgagtagccccaacccaaacctggagatggggagaaacctacagaatactagccagagctcctccttgtcttggcagcctactagggacctggggaagcaaaaacgaaagctgggcaacatgcctgctttagaatgttttccttctacttacacatcttccacaggtctcagaatctttccttcctctcatccttttctcctatctncatatctatcagagtatccactgtttattcaacaactactacttgatggtcagacacaaacaaacaagctaggtgctaattaataaagatacgagttttggccgggtgcggtngcacgcctgtaatcccagcactttgggaggccgaggcgggcgaatcacgaggtcaggagttcnagaccagcctggccaacatggtgaaaccccatctctactaaaaatacaaacaattaactgagcatagtggtgggcacctataataccagctactccggaggctgaggcaggagaatcgcttgaacccaggaggcagaggttgcagtgagctgagatcgcgccactgcactctagccngagtgacagagtaagactctgtctcaaaaataaataaataaataaataaataaataaataaataaataaaaaataataatacaagttttcataagcacacttctaaaaaaaaaaaa

SEQ ID NO: 725503 - DNA, 226 bp, Homo sapiens
tcaggattgtctgcgacactcaagctcgaagtcacgctgcagatcacgccggacggaacatcatcctcgacgtagacgtcaacaaggacagccggggcgagaccacgcatgcgggatcgcgatcaacaccaagcacgtgaagacccaggtactggttcgagaacggcggcacggtggtgatcggcggcatcttcgagccagggtcgaccggaatgaggttgtcgca

SEQ ID NO: 725504 - DNA, 143 bp, Homo sapiens
cgattacactggcgctttttcttcagcttctcacatcaaaatcatcatcatcatcatcttcatcatcatcctcttcatcatcatcgtcatcatcttcatcagcagcaagttttacttttttctgtggaaccttgctaccacct

SEQ ID NO: 725505 - DNA, 2087 bp, Homo sapiens
  misc_feature (1618)..(1618): n is a, c, g, or t
  misc_feature (1731)..(1731): n is a, c, g, or t
  misc_feature (1794)..(1794): n is a, c, g, or t
  misc_feature (1971)..(1971): n is a, c, g, or t
acatattccatgaacaagcctcttcctaaggtcctgtaagtgatcctgccccactgattagcccctagaagacccttcaaaggttggatctccaggagggagtgggggaggaaagccctgtaccaggcagcctctgctccattgctctgggggggtggggaagacaaaccctggtcatcccctcagtctgtagcccttttgtgtgagtgcctggcaagggtgacgtggggctgtttctgcgggcacagctgcagcaattaccggagtggaggcagggcccaggcagcactgccctccaagatcttcccttgggcttttcagcagtaaggggacatgcaccccaagggcctccacttggcctgaccttgctgcgggggctctctgtccccaggaacagtagagatggcaagcttatcgagaccctctctgcccagctgcctctgctccttcctcctcctcctcctcctccaagtgtcttccagctatgcagggcagttcagagtgataggaccaagacaccctatccgggctctggtcggggatgaagtggaattgccatgtcgcatatctcctgggaagaacgctacaggcatggaggtggggtggtaccgcccccccttctctagggtggttcatctctacagaaatggcaaggaccaagatggagaccaggcacctgaatatcggggccggacagagctgctgaaagatgctattggtgagggaaaggtgactctcaggatccggaatgtaaggttctcagatgaaggaggtttcacctgcttcttccgagatcattcttaccaagaggaggcagcaatggaattgaaagtagaagatcctttctactgggtgagccctggagtgctggttctcctcgcggtgctgcctgtgctcctcctgcagatcactgttggcctcgtcttcctctgcctgcagtacagactgagaggaaaacttcgagcagagatagagaatctccaccggacttttgatccccactttctgagggtgccctgctggaagataaccctgtttgtaattgtgccggttcttggacccttggttgccttgatcatctgctacaactggctacatcgaagactagcagggcaattccttgaagagctactcttccacctggaagccctctctggctaaggacaggcaggtgcccctctctccatcagaggacacctgtactggagagcaacacaggatggtctctgccatgaactggaggccaggaatctcctcactgaaaattacagtatggtaactttgcaaatggtggttgtttcttccaagactccagccctgattgcgcaaaactgaaaggcatgtgaagggaaggaagaggaagagtgcaaaacattgaagagagagctgagtgagctgaagagtgaggatatgagtagccccaacccaaacctggagatggggagaaacctacagaatactagccagagctcctccttgtcttggcagcctactagggacctggggaagcaaaaacgaaagctgggcaacatgcctgctttagaatgttttccttctacttacacatcttccacaggtctcagaatctttccttcctctcatccttttctcctatctncatatctatcagagtatccactgtttattcaacaactactacttgatggtcagacacaaacaaacaagctaggtgctaattaataaagatacgagttttggccgggtgcggtngcacgcctgtaatcccagcactttgggaggccgaggcgggcgaatcacgaggtcaggagttcnagaccagcctggccaacatggtgaaaccccatctctactaaaaatacaaacaattaactgagcatagtggtgggcacctataataccagctactccggaggctgaggcaggagaatcgcttgaacccaggaggcagaggttgcagtgagctgagatcgcgccactgcactctagccngagtgacagagtaagactctgtctcaaaaataaataaataaataaataaataaataaataaataaataaaaaataataatacaagttttcataagcacacttctaaaaaaaaaaaa

SEQ ID NO: 725506 - DNA, 518 bp, Homo sapiens
agttcccatgtcctccagctgcacagcctgattactcctcagtgtgcagacagacccctcaggaatctacatggccaccagttgtcctgacaagaatctctccatttttgacttctcctcaggcgagtgcgtggccaccaggttgggccacgggggtgagtgtagcctgaatcccgagtagaagctgatacctgcgtaaacctgagtgagtccagccagggaacttcactcttctataagtttctggggcacggaagagctacctatccctagcttgcagccaagccccgtgtccagggtggggatggagaggactgggtgggaaatggagggtggctaatagaccgtattcttggtccttcacagagattgtcgtgggcatgaaatttagtaatgatggtaaacatctcatctctgtgtcgggggacaggtgagcagaagccagtttccctgagaggcagattcttactcgtgcacagcagcctgccctcccctctctccattgcagtgatgctctg

SEQ ID NO: 725507 - DNA, 201 bp, Homo sapiens
ggcgtgcggtgatctagaggatccctgctcacgatagactgttgcgttcttagctttccacacacgtcccgcgacattcttactcggaccaaccgagttatgccagccgcatgggggtttaaccttatcgagttcaacagcctgtggtaacccgaaaagctgctcgagcattggggcttttgaaccggcggtccggcgtgg

SEQ ID NO: 725508 - DNA, 132 bp, Homo sapiens
cagtttaatttggccctgataatgttgcagtctttattaccccttttgctttaatccacttttctaaccaccttcgtcgctttagtttttaacactacacaccaaggctttgaaatcagtgatcccgttatt

SEQ ID NO: 725509 - DNA, 752 bp, Homo sapiens
ggcacgtcgagcgggggagcggtgctgcctgtggagatccgcggagggcgagaggattcgtttggctgccgtccccgcatgctgtgcaatggggttaagaatacgataatccaactatcagccatgaagagatccaagtctgcagcagtactatgccaaggatcatcgatgaagatgtgattagtgaacggtcattctcatgaagatgacaatccatttgcagagtacatgtggatggtacaatgaggaatgaattcaagagacaaatagaacgaggacgttactgggaacgaacgaagtttattgaacgctgtttccaagaaagtgctggaagaggaagaagagcatgaagtggttgattccagctcgagatctcccacagaaatatggaccaaatccaagaccagtttaattgacctgtgtttatcaggtgatggctcttctctggaagatcttgtggtcaagagcaatctgaatccaaatgcaaaggagtttgtgcctggggtgaacgtacggaaatatttgaggtagacggggcccgtctattagggtgggatgtagcgacaatttcgcacactgtgaagggcaggtattagaagacttaagttgtaaaaatgctctcttggtcacctgtggttacacttatgcattgccaaagtgtgagtagtcttgcatgcttaataaaagtggtgagactgttactaaggtagaaaagctgtgcaaacatttactggaaaattgaatgggcccat

SEQ ID NO: 725510 - DNA, 171 bp, Homo sapiens
agtgcgtgtgcttgcgtattagaacatagccgcctaggttcaacgagatacagcagcaagtactattgacccagcgatagaggcttcgacatggactttagaggagtcataagtggagtccgtccagaggtatctttactataaaagctattgtgtccgctcgtcataacg

SEQ ID NO: 725511 - DNA, 895 bp, Homo sapiens
gcagcgcatatgtataaatcttaatcggctggtttatggaagacgaattagcgtgtttggtaaatcagatgattaataacccgctttatcaatcacaaaggtttgccacagttacctgggtgaggttgtggcaagaatgagtttgcagaaagcggagcgttgatggcgtcaggctgtgatcgagatctgaatttcagtcaaatacgcagggttaccctggcacgttagcttaactgctttcacgttctcttttccccagctttggcaaaggcggcgtcaaagtcacggcggctcactgttttaccgtaattatccgcaaggaattttccggcttcgctctctttaattttcttgattcaggcgtaccatcgtaccgcacagtatgcgtccggatcaagaccaaagcaggcaccgagtaatggcatattcgtagcgttccaggcaggaacgtccgccagctcctggcatgacttcacttagtttagcggccgtttccagtgataatccggtttccggcgatgaacacattcggctggcgcgcgcttctggtagattcgggattgggcgagtagcgcaaccgaaggcgcatcctagcggcgttcatccaacacccatggggcagcaagcgattgtaggcaatcctggccacagacccatgtacggtcagcaaaatcagcttcgtggccggttcccggtttgcaggcgacatcattctcgtgcgtacgaatatcgatccgtgtgactctggcaaaatcggtttgccatgatacggcccggacttacgatcaaatcgcatactgttggctgaacgctatgcgtgcaaaaaaaggagcaaaaaccgtagcacggggtgcccgatgctcaagggtggaacacatacgaattttattaaaac

SEQ ID NO: 725512 - DNA, 133 bp, Homo sapiens
taatgcacgatccgcgacccagccgggcctcaccgtatgggctccaggtccatctcgtcctcgtcctcgtcctcgcccagctggatctcctcggggttgacctgctgcgccagctctgccagctcctcccggg

SEQ ID NO: 725513 - DNA, 396 bp, Homo sapiens
  misc_feature (100)..(100): n is a, c, g, or t
  misc_feature (139)..(139): n is a, c, g, or t
  misc_feature (315)..(315): n is a, c, g, or t
  misc_feature (372)..(372): n is a, c, g, or t
gggatttcatcaacaccaaatttttcttacaagaaatgctataaggagttctttaatctcaaggaaaagaatgttaatgagcaaaaaaatcatctaaagntataaaactcactggtagcagtaagcacatgaaaaacanaatattattatactgtaattgctatatataaactattcatatcttgagtagaaagactaaaagatgaacatatcaaaaaattacaacaacttttcaagacataggcaatgtaataagatataaataaaaaccacaaaaagttaaaaagccagggataaagtgagagttttattagntttttctttgtttgtgtggtaatttgtttgcttatgcaataagtgttaaaataagtntaatgggttataaaatattatttg

SEQ ID NO: 725514 - DNA, 160 bp, Homo sapiens
tttcgctgctctatccgatacaaccggtccggaaaatgttgacgagagcgtatcctactcatcacatctacttggggccgagagtttgatagtgcttctcacggtgatgacgaacgtaggtgtcactctacagatgatgaactcagatggaagtaccatc

SEQ ID NO: 725515 - DNA, 150 bp, Homo sapiens
gactgcatcatcaggtgcatctgtcgtacacccattgggtcaaaatgagttctggcttactcgaaagcctgcttgagataaatagcacaaaaactatttttaactttggcatattcattcctttaatgctgtgtctggtctaaatgcaat

SEQ ID NO: 725516 - DNA, 105 bp, Homo sapiens
gttggaaacctctgcgccatgagagccaagttgaggaagaagcgaatcgcaaggcttgaagcgcaaaagaagagagattaggcagagctccaagtacaccgttag

SEQ ID NO: 725517 - DNA, 149 bp, Homo sapiens
gcgtccaaatgaccattgaggtttcaccataggctgggtacatgagggtgtcaggctggtgtgatgctgaggattttacagcggcttagaaacacagctttttttctaggtgtttctcaaaccttagggtaagagtggagatgggaggt

SEQ ID NO: 725518 - DNA, 175 bp, Homo sapiens
aaatttggaagtccatgcgccatgacctgatcgaggagtaccacggcgccccgccgcgcgccctcttcatcctcctcagccactgcagctcttcatcaagagggtggtctgaagactccggcaagagcacaaccagctcaagacaagctgagaagacgaggagcggcctctatcc

SEQ ID NO: 725519 - DNA, 347 bp, Homo sapiens
tgtgtacactaggtgttgagttctttctccagctgctgttgaattaactttgctgattttgccattgcaatatcttgcttattgcaggctattaagaatgatggtgtattcttcagacccatactgtcaagtgaggacttgatacatgaaactcagccacatctttcgcctctcgctggaatgctgcactatccacaacaaacacagtagccctggctgaagacttaaaccgctctaagaactgaagcctcaaactctcatggccgggaaggtcaatcaaggtcagactattgcccctctttattgttgactctgtatacagcacagctgtcagtaatggacgtctg

SEQ ID NO: 725520 - DNA, 236 bp, Homo sapiens
cgcctacggaagatttctaacattaaaattattcagaacatattatctgaccttattttttatgttagaaatctataacaaaaagttcaataaaaatcctgttatgtttaaaattcaaaaatatatttctaaatgcctcatggatcaaagaagaaatcaaaataggaattggaaaaataactgacttgaacaattatgaaagcattacatatcgaaatttgtggaatatagcttta

SEQ ID NO: 725521 - DNA, 308 bp, Homo sapiens
atgcgcccttcgattaggcgtagtcatctctgaagggtcccttctcttactactctcaccttagcaacacctgaatttttgaggggcacactttcaaaccaccagcaggcacagtaccctagattgtcaagggaggcctagtatactcacaatcataatggcccttataaacagggaggcgagaggttgatagcgaacagatgctatcaggacggcaagccgcggtcagagggacgagacgatgctctgctgctggctttgaacacagaggaaggcagccagaagccaaggcatgccggtggtctttg

SEQ ID NO: 725522 - DNA, 336 bp, Homo sapiens
ccttttctataaccaaatagacaggaatggaagattctcctcggggcctgaaagcttgcgggatgaataactcctcctcctcaggcccagtcccaaggtacaaacttgcaccagcagcaagatagcagaggcaggaagagagctggctggaagacacgtaccccctgaagatcaagagggaggtcgccctggtactacatagcagtcacgttaggctgggacaattcctgtttacagaggactataaaacccctgccccatcctcacttgggctgatgccattttagcctcagcctgtctgcatgcaggcgctcattaaaacagcatgttgctcca

SEQ ID NO: 725523 - DNA, 100 bp, Homo sapiens
atcagtaatgccggaacagtagataatacacattgggagtatggtaccaggtgaggtggacatggtgtggaagattgttgtacaagtgaggaaaagcaat

SEQ ID NO: 725524 - DNA, 177 bp, Homo sapiens
gaacttggccaaatcaatgtcatacagcttctacacagcctgtttaatctggtgcttgtaggatttaacatccacaatgaacacaagatgtgtagaagtcttctctcttcttcatggcagactcagtggtcagcggcaactgggcgggctactcagtggtcagcggaaactgggcgg

SEQ ID NO: 725525 - DNA, 179 bp, Homo sapiens
gagtcctaggcacagctctgagcctccttattcgagccgagctgggccagccaggcgaccttctaggtgacgaccacatctacgacgttatcgtcacagcccatgcatttgtgatagtcttcttcatagtaatacccatcataatcggaggctttgcaactgactagtcccctaataat

SEQ ID NO: 725526 - DNA, 1319 bp, Homo sapiens
  misc_feature (173)..(173): n is a, c, g, or t
acttactaaagcattcgttcgtagtgctgatctcgatacttcacgagtactatgattccgatggtgcgatatgcctgatttcgctaacgcagaatccgaggtcattcgactacgtagtattgcgaatttatcaccaagtgacacacaaccgctcgtgaggccacactagaggngcttcttgacacacacacttctcagatgagcagcttctagaagagttcattaaatcgagaaatcatgactccacatcaagagaacgctcgcacaagcagtagtcatccgaattcatcacatacttaacagtccaccggccccctgaagccttaagctctcaaccaatcagctcttctttactaatgaaaccccccttccaccaataccccaatccccactggttcaaaccctcaaagcctaaaggacctcgcctaattgttatttcataagacacaacacttcatagggcccataagaacccgttgtatacgttcgacagttcacatcgttgaatcaaagggatatgaacgccaattcaaaaaacttcaaaaactgtagcgacacgcttggaaattcgagcacggcccacattgacgacaggaccaagattaagacacccgaaagaacaaactactatccattacttgacaatcgttcacccccgcttaaagacctcaaagtccaatttccataaacgtaattgccacaagacagttataacgttaacatgtaacacgttggggtctttccccttttataaaacacagcaatacttcaccaaacgccacttgttaagtacaagacaaaaagcacagcgaacagggaagaagcgagacacatatcctggcaatttataaacatcccacttggacacccaattcccaattggaacgcccatattggggcaccaagctacaatttacttgtacagtttctaagtacatgaccaaccaacattaaagtccaaggatagaaacgccaacagccacgggaaaagaccccccccagttttaccggaacgcactttgtgtcaccgagaacatgtggaggtgagagtgttaccgcgaaacacgttaaagttcgttccaatggagctttccacaccagcaattctcgaaagtttatcagccgctgacaagaggcacccacatttagcggcgcgccgtaaatttagctctatcaattaaaggcacggaaaagtacccagcaccagaacaatttatcttacaatacaacatgcaacgaaggcaacaccataacgaccaccaagttacgcacaacgtccgttattgcccgttaaggggtaaagcaagagcgcttagttg

SEQ ID NO: 725527 - DNA, 359 bp, Homo sapiens
ggggttttttcaggggttttggccggccgcccgttacctttggtagataaagaggtcgggggatagatgatttttaaaattggccccccaaagtgccttgctcggggtcctgccgcggggggatgataaaaggggggggttttacgggcgggccgggttgtttcccgacccccccccgggaaatatgggctttagggggtctttttcagaaacttaaacattttggctccccttttccccaggtttcaggcgggggaatataggggaatatccttttaaataattcttttgggatttcccccataatttggggggcaagaatgggggggaatttggattttaaatatttttttacccca

SEQ ID NO: 725528 - DNA, 625 bp, Homo sapiens
gagtgtcgggacgccggctgcatgcgccatggtcttcctcaacgcgcaatctggcttgcgtggaatatcgcgtcaccgaccgctacttcgtgatccaggagtgctgaacactgccagcacttccggggaagtgaaaagtcgctgctacatgggtggcggtcagaaccgtgatagcgagccttagtgaagatgcaccaaaggcccgatacctgaataaacaatgaacatgaggaccctctggattaagtcgaattacacgctgctagccaggaacatggacgtgaagtatccagcgctcatatgggaattcagtcaaggtgccaggtggatgctcaccaggaaagtcctagcggatctggccatctacgaggccaaagacttgcaaatctttggctgcctatgtgccagtaggaggcgaccgcgcacaggatttgctgctggcttgggggattgggaccggaatctgacaggccatccgtccagagtggtgcactaaccactgaggactgtgctgtattgattcaggaaaagaagacacgagtaatttcgcggttgttgattcatactttcgtatgctacaaccaaatacagacatgagggatgggcatgtctctctgggagaagg

SEQ ID NO: 725529 - DNA, 179 bp, Homo sapiens
gtctacgtgcagtaccaccccttaacgcgcgcgatctcgtctgatctcggagagctgagcggggtcgggcctggttagtacttggctgggagaccggcttggagtaccgtgtgctgcctgcttcagtgcctggccggcttcggtgcctgagcgggtttcaggggcgggtatccgggctc

SEQ ID NO: 725530 - DNA, 880 bp, Homo sapiens
tgagcaatcagtagaacttacacatcctaggaaatctttctttgtaagtaattctttggtctcaagtgattctcttcatgtgtctcttgatgtacatacccccaagcaagttggggggactgtgatgacaattaaatcaccttctctgaagttctggctctgcagagaccaaaccttactgacttgtacagacttgtacaagtaaagacttatacagatagatttttgttgttaacttacaatccgttttttcctctattttattttgttttttcctgggtgtgggagtcttattatacgaaaacaggataaagtgacgctgttatcaaaagttgccgtggggattcgtgatattacttctcgtgcccttccaaatccccgagggctatgatgtttactacggtgaacccggcccagggtaaacacgggcttcacctgtcctggttggttagccttgacggtgaggcaggacttccctcgctgtgaacggttcacttacgatgtgtgtgtcccatcacattttggtgcagcctgtggtttcatgtagggccctgcgatggaccttcgctttattcagttgtttctcccattgcaacggggggcgttctccacacgagtcagtgtgttgtgggtccctccctaaaagcggttgtaccccaggtgtggttctctaagtgacaggcattgcgttttggtacccccggggcttccgcgttgtaaacccgagacaactgccgtcctatttggggcccactgttgggacccggcgtggggtggaccccatttttggacgccgggatgggcgctgggtgttctccatcgacttggagagttaaggggcgcctctaataggcagcggcgcgtcggggcccaccccatg

SEQ ID NO: 725531 - DNA, 940 bp, Homo sapiens
gagcagtgagaccaaacgacgggggtcggagtcagagttgcagtgggatgtccccggaccggatcacgagcctgagcgggagatgcgccgctcgcacgccctgtcggcacccgctgtacccgtgctgcaggccatgagccatcagcgcagcgctgccagtggagcccagcgagcaacgaatgctgacggggtctgccttcgatgcgtggctgtgggagggaggcaggtgctttggcttcccttgcaggttgtggcatacaagcactggagtcatcaatgccccccagaacggtgatcgaggagttctacaaccagacatgggtccaccggctattggggagagcatccgtgcccacctacgcgtcaccaacggctcgtggtcccttctcagtggccattctttgctgtagggggcatgagttggctccttctctgtgggccttttcggttaaccggcgttgggccggcggaattcaatgctgatgatgaacctggtggccttcggtgtccgccgtgctcatgggcttctcgaaactgggccagtcctttgagatgctgatcctgggccgggttcatcatcggtgtgtactgtggccttgatcacaggcttcgtgcccatgtatgtgggtgaagtgtcacccacagaccttcgtgggggcctgggcaccttgaccagctggcgtcgcggcgggtctcatcgcccggtgttcgagccgagggtcacacatggggaccaggggctgttggccatgttggttggcctcattttttaacccagagctgtttgacagggaccttgtgagacagatttggcccccaagagacccgggaagggctatataacgcgagaaggtgaacgggggacacggggtgtcgaaaatttgtggaccaatagagtgtgccacactcatcggcagattcgagacgtgacgagcagaga

SEQ ID NO: 725532 - DNA, 168 bp, Homo sapiens
ggtggatctgctagacaagtgatctctccttacagcggcttctgtttggtctccaagtccaggctctttccactgcacacatgcctccatcccaccaccttctcccgggctgagcctttccctagccagccagtgttttagaggggcctttactacccctctccctgc

SEQ ID NO: 725533 - DNA, 323 bp, Homo sapiens
aaaattcccacttccatggcaacatttcaatgacatccttacccctatcccctatacccactctgccccatctctaatttgcgctggtctgaacccgcgacaaagtgctcctgtagtatgtgttcgtgcacttcagtaactagctttatatgactagttgcatccagctcattctgtgaacccctgagggcgcaagggcccaggtcttgcttagtcattattcacttctcataattgtctatcatctggttagatgctttaactaacatgctaagtttgaatgtaatctctatcttacaaaaacaaaaacaacaagaaaaaag

SEQ ID NO: 725534 - DNA, 185 bp, Homo sapiens
aagagacgagatgctggtggcacgtcatgaggacagcatggtagtatcaactatgaagagctcgtccgcgatggtgctgaatgggtgacgaccttcctctgtctcgcccagcagttccgagccttgccctggtgtgaattttgtatctatgcctaaatgttaccctaggctttctctgtctcagc

SEQ ID NO: 725535 - DNA, 152 bp, Homo sapiens
aaaaagaaaagaaaagaaaagaaaaagaaaaaaatgaatttgttaaaagagctttaggtcttcaaccagagtttatgaaaattctaggagatcattgagggatgtaacatgatataatgtataactttctgtgatgaataagtttttaaaat

SEQ ID NO: 725536 - DNA, 390 bp, Homo sapiens
tggacctcaccctcaggggtccagtaacagctccgggggcaggaccagggcgggggcggcccccaccagtccacacggtgctcatcagcacgcatcaggactgaggaggccagaggcagtgctggtgacagttgaccatgggggcccctggcatgcatcgcttggttgaggacggtcaagggtggtcctggggctgtgtgcttactgggaagccgggagggcagaatggcattgatattacagggagcccacgtagccctttacattgtaattggcacctccaccaggccataagaccccaggtcccagcccagagcatgtcccagaggaagactcagagaagctcctggaatgtgtgtgcacggctccttggtattgcttgttccgctg

SEQ ID NO: 725537 - DNA, 685 bp, Homo sapiens
  misc_feature (39)..(39): n is a, c, g, or t
  misc_feature (90)..(90): n is a, c, g, or t
  misc_feature (114)..(114): n is a, c, g, or t
  misc_feature (124)..(124): n is a, c, g, or t
  misc_feature (129)..(129): n is a, c, g, or t
  misc_feature (139)..(139): n is a, c, g, or t
  misc_feature (141)..(141): n is a, c, g, or t
  misc_feature (148)..(148): n is a, c, g, or t
  misc_feature (168)..(168): n is a, c, g, or t
  misc_feature (200)..(200): n is a, c, g, or t
  misc_feature (225)..(225): n is a, c, g, or t
  misc_feature (240)..(240): n is a, c, g, or t
  misc_feature (254)..(254): n is a, c, g, or t
  misc_feature (257)..(257): n is a, c, g, or t
  misc_feature (262)..(262): n is a, c, g, or t
  misc_feature (270)..(271): n is a, c, g, or t
  misc_feature (354)..(354): n is a, c, g, or t
  misc_feature (398)..(398): n is a, c, g, or t
  misc_feature (411)..(411): n is a, c, g, or t
  misc_feature (443)..(443): n is a, c, g, or t
  misc_feature (528)..(528): n is a, c, g, or t
  misc_feature (593)..(593): n is a, c, g, or t
  misc_feature (614)..(614): n is a, c, g, or t
  misc_feature (616)..(616): n is a, c, g, or t
  misc_feature (618)..(618): n is a, c, g, or t
  misc_feature (660)..(660): n is a, c, g, or t
gaggagggaggccgggacaaggcgccggtgcagccccancagtctccaacggcggcccccggcggcacggacgaaaagccgagcggcaangagcggcgggatgccggggacaangacaaaaaanaaganctgtctgaanangataaanaacttcaaaatgaactgganatgctcgtggaacgactaagggagaaggatanatccctgtatcgaccaacgctggangaattgcgaaggcanattcgttcttctanaanttccntgacttcnntgcccaagcctctcaaatttctgcgtccccactatggcaaactgaaggaaatctatgagaacatggcccctggggagaataancgttttgctgctgacatcatctccgttttggccatgaccatgantggggagcgtgantgcctcaaagtaatcggctaagtgggctcccnaggaggattggcatcatggggtctgagtatgtcaaggtaaaatctcttcttcttgggaatccgcaaggggctctgaggctctganataattcagaattttctctgtggagtacaatctgtcttggagcatccgtgtattgaatttcccanacgctggattccttgacccanananaagtgcttcccctgaagctgtactctcttaatcgtctgggantatctgtaggcatctggcaggagaa

SEQ ID NO: 725538 - DNA, 113 bp, Homo sapiens
taagatgagctggtccgatggccatgtatatctgactcttagactcctccttcttctatctttcttctcctctgctgcagcagggtgcagaaccagcagcaggggctgcagag

SEQ ID NO: 725539 - DNA, 215 bp, Homo sapiens
  misc_feature (180)..(180): n is a, c, g, or t
gggtaccgggatgaggaacgtcactgggatgaggaacgtcactgggatgaggaacgtcactgggatggatgtaggacttgaagtaacgttattcggaacatttactcggtccgtgaccaaacttcacaaggttctttgtcgggttggtccccgttggaaccacatcacacgtgtttcctngatatcatggggacacagtaaacaagcattttcac

SEQ ID NO: 725540 - DNA, 139 bp, Homo sapiens
ttgtcggccaccactctttgtcacagctttgcgggagggggcgtacacatagtgcttctgccacatgtataacgagcgcggtgaaaccggatgaagaacatggcaccgcccacaaccgtcttccactcgtccgagcgaa

SEQ ID NO: 725541 - DNA, 186 bp, Homo sapiens
cccaggctaggggtctaatcagagctatagctgccagcctacaccacagccacagcaatgccagatccaagccgcatctgcaacctacaccacagctcatggcaatgccagatccttaacccactgagtgaggccagggatcgaacctgcaacctcatggcacctagttggatttgtttccactgc

SEQ ID NO: 725542 - DNA, 849 bp, Homo sapiens
  misc_feature (33)..(33): n is a, c, g, or t
  misc_feature (61)..(61): n is a, c, g, or t
  misc_feature (63)..(63): n is a, c, g, or t
  misc_feature (66)..(66): n is a, c, g, or t
  misc_feature (68)..(68): n is a, c, g, or t
  misc_feature (72)..(72): n is a, c, g, or t
  misc_feature (84)..(85): n is a, c, g, or t
  misc_feature (102)..(102): n is a, c, g, or t
  misc_feature (110)..(110): n is a, c, g, or t
  misc_feature (146)..(146): n is a, c, g, or t
  misc_feature (153)..(153): n is a, c, g, or t
  misc_feature (161)..(161): n is a, c, g, or t
  misc_feature (169)..(169): n is a, c, g, or t
  misc_feature (189)..(189): n is a, c, g, or t
  misc_feature (199)..(199): n is a, c, g, or t
  misc_feature (206)..(206): n is a, c, g, or t
  misc_feature (233)..(233): n is a, c, g, or t
  misc_feature (235)..(235): n is a, c, g, or t
  misc_feature (239)..(240): n is a, c, g, or t
  misc_feature (251)..(251): n is a, c, g, or t
  misc_feature (258)..(258): n is a, c, g, or t
  misc_feature (264)..(264): n is a, c, g, or t
  misc_feature (288)..(288): n is a, c, g, or t
  misc_feature (309)..(309): n is a, c, g, or t
  misc_feature (316)..(316): n is a, c, g, or t
  misc_feature (318)..(318): n is a, c, g, or t
  misc_feature (322)..(322): n is a, c, g, or t
  misc_feature (327)..(327): n is a, c, g, or t
  misc_feature (330)..(330): n is a, c, g, or t
  misc_feature (333)..(334): n is a, c, g, or t
  misc_feature (348)..(348): n is a, c, g, or t
  misc_feature (368)..(368): n is a, c, g, or t
  misc_feature (379)..(379): n is a, c, g, or t
  misc_feature (386)..(386): n is a, c, g, or t
  misc_feature (393)..(393): n is a, c, g, or t
  misc_feature (419)..(419): n is a, c, g, or t
  misc_feature (429)..(429): n is a, c, g, or t
  misc_feature (432)..(432): n is a, c, g, or t
  misc_feature (440)..(442): n is a, c, g, or t
  misc_feature (446)..(447): n is a, c, g, or t
  misc_feature (482)..(483): n is a, c, g, or t
  misc_feature (489)..(489): n is a, c, g, or t
  misc_feature (841)..(841): n is a, c, g, or t
cttcccatcaaaaaccagccacctcatctttcnaaactcttaatatatcatttcaaatatntncancnactntacaaaaatttnnaaatatacacaagagtntcactcancatcatgcctggtatataaaaaccactaactaaatntccatgnaataaatnaatatatnaatatcattccttcactcanccaagcaaantaggttntcaccaaaatactcccacccatttatnanaccnntattttttctnactctancaactntgcacatcataccacacgcttggncctgttattgttccatcaggngttcatnantctntattnaantcnnattcacttagcttngaacatgatcttagaaactngactacattcnctttatncatacanttacatccaaacctcaaactatcccncctcttcttncanttaacctnnnttannctctaatcaatactaccttctctccttactctccnnacacantgtttctatcctactagttacctaagactttataagtcaaacataaaaaataatgaaaagaagccttgctaagttgcttttatcagtttcacaacatggctgaagctgcctgcagtataatccctctccccatctctaaaatgacatttaacctataaaaaattcaacttccccaaaccacaatatctatttaacaataatctttaggaaaaaaaggttaatagccactccagcacatctcacatcaatggcactgaaaagtgagcttcagaaacaaggtcgaaatttaagaaactcctttaaattcttggtttttgagtagcggatcttttcctgggttcccgggaagaanacggcttt

SEQ ID NO: 725543 - DNA, 271 bp, Homo sapiens
  misc_feature (119)..(122): n is a, c, g, or t
  misc_feature (129)..(129): n is a, c, g, or t
aaaggtttttgaatttttttttttgggggaaagggggggcccttaaaccaaaattgggggggggggtttttaacccctttgctttttttttattaaaaaaaaaagtgagggggaaagannnntggtttngggggggggtttttggtttttttttttaaccccccccttgggaaacccggttttctttttaggggggggtttttaattaaaacccgggcccggggcccccccccgtccccctttttaaaccggtttttttttttgggttcca

SEQ ID NO: 725544 - DNA, 232 bp, Homo sapiens
  misc_feature (66)..(66): n is a, c, g, or t
cccccccccccccccttgggggaaagccgttgcctgttccccccctttgttcccttcgggttaacngctggggtaactttttcaggatctgtgtgaaaaatggtaatgccgtagttgaaaggaaaaaggcccgttgggggtttcctttgggggatttcggcccaaaaaaatgggtttgaactatattgtatgtaatttggaagtggggttaataaaacccccccgtttccca

SEQ ID NO: 725545 - DNA, 1549 bp, Homo sapiens
ccactaacgcatacattacgacatcgtcacaagccagcccaacagaccgttacttagttagcatcaaccctctactatatctcagccatacattcgatgaagcatagccgtagtgttagggctgtgtaccactcaggcctttatttccgtgccgatgcgcccttaaacaaatcgccacctgcgctgagatcatcttaacataccacgtgtacatcacgtaactgccatccacgaattcgatggtcgatgcactactgaccaactgattcgagatgtaatccagcgtgatcatcgaaaaaagacctgctaccatctctggtagctcactagatcactagggagacctatatatattaaaaacaaacataacaaatctgagactagcagaaaacaaaaacaacaaacagaggggcgggcggggggctaaacaggataatccccttcgcacgggggacccgcagagccataacccgccgaataccccagacacaaacgatgggatacccaacaggggagagccgcaacataggagcagaacgcaactaaatacagacaaagggacagcagggcacgcgagacgagtataacaaacgaacggttgacacagtgggccaacaacaccaggcgcacacccctagggagaaacactatcagaaccacggagaaaccgcataaccaaccaacggggagcaggagaacaaaaaacatgggcgccccaaacaccaaccccatacaaggaagaattaaaaaaagccccaaacaaaggggaaacacctaagacaaaacacacacccgcggccaacaaccggggtgtcgcaaccccaaacgccatgaccacacaccaggcccaggcccagccattgaacaacaccacctgggaccaacacgccgagatactcgcactcccacggaacacaaaataatatacccccccggcagcaccagagacacaaaacaaaccgaacacacacaccaacacgaccaagcaaaagaacaacagaaacagcagagaagacgaaagaacgggaagacagagaagaaaagagaaggcgacgaagacgggaagcagcaaagaagagagaagacgcagcaagagaacaacaggagagacagagagagagaaaaaagaacgaaaggcgaagaaagacaagacaaaaggaaaacagcaaggaggaaaagagagaacacgagagagaacgagcaagaggcgaacagacgcagggagaaacaaaacaaaagagaaagaaacaggagccacagcaaccgagaagaacagaagaaaaacgaaacacagaacgacaaaagcacagaaagagaaaaaagatacgaaagcagaaaaagcacaaaagagcaaaaaaacgacacaaacagaacgaggaaaaagacacaaacgaaaaaacaagacaacaagaaaagaaaaagccaaaaaaaaaaaagagaggcaagcagagaagaaaaagaataaaaaaacagacaagacaaagcagcaacaacaagcaacagaaagataagaaagaacacacaagacaaaacagcgacggcgaacaac

SEQ ID NO: 725546 - DNA, 242 bp, Homo sapiens
  misc_feature (50)..(50): n is a, c, g, or t
  misc_feature (198)..(198): n is a, c, g, or t
cagcacatgatgagctggagccataatctaagcagattaactctggaacnaaaaccaaataccacgtgttctcacttagaagtggaagataacaaataggactgtggattctaggagagtaggagagagacgggcatgttttgaagctactgtgggtgcatgttactataccaaaataccatgtacagtcctacacangtatccccgtttataaagctgaatttaaatcacatgtacaccca

SEQ ID NO: 725547 - DNA, 427 bp, Homo sapiens
cttacagcggaggtgcgtgtcctgcgtcgcggtgtccaccttatctgaggcccgcttggtctctgatgatctcagaaatggccagggctgtgtcctgtaccactatctaggatactgtcagcccgacagatcggtgactgcttgcgtccccgcggagtccatgaacagagatgagcatgacggcctcttggtccatcaccctgatatgcctgagaaatcccgctttctagaagtagtcctcctgggagcccattgtgcagggaaattcacagtctacatccagatactgagccgaaaggaggtacctgttatgaggactgtgatactactagatgccctctggaggtcatcacagagatagagaccccggtgatgctacttgacacacctggcattatcagtcctgagacacagaagaagctcctgg

SEQ ID NO: 725548 - DNA, 367 bp, Homo sapiens
aaggcgcaaatacattttgtttctttttctttgagatggagtctccctccgtcacccaggctggagtacagtggtgtgatctcagctcactgcaacctctgcctcctgggttcaagtgattatcctgcctcagcctcccaagtaactaggactataggtgcacaccaccaagcttggctaatttttgtatttttagtggagatggggtttcaccatgttggccatgctgcttttgcactcctgaccccaagtgatctgcccaccttggcctcccaaagtgtcattaggtgctgggattacaggacagctaccgtgcccactctaatttttaaattttttgtagatatggggtcttgctatgttgccc

SEQ ID NO: 725549 - DNA, 138 bp, Homo sapiens
aaacataaatgcaaaaatcaagaatacaaaaatattagtaaactatcaaactatgaggtgggtggatcaactggggtcaggagctcaaggccagcctggccaacatggtaaaaccccacctctactaaaattacaaaa

SEQ ID NO: 725550 - DNA, 1034 bp, Homo sapiens
ggagagagagaactagttcgagtttatgtttttttttttggggctaatgcttttcctgtccacttatttttcttatccctctgttttccaaagttctcaacctggcctctaattgggctctgttctcaactcccatttgcagaactttgaattcctcaccaaaagcattcataacggatagccaaaacggtttgggctgccagcatttcgagaaatcttcccttgtgtgttgggccacttgtctggcccacgagtgaagcttgataaatgagaccatacttaggggtactcccgtctagattggagggcctctgaaaagttgccttttcagctccaagaattctgaccggtagaagctgcattgcttggccaaattttaaaagagaacctgcattgagcaataagccgtgctccaattaattccccaaccattgacgtgtaccattggggttgcaagtggccatcattcgatttgtgtagatattcataggagcgtgggttcgatatttcagagatttcaactcaccgtgggtgcaaagatgccagaatattgcaaatatcttcttctgaaacctcgtgtccccattgatatctctgcagctgcttcacttctgcttcagcttcttctggcagcaactcagaaagcttggcacacggcatagtccttcctatcgccaatttctgtaaaccttgcagtatgtaacctcatctgcacatattttgccctactccagcgaaatgccagccataaccattctctacatcggcatactgtatcgtacacacttaatcccaggtcctcctaacagggatatgttgccccttgaccagaccatttgggtccatcacctttaacaagcggccaaatgtcacatctatatctgagacaaggctgttagcgccaattcccagaaccatagtgtcgcccatttccacgtgtgttctacccccgggattaaatcccctccccttgagtaagcaatccctctcataagatccttcaccacaagcactttggatcacctgggaaatgc

SEQ ID NO: 725551 - DNA, 973 bp, Homo sapiens
ggttttccgcccggcgctgacggtgctgcgcccgcggtccccagtgccccgagtgccccgcggcccggagcggagtgggacccagccctaggcagaacccaggcgccggcccggacgcccgcggagaagagccacttcccgcccacgtcccatttcgcccctcgccggtccggagtccccgtggccaaggtgtgtgtctggggaaggagactttacagaagttggagttcgctgagtcaaagatctaaccaatgagctacccttggttatcccccccgcccccaggtggttacccaacgcaaggttgcaccccagggtggtggttccctggggaaggtttgcttgccttacccttcttccgcccaggattggcccccccatcggggcttgaataacgtgccacctatgcggggggcgttccacccaaggacttatctctcgggaaatggcggccagccattgtcttgggaccttttggaggaagccacgcatgccaaacctgtacccctgggcccctgggacttgtacccacccagtgccccttgcggcctttgggggggaccccttctgcccaagagcttgtcctccctattggatgtttccacgcccaagggaggaagacccaactcttccaagggttggcctcattttccggcatacccatggggcaccttgttccggggcagcattgaatccaccagaatgattaccccaagggctacctaggaagcacaatagactacctggtaggctcaagtgaacatccttaggacatagccattgctactaaccaagaacccgggattgaatgacccgggttttccagccagttgacaggacacacatattccggatcacataaatgcgaccgagagaaaacaacggaacaggcaatatgagcaaagcagagttagcagagagtagaaccagaagtataacatatatacatccgtccgacacacatgtcgtgtgt

SEQ ID NO: 725552 - DNA, 115 bp, Homo sapiens
cattggataagcggatgagggggaggcggaggctgccaagatgcttggagaagcactgagcaagaatcctggctatatcaagctccgaaagatccggaatcgcctcagttgatag

SEQ ID NO: 725553 - DNA, 186 bp, Homo sapiens
acaaacgtgttgacaaggacataattacatcactctagtgagtatgtgataaagaaaaaaagccatgattattcgatgtggttggctatgtatatgtggcgccaataacgaacctgtataccagctgtaaccaatggtactgatctatccatccaatgtagtcattatatctgactgtggttcagc

SEQ ID NO: 725554 - DNA, 488 bp, Homo sapiens
tcagatacgaatcgagctcgacctgcagctctctctgatgggagtcatatgctctgttctctctgccccagtttgtccgtgaatccctttccctgccatggtgcatgcgagaaacatgctgcagtgccctgggccacctcgcggtcccgcctcctggcctcctgcactctaaacatacatacctgaatgtgagagtttgtcgggagtgaccttctacctccttccagagcacctgcaggtcaagggactccagtctgttcacagccaggcccttgaagcttgattcccacctaccagccctgtgcctctgacttacgctccctggttggccagaagcactcctgccggggccccaaggacgagggtttgctgccctagtggggcagccttggaggtgacagtagaatcctgctggcctccagggccaggtcaatgtccccccatatcatctgtaggggctagtggcccctcttgctgccaatgagccc

SEQ ID NO: 725555 - DNA, 341 bp, Homo sapiens
aatcgtaccgggcagtacggatattgtgtgctgtgcacagagctcaacagcttgggaagttagaaggaaggggaggcaggagtgtgttaatctgctgcatgatgggcccatgaatggtggctctcaaacttctgtgctacaagtgagtgtgtggttgggcgagtgtccttgttaattgataactaattgtgcttggttgggaacatatccatgaatgtccctcgtgggtggggggccagactgtccttgagctcattgtgttagcaccttccccccaatgagggtgaacctgtcctgtcgacttctactgtgcgacggagtgggctctgatacccaagggt

SEQ ID NO: 725556 - DNA, 571 bp, Homo sapiens
  misc_feature (521)..(521): n is a, c, g, or t
tatgtctcgatcgtaacagagaagtatctcctgcatactatcatttcagaaggtgcttcagtgattgctgtgggtgggcaagggggaggatgagtggcccctctcctctgcttcagtgggagtagccctgaaggagtagctcttttactactatgggttctgttttagatttcatttaacgagatttcatttaacgagatttcatttaacgagaggatcttactgctaaaacaagtttgaaaaccactcttctagaatctgatatctagatctgtgtagctcaattgacatgttatagttgtaaattttaaacaaaactgctgaaactccaaaattagaacccattttcaaaaggagatgaaaattacctgaagtagagggatgaaatcctcctgttctagagagctgcagttgggctttgctagaagacagatgaatttagaggcatcatcatgatggttattcagcaacctcggcctccgaaagtgctgggattacaggcgtgagccaccacgcccggnctgttctcatctttatgtccatgtgtacttgatgtttagctcccactaag

SEQ ID NO: 725557 - DNA, 278 bp, Homo sapiens
tccccggggcccccccccccaaaatttttaaagaagcaaagaaggaaaaaaagggggcagtggccctgcccctgaacaggagggcccccaagctacccccgccaaaaaaggcatggttttggccttttgggtaaattaggccccaaaggagaaactaaaaatctggttattttttgggaaaaggtttaagaaatttcccctaaattttgtttggtttgttgggatgaaaagttacctttttttcccaaaaaaaagagggaatttttcatgttaagtta

SEQ ID NO: 725558 - DNA, 138 bp, Homo sapiens
gcactcaggtcgggggtatgtgtcgatcataagaacaggaggttagaagtagggtctggtgacaaaatcgtggtagagtcagggagaggcgtcatatgtgtcccctgaagatgttggtgggccctgaagattttggct

SEQ ID NO: 725559 - DNA, 234 bp, Homo sapiens
atcatcagcagtgatgggttctccatctacttccagtactagggtgaaatctctgagagtccacacaaatgctgggaaaaaagctcacacaagtcagctgtagtcgtctacaggaatggttaccagggtgaggagttggccttgattcggatctggtcagctctgtcacatagtgaagtgggtccagggcctgctggttgatggttcccatgctatggtctgttagattagaga

SEQ ID NO: 725560 - DNA, 332 bp, Homo sapiens
  misc_feature (21)..(21): n is a, c, g, or t
caggaatgcaagatttaagantcactaccgcataataaaacagcacaagaggccgggcgcagtggcttacgcctgtaatcccagcactttgggaggctgaggtgggtggttcacctgaggtcaggagttcgaggccagcctggccaacatggtgaaacccgtcggcactgaagatatgaaaattggccgggcatggtggcaggcggctgtaatcccagctatttcgggaggcttgaggcaggagaatcacttggggcctgggaggcggaggtttgcagcgagccgagattcgacaaacaattccagccttgggcaacaagagaggaatttcc

SEQ ID NO: 725561 - DNA, 112 bp, Homo sapiens
gtggaagtgacatcgtctttaaaccctgcgtggcaatccctgacggaccgccgtgatgcccagggaaggaaaggcgaccctgaaggcccactaatttccttaggtcattcca

SEQ ID NO: 725562 - DNA, 161 bp, Homo sapiens
gcgacctggtggttgcgcctgtgagttcttaccttccttctacatttgtttttgtgtttgtgtgtttgagacagggtttctcactctgttgcccaggccgcagtaagccatgatcataccactgccctccagcctgggcaacagagtgagaaaccctgtct

SEQ ID NO: 725563 - DNA, 733 bp, Homo sapiens
actgaattaggcagtcttaaaaaaaaaaaaaaaacggaaaaagaaaaaaaagaacgtggcaaattggttaaaatgccaaaagggacagtttaattttggtacagattatgcttaccctcaggtttcttaagtggtgcttgaatggccccttctttccatataacacttatcttcttcttaagttcggcgcaagggaatatcttttaagttttaaaaaaacgggaataattatatctatctttttaggccgttaatattaaggggtctcaggttggataaaatcaaggtctgggttggtgggctggctgaattacatatttatcgacgtggggggcatttgtaaacgtatagtggaacaagacaccatattaaggtaccggggactaaaggcaatctatattctggtaaaaacaaacaacaaacatctggccttaggcttgttttaacaggaaaaaaaaaagggggcggtatacgggcccgtgtacgtggacacggggcagtggcgcgccataaagggggccgagacatataaatcggggacagcgtgtattgcgatcacggggggcacactataaaaagacccccagaaaaaggcgggtaaaggccccttagaaaacgtggggtaccccaagaacaagcgctgggacacaactcctacaggggggaggagaaccacctgaaaaggtgtaaccacataaggctgccaaggccactgcagagggcacccggtatc

SEQ ID NO: 725564 - DNA, 184 bp, Homo sapiens
acagagacagccaagcttctagaagaacacataggcaggtcctttctgatcaagtagtgacaaatactttcttgaacaagtatgcaaaaacgcttgctgcccaggaagcaaaggatcaaattcaacgtacattgcactattaagagccgggaagatcctactagtagctcgacctagcaggcca

SEQ ID NO: 725565 - DNA, 868 bp, Homo sapiens
  misc_feature (52)..(52): n is a, c, g, or t
  misc_feature (61)..(61): n is a, c, g, or t
  misc_feature (85)..(85): n is a, c, g, or t
  misc_feature (157)..(157): n is a, c, g, or t
  misc_feature (171)..(172): n is a, c, g, or t
  misc_feature (180)..(180): n is a, c, g, or t
  misc_feature (184)..(184): n is a, c, g, or t
  misc_feature (212)..(212): n is a, c, g, or t
  misc_feature (220)..(220): n is a, c, g, or t
  misc_feature (229)..(229): n is a, c, g, or t
  misc_feature (248)..(248): n is a, c, g, or t
  misc_feature (262)..(262): n is a, c, g, or t
  misc_feature (272)..(273): n is a, c, g, or t
  misc_feature (327)..(327): n is a, c, g, or t
  misc_feature (340)..(340): n is a, c, g, or t
  misc_feature (345)..(345): n is a, c, g, or t
  misc_feature (408)..(408): n is a, c, g, or t
  misc_feature (433)..(433): n is a, c, g, or t
  misc_feature (550)..(550): n is a, c, g, or t
  misc_feature (628)..(629): n is a, c, g, or t
  misc_feature (646)..(646): n is a, c, g, or t
  misc_feature (649)..(649): n is a, c, g, or t
  misc_feature (658)..(659): n is a, c, g, or t
  misc_feature (720)..(720): n is a, c, g, or t
  misc_feature (783)..(783): n is a, c, g, or t
  misc_feature (798)..(798): n is a, c, g, or t
  misc_feature (804)..(804): n is a, c, g, or t
  misc_feature (859)..(859): n is a, c, g, or t
ggctttcaaattattttttgctttatggttattacttttataaaccatctgntccacggcnaaactaactggtaccatacaaagntatgtctattattgtcatgtttagattttctattccacattcattgacaaatatatttaaatctagataganacacctgtgattgnnttagtgcntggnaatgcatggcatatacattgcttagggnggtaatanggggtcagntgctctactgccaccttcnagcacaggcaccgntttgcatttnntgcaaaacttctggttttactcaatttttacactggtggaagctgatgttagtnacttaaaaggcangctanttcttttccatttcttagctgaacaaaaaatacacacaatgtagcgtttttattgggcaaganttgctttttatatttcacgtgtgantgcttattacccttccttgtgcaaaatgaccagggtactaataaaaccatctttgcaggagtgtttaataagcatattttatttaaataaatcctccagttggggatggagaattcnttgcctttacttagaaggctatgttaatagctatctgtcaaatttatatatgccgctcaccaattttcccttactggnnacatcagtttttccacntcncatcacagnncccaaaacgactttaaagtctcaaaattccgtgtctcctttggcttgcttctctcttgatnccacccaggctttattaatggttcgcttcatatcatcgtctccatcttcataaattttctttngaacattcatcaatncctcantaggatctgtttcagtgttataggagggcttctctttttctttgcactacttttnaacctgggt

SEQ ID NO: 725566 - DNA, 341 bp, Homo sapiens
gttgactctaaggatcccttggggctctgtgtgtaaggggagaagagacgtccctcggcccggggctcagctctttactcggcagtgactcttcccatggtgatctcagcccgggaacccatgagagctcgggagggggtcctcctgaggggccctgacttccggctgtggggaagatccccagggtttctcagcatcagaccatccgtcactcagttgggactcaagccacacatcactgtttcttcaacgggcaatgaaggcaggggccaggccccgggttcatgtccagaaagatgacttggtgctggccagggcttcacaaccacagccagagtgct

SEQ ID NO: 725567 - DNA, 465 bp, Homo sapiens
gaccaggtcagttcgacatcgaggctcgtggcacccaggcatcagttccacattggccccggacaagcgctgcagccgacggtcgtattgcgcatacggcgctgcaggaccagaccgacccgcaactcgtggtgctggtcgagccactcgcgctgctcgccggacaagacaaccccttgcccatgggaagcaggcgccgcgcaggcaatcaagggaaaacacaaacagccgataacccacaagcagcaaaaccgtatcattcgacgctcacacactgacaaatgctgaccaactcattaggcttccaggatgactcttgccttggaaaattccgatgcttcttctctaccgcccttgcaattggccgcggtggtgcctggccgctggttactaacttggtgcccgggcccggtaattgggcggccaacgttcgaatcgggccgcaaattttaggtagttagtaat

SEQ ID NO: 725568 - DNA, 1254 bp, Homo sapiens
tattggaaacggagtctgggctctgtcgcccaggttgggagtgcaggtggccgcaatcccggcccacggaaagttccacctcccagggtacacgcgccgatttctctccccgccttcagccccccagaagatacgccgtggagaactatacagggcggcccggccaccattgcgccaagccaaaattccctgtgatatcttctctatagcgaaaagaacaggggttacaccggagtgatacagcacaggaatgggtgcccgaatatctccctggaaccatcgcggagacaccgaccggacctgaagacctaacccaaaagaaacaggggaataaacagggggtagaaacccaagagccgcccgcggggtaatacttataataatatatattagatgtgataaacagaacgtgcgacacacgcgtgaataatatatgagagccaccagaagagaggacacacaccaaaacaccccagaaccaccacacgcgacaaacacacaccaaccaatagagagggcacccacaaaagcaggcgagcgcagggacaaccaccaggaggcgagaaaaaaccacacacccacaaatgacacacaaagcagtctacagaaaaaaacgccaacacaaaaaaaatataaaacaacatcccaaacgacaagacgcggcaacaaccaaagccaggacgacaagaagagaaaggagagaagaccgcaaaaacaaaaagagagagacaagagaacccacagagacaaacccaaacgaagcggcgagaagaccaaccgacacaaaaaagtcgcacaagcaagcaacagagagcaagcgaccaacaaagatgaacgagaggggaacaaagacaccaagggaccagacgacaccacaaccaacaccactaccccaaacaaaacatatttccaacataaccaaaacaaaaaaaaaaaacaagaaacaacccaaacataaaacaagaacacatcttaagcaccaatcctaacaaaaacacataccaaattaaaaaccaaaacgacaataaagtataacaaaaaaacaaaacgacccccacaacaaacgggaacaggacagaaatatgagatatcaaccacctatacattactcattaaaaaacaaattagcctcataatcaaccaccacaataaaaaacaactactaccaaaacaaatacaccaacaatacatcaactctacctcagtaacacaacaaaacctcaatactcccattatccaacaccaaagcaataa

SEQ ID NO: 725569 - DNA, 639 bp, Homo sapiens
  misc_feature (71)..(71): n is a, c, g, or t
  misc_feature (192)..(192): n is a, c, g, or t
  misc_feature (204)..(204): n is a, c, g, or t
  misc_feature (327)..(327): n is a, c, g, or t
  misc_feature (423)..(423): n is a, c, g, or t
  misc_feature (431)..(431): n is a, c, g, or t
  misc_feature (490)..(490): n is a, c, g, or t
cggggccatctttcttttcccttactgtttagggctccctttattaattacttcccaccccctttcagctnccatccttcctttcacaccttaagcctactcaaccaacaatccccacataacccaaaccccaatcacgcaaaaagcacttccacctatctccttattcaaattaaaataaaattggtattnaggagggggccnaaactcccctctttcaaaaccactttccccccactccctctcttttccccctacatttctcttccctccccccccttcccccctcccctcctcttctcttttttttttcctcttcctacattnacccttccccttctcccccttccctcttctccccccccccttctccttcccctctctcttccccccctcctcctctttcctctcccccccttcttntcctcccncttctctccctcctcccccttttctctttcctctcccctctcttctcctcttttttctncccctctcctctcttttcctctctccctctcttctttttctcctctccctctcccttcccctctccctcccctcctccccctcctcccctctccctctctccccttcccccttcctccctccttctccctccttaacacaaaaaaaaca

SEQ ID NO: 725570 - DNA, 144 bp, Homo sapiens
aaaaaaaaaaaaattgcctttttgtttggccaaatagggcccaacctttttttttttgtggcccgttacccccccttaaaaatttagggtttttttttggttgtaaaggggccccaaattccctttttaataaaaaaaggttta

SEQ ID NO: 725571 - DNA, 104 bp, Homo sapiens
ccggaccgggtgggagacggaatgctgtgtgtgtgtgtgtttccagctggctggggtactgtgtgtgtgtatgtgtctggatagggtgctgttgtctgctgcag

SEQ ID NO: 725572 - DNA, 342 bp, Homo sapiens
taagggtcatgcgtttacaattcagcttggtaggcaatagtgcagctccatctcttatagagaacagtgccctcccagttgatttgtaaggcattatctcaaatggtaaagcgcaatagagaactagcattgttcttatatgggttaggcttccactttgcaagaatagcacgtatatccctgtacattcaatgggtttaggtaagtgtcatgtgtatgaggcatagacatgtttagcgccatgccagtaaatgtcagtatcatgccttgaactaagttctctttaatgacagatattgcccctgattggggtcatagactgagttctcgtatatagttctc

SEQ ID NO: 725573 - DNA, 228 bp, Homo sapiens
caacgcaggactcttgatgacgatgatatcctgaaagaactggtaagaacttgtcttgtggaagctcacggcatcaaagctgacagagaaactgttgcagtgaagccaacagaaaacaatgaagaggaatacacctcaaaaggtaaacaaaagaaaggacagcaagggcaataaaacagcagcttttgatgcataatgatagctgaacaattggaagcatcaaaggat

SEQ ID NO: 725574 - DNA, 1830 bp, Homo sapiens
agggccgttgagtaagcttgcatacaatgatgtgccacaccagtctagtcctaattggagagagtaggggactgactagctcccaaggctctcccccagacttgtggaggtaacatcagtgcctgtccaggatgagtggctgaggcgtggtaagagactagccctgggtcgcccgtggagagtggacgagagcttagttgtagcatggcgagtacggcggatacgccaacgaatttcctagatgcatgcgggccgactgacatgtcgtcggataacgtatccttggactgtgtgtctccattctctgactagctagaagacctcttggtaagaacactatgccataattcgcgctagaagattcgcctgagggctagaggtgactgtgcaccgcattcattcacgtgggatcccctttggcgtcggcactagccaaagatagttatcttggatagggcatcgcgctgaaaaaccacatactgctaggaggggcacacggtgtcctatcaagccaccgagcgagccattcgattcctaagttcccagcatgccgtattacactggctaaccacggaacgaatcgggcaaagtccatagggcccatgttatcaaggccaataggaattcccataccgcgaagtcactttatggcggaggtaggaaaccccggtcggaaacacagcgaaacgtggccaggacatccacacaccgtctgcgaaagcgcaagcaccgcggaagacggccttaggcctttggggcacacacacaaccgctcgctaaagccccaattgaggacccccagcatcaccctcggacggacgttacacgagaacggactataggaattcgttccaccccaaaggccgacacgcacaacacacgcggtttgtgcacatgaggtcggagctcaacacaggcaatcacgccagtatcggcggcgagaggcaattacgaccaacggagcgagcaactccagaattcagcgcccaccaggaacacgacagtatcatcaggctgcggccaacccattcgtaacaccaacatccgcaaactacgcacacaactatctcagaacgcaacacgcggtcacacacacgagggccagcggacacacgcacacacgtcccgcaacagcggacgtatccagtccaaacgccagcagagggtacaacacccaagcacccagagatcggccacataacacaacccgacaacacgaaacccacgacacaccttcaacagccaactcgaagcgataaacagcaacacgccgcgcgaaacccccaaaaaaccaggactaacctcacaacaaccatccccgcaaggactattggagccccatgtattcgctaaacgaggtatcctgaagcacctcgcagaccttgggataccaacccggcgaaacaatagcacacacacggtgactgagagatatcatcgaagattgcaccaaacacaccagcagtagagggaaactataccacaaggccgaaatagtagtagaaggcttgcagcaaagtacaaacacacactcaacagctaactaaaagagagttacgagagataaacgtcactagacacgaatagaggaacgaaactcatgaagctgttgcactctactaactcttacctcccacacggaggagactaatagagagcacaacaaatcaagtctgacagtaaagtaggaccgttagagagctacccacgttaaatgaagcaaagaaactactatgaacccacgactataattcggactgccgtacagcacacacaccaaacaggaggacatcaacaatgaagaacaacgcacgcataagcaactacaca

SEQ ID NO: 725575 - DNA, 444 bp, Homo sapiens
ctggaagatggcatgtagagtcttctctggcagagaaataccatgagcgcatctatactgactatatgcctgatcgtgaatactgacacatgtccatatctgagacactcctgagttgagtcgcatccttcgcacaaatagcttcctggctggtacccatgataacgattgagctgaagctgggtacctctggttggggaacaggtgagttctatgtgagacttcctgccctagcaagctgcctccgtccagaaatgcctctcacatcatgagctcgggcctctctttgtagctgtgagtgtcaccctctcaggctttgtctcatccttcatactgaataagatggcagtgttctcctctggggcctgatccacctctacaccagcccaggaagccccatctgtgcctgccctcaggtggtccatcagtctccccctttggttc

SEQ ID NO: 725576 - DNA, 166 bp, Homo sapiens
acggatccccggcgttaaagttaacctacacttgcttcgatccttggacaggatgtacgcagatttaagtgctgttggggctgctaactacacagtatgggagaaaatcccttccatgtcgaacaacctagtccccaactcctgctgcattaatgttactttgacg

SEQ ID NO: 725577 - DNA, 243 bp, Homo sapiens
taactcctcatcctttccctcctggtaatgctgtaaaactattaccatggatcacagtaccaaggactcccgaacacagtcgtgagagtgaagcctgtgaactagccgcgcctccctatcgatactggcactgtgctgagcataactaaagagaccaggaagctgacacacttggcgcccaaaaatatttcgtcctattgttggaggaagaggctcatatcccacctggatgagcactttcac

SEQ ID NO: 725578 - DNA, 279 bp, Homo sapiens
ttaagggcaccagggaaagaattacctttattaaggagtctaggcatgtcaaaaaaacccagttcagtcacagaaaggggggcaaatatgggtacagagcaagaatccaggggtgaaaataaaacctccatctaaatatcctaacagaaaggcggctgaatttagcccaggtgaaacttctgaaagctccgggggaaatgagatttgggcataaagagagagctctccagcacggcgtgcatctgagcttctataataaagtgacaggtctgggccagc

SEQ ID NO: 725579 - DNA, 1188 bp, Homo sapiens
  misc_feature (277)..(277): n is a, c, g, or t
  misc_feature (310)..(310): n is a, c, g, or t
  misc_feature (349)..(349): n is a, c, g, or t
  misc_feature (372)..(372): n is a, c, g, or t
  misc_feature (376)..(376): n is a, c, g, or t
  misc_feature (429)..(429): n is a, c, g, or t
  misc_feature (445)..(445): n is a, c, g, or t
attggttggggtcagataagaagaggagtgacaatcaagccaacagtagatgatgactgaagaataccagttaaataatacattcggatggattggaagttggaattcctcttaacaaccaaggggtttattttcaaagcaatattggggaattgatttcacagttcgttaccttagtaggtaacggtaaggttattctctttttttttttttttttttgggttatgaaaacttagggactaaaattaattataaaaatgggcataagtgtgggatntgaatctacattttgggcagaagttaaacattncccacataagtgtcaaaattatacattcagtgcagtccnggttttttgggttggtttaattntggntttgggttttggagtctgggctctgtcacccaggctgggagtgcaggggcgtngatctgcaacctctgncccccggggttcaagcgattctccgtgcctcagcctcccgagtagctgagattacgggtgcgcgccaccacactgggctaatttggggtatatataagtagagacggggttccagcatgtgggctaggccggtctctccgtgacctcaggggtgatcagcccacctcggctcaacaaagtgcggggatcacgggcgtgagccactttgcccagcccactatcatacagtctggaatatgaaattttggccaaaaccagccttggctgtagcacacacttttttcactgaacctgttggaaataaagtttgtaccttttccaaaaaaaaaaaacaacaaaacgacagtaaaaaagacaagagaaaaagacgaaaaaacaaaaaagaggggggggcgcgccaaataaaagataacccccaggagggagagccaacaatattgcagcagacagcaaattttgttagaaaaggagggcgccaaaaagggggggcgatatataaaagagcagcaacagcgcgcgtgattaaacacaggcgggggggcggcgagaacacggcaaccagggacacctatggggaacaggaccaacacacggggggggggacaaaatgggaggaacaaccccccacgcaagaatataaacccccccgggggaaacataacactagacagatgcatggggcgcaaacaacagcaacataccggtgcggagaaaaaaggcccacacggattatgaacaactag

SEQ ID NO: 725580 - DNA, 204 bp, Homo sapiens
ctgcttaaatacactcgtattaatccaaaaatcccaccacatttctaaataatacatgtgggctggacgcagtggctcacacctgtaatctcaatagtttaggaggccaaggtgggcagatcacttgaggccaggagttggagaccagcctgggcaacatggcgaaaccccatctctaccaaaaatacaaaaaattagtcgacg

SEQ ID NO: 725581 - DNA, 505 bp, Homo sapiens
ccccccccccccctttttgggggccgaaagggaagacccccccccccccttttttaaaaaaaaagggggtttttttttttcccctaaaaaggggtggggacttttcaaaatccccaagggggtctttttaaaaaaggccccccagggggggggggggctcctgtaaaagcccccccccccttttttttaaaaaaaattcccccctttttttgccttttaagggggttggggggaaaaaaaaaaaagggccccccctcccaagctttttttcccgggggggggttgcctgttttaaaaaagggttgtttaaaagggccattcccaaacccgtttggaaaggccgattttttcccctgaaaattttttgaaaaaccccaaggggggggggtttttaaaaattttaaaaaaacttcctttttgggggtcctttaaaagggggcaaaggcccccccggggcttaaaggttttgtttgatttttttttaaaaaaaaccccttttttttta

SEQ ID NO: 725582 - DNA, 1257 bp, Homo sapiens
tggctccagtggagacacgtgtgtggacggatgctggtggacttctcctgcgtgaatgcggacgtctgtcagggacatcggcgaagaacactttaacaccaatccgggagggtggtcactgaggattcgggacaaggccacaacgcaggcggactcgcgtgtcctgccctacgagactgcggttcaaggagcccttaccggagatacgtgcggttggtgactgaggttttcgaagaaagacaggagactacctccatgcctctctgccacggatcatcgcaagtgcttgcaactcacataccagattggaagcacgagttagttgcggtgctgtctctacctcaatagacaagaatcacgagaaggttgaaggtgagctcatcggattcgaggcgcccagaaacaacctctgctacatttctgggtttccatctagccctgacaagcctagaaacacctaaaagataacagacacatataggacactcagactgtgtgagcctgagaacctgggagattatagtatccttacatagttactaggagaaaaccctttgacccaacatcgatcatgacactgcaggaaggctgctgacttgacagtaggtgagtgactgttccaagtgagtgaggacggacggcggaagaaacacggggtttgaagagcgagactgatgactggactgaacagcggggggtgggctggataacccgtagtaacgcatccaggcagagtcgaggcaggaaccctggagcccatggggagcgtcccggagggaccttccgggatgggccggcaagaacccaggagcttctgccattgcaacaagttgccggacgcacatcgcggtgcagcacatgctaggcggacacaggacggcagacatggagggcccgaggacagactagtggcacgacaacgacgggcaaacaacaggccgtacctggtgaccgaggtcgctccccacgggggagcacaaactcatgaaaaggggctccccgcaacagcaacgagggcccacactacgcgtcccagcccacaaggagggaccccgagcgacagcgacacacaacaagagggacgagggcaacgcccaaggagcagcaccaggacatcacgaccaggaaacgcacccgcacgcagcgacgaagaacggaacgacgcacgcgacgagcaccgcacgacacgcacccccccctgccgtccaacgtatcgctccatacgtcgaagcaccagagagcaggagcaggaggtgg

SEQ ID NO: 725583 - DNA, 151 bp, Homo sapiens
cgtgcagtggctgagttactgatgcaagcaagcatagagcccattatgctttggagtaatcttgagggataaagagcttttgtcctgatagctgaaacttcccattaatgtgtccaatgaatacttgtgcttggttgggttagatgtcttg

SEQ ID NO: 725584 - DNA, 322 bp, Homo sapiens
tcaagctaggtaactgggtctacaactggggcctaagtgtgggagctgtatctcgcgtctataatcccagcagtttgagaggacgaggcagtggatctcttgaggtctgaagttcaagaccagcctggccaacatggtgaaaccccatctctactaaaaatacaaaaattaggtgggtgttgtggtggatgcccgtaatcgccacctactcaagaggctgaggcaaggaatcacttgaacccaggggggtgaaaatcgcagtgaaccaagattgcgccactgcactatatcctgggcaacagagcgagactctgtctcaaac

SEQ ID NO: 725585 - DNA, 113 bp, Homo sapiens
  misc_feature (20)..(20): n is a, c, g, or t
aacccggggaaccggggaanttttcacgttcacacactttgtgcagatgagagccaaaaatttgatctttaataagtcctttttcttgcagagttttcagggaaggtcttcgg

SEQ ID NO: 725586 - DNA, 369 bp, Homo sapiens
  misc_feature (157)..(157): n is a, c, g, or t
  misc_feature (199)..(199): n is a, c, g, or t
  misc_feature (245)..(245): n is a, c, g, or t
  misc_feature (255)..(255): n is a, c, g, or t
  misc_feature (326)..(326): n is a, c, g, or t
  misc_feature (334)..(334): n is a, c, g, or t
  misc_feature (360)..(360): n is a, c, g, or t
gtgtgctcgtcaagagattcgccatgccagattcgggcgctcccatcttgcgcaagttggtcacgtggtcacccaattctttgatggctttcacctgtctcattcaggtaactgtgtctcagatgaagtcacacaaagtgggggtcatttttgtcangtggccatgtttgtgcgagttccatgtagtgaccagattcancatttttttccaaagtgtaatgcacactcacattgcattcagcccngctctcccangtcatcacagtctgtgtttcttggatatccgtgaaggacagattcgcgccacctcgcttggttctgcagcnttcatcangtttctcacgcatgttccctctcctncatgagata

SEQ ID NO: 725587 - DNA, 191 bp, Homo sapiens
actatttaaaaatgtgtgcggtatggtgaatatacactaggatttagctcgagactgcgtttttttaagatgtactaaacacatgtgtgtgctttgctgtgtctcccccttggcgggtgcgtacctgggctgattaaccacgggtttcttccttttgggttccccaacacctgcacctgcgaagtgctggg

SEQ ID NO: 725588 - DNA, 241 bp, Homo sapiens
tcaggggcgagctgcagctcgcgagctgcttcttcagaagcaatacgccgccgttgtgctgcaggacacgtggagtaacaagacgctgaatcttgaggtgctttggtcctaggtttcttaccttctttatttaagggctttcttacaacatactggcggacctcatcttctttagaagagattgaaaagtttgcggattctgctagctctttcggggcccaggcagctcgcccctgaggga

SEQ ID NO: 725589 - DNA, 126 bp, Homo sapiens
gcagctgaaattgccatctgttctctgctcaagccaatgggggaggcctggggagatggcaccatacatcccagaactgtaggtcatttcctttctagagggcacctctcagccgtaggtcgacgc

SEQ ID NO: 725590 - DNA, 411 bp, Homo sapiens
tatattcagcctttaggatggctgctagtaaaaaatcaaagtacaggtgtggcaagaatgtagaggaattggaacctttatgtattgctggtggcaatgtaaaatggtgcattcactgtggaaaacagtatcgtggttcctcaaaaaaattaaatgtagaattatgatacaactgtttcacttctgagtgtatattcaagacaattgacagcagcgacttgagcagctatttgtacacctagctaattttttaaaaattttagagagatggggtcttgctatgttgcccaggctggtctagaattggcctcaagccatccccctgccttggcctgccaaagtgctggaattacagacatgagctgctgtgcccagccaacactgtattatgtatattttactacagatttt

SEQ ID NO: 725591 - DNA, 939 bp, Homo sapiens
gaagcttttacatcagagcactggcttgtcaggatatataaagtgaaagcacctgacaacagggagacactaggtcacaaacctcgagtcaccaacatcgtccccaaacagaagtattgtcaaagaagactactaaaaggaagcgtggctacgttaaaaataagctagtgtttaagaaaggcaagaagacctctaagaagactgtttaaatgcgctgttctggcctcacttgcagcagtccttgagagaaccggtctttgccttctgctcatgtcctgtttcacagcaccaagggtacagaacatcgctgggccaagtcaatgtacaaaatgttctggcaatgcctcatttaaaattaaattggtttattgagaacagctgtttctgatgtgtaacgtgaagcaagacagagccctgctgtgagcagctggcagaagattttttttttttaattattgggtacatattacccttcaaatctgagaattgggactaatggcaccaaagaaccctctaattggtccctggcacatgcgtacctgtcaactttttttcttttacaagacctgcattttatttgaactacccaaatagcaatatgtaagacagaaatgcgatgtgatgagagcttcttgaccagtaaacaaactagccaggtctgagagagacgtgctaaaggaagctacgtcgggagcctattacgtcccggcctccggggtgaaaaggtcctccatgtcccgtggcgcactgcgggaagaaacgcgtgggggggccctcgggatagcgaacaggtgtgacggccgagaccgggagcgccccccggccccgaacagggttccagggaatccgggaaggaggcccaatcggggaggccagggctccaaatagagagggtccgcaagaagggacacgcggaacaactcagcatacgcagagcgg

SEQ ID NO: 725592 - DNA, 508 bp, Homo sapiens
  misc_feature (11)..(11): n is a, c, g, or t
  misc_feature (179)..(179): n is a, c, g, or t
gggaaagaganaggcccccgatatattgtttttaggccttttagaaaccatggagttgttcctttggccccataaatgcgaatctataaaaaaggtgatattgtagccctcaagggaatggggcctgttcaaaaaggaatgccccccaagtgtttccatggcaaaactggaaaagtttncaatgttccccaccacgctgttggcattgttgtaaacaaacaagttaagggcaaaattcttcccaaaaaaattaatgggggttttgagccccttaacccctttaaaagccgaaaaagcttccttaaacgtgtgaaggaaaatgttccaaaaaaaaaaaaacccaaaaaaaaagggtcctgggttcaattaaaggccccccctgctccccccaaaaaagccccctttttgaaaaccaatgggaaggagcctgagctgctggaacccattccctatgaattcatggcaaaaaaggggttaaaaaaaaaaaaaaaggccctttgggccccca

SEQ ID NO: 725593 - DNA, 163 bp, Homo sapiens
cgtagccacattcattgcataaggacaaagggtaggtcatgggctcatcagcactgcgtgtctgcacctgggtataggggcaggttcttcttcttgcatttgctgcactgggaagaggtcaggtggtgggtgccgccagtcttggccatctggtggctcacgg

SEQ ID NO: 725594 - DNA, 397 bp, Homo sapiens
tcatcctctgttacggttggcatcagtggtttacaaacagaaagttctgtttcgggcaatagtgatggagggggtgttgtaacaaaattggatcatctatatatagcaactggtgtgtgctgtgctgatagacaaagactaatgaatgaggaaaccaacgtaattgcctggcacattgactgtcatacttaccttctcttatttgagctgatgcttgaacagatgctctgactgtagaaaaacctgtcgataaagagaagggggtggggggctagttttcaagttggggaacctgatagtgaaaagtcacagatggagaaaattgctctcagaaaaactgtttggattgctttcctcttgttgcacatgtaccatgcatttctcagcttggggtact

SEQ ID NO: 725595 - DNA, 155 bp, Homo sapiens
aacatatagaactcgagctggtacccgtcgacatggcacatgcattcgtgaccctgatctggcatatagcttcagaactgcagtggcgagtgtgcatctcttagttagctaccttaactgtccacccttacttactgtgtgttggcccttatgag

SEQ ID NO: 725596 - DNA, 241 bp, Homo sapiens
cacttcgcgatcactgtctgttgatggtctgaactgtgctcattccattctaccatcgggactgccagtgacggctgagtagtctccacgtgaggtagagatcagcacctataagttaggatatgtatttgtgaaactcctgatcgtctcttgccgtgggaaacttctacttggcctacctcctggtctctgacttctggaatgtggccggctgtcagttgcatcccatgaagaggtctca

SEQ ID NO: 725597 - DNA, 267 bp, Homo sapiens
  misc_feature (9)..(9): n is a, c, g, or t
  misc_feature (47)..(47): n is a, c, g, or t
  misc_feature (75)..(75): n is a, c, g, or t
gtgccttanaccctctcagcacgttgggaggcccaaggtgagtgganctgttgagtccccagagtttaagaccancctgggcaacatgcaaaatgccatttttactaaaaatacaaaaatgtagctgaatgtggtggcgcatgcctgtagtcctagctacccaggaggctgaggtgggaggatcatctaagcccaggaagttgaggctgcagtgagccatgataatgccacttgtatgccatcctgggcaatggaaatgagagaccc

SEQ ID NO: 725598 - DNA, 955 bp, Homo sapiens
tccaaaagggttcttaatggaacacccatttgggctaggcaatatcctcccccgtgccctctaatccaggctcaggtacccccaggggagttatcctcagaaaaggcaatttccccaagaaccaggagtaatgaaagatggggcaagaagggtaagggagacacgccggggaagagaggagggaaaatggaagagacaccaggggaaaagaggagagggccttagaagctgggacagcggagatggcgtttggtcctggcccacgcacccatatcctgtcccttctatcgaggtaattatccatctggccacccaacaaaccaccagaaccaagtgctacagctctgcggggggtacatgccaggcctgtccattgggtggtagtgccatcattaccggggcgcacaatggatagacgtaggagggctgggataccctatcctcgacggggaccaagagaaaaaaccaaaatcccagcaggatctggtcagcaaaggggagaccgctctttgatatacaaagaaacggggggcgaggggggggccaaccatggtagaaagcccaagagaagtagaaggccaagctcagaatgaaacgcaagagctagagacgccaagaagagcaacgagacgtcccgtgttggggaagtccaggggaatagcaactcgctatgaagcccaattatatagcgcccagtcgttctatacgagcatagtgacccaataaaatgtcctcctcggccccaagaggtgacctggacagaagtcccaaacacaggggtcctttcccaacacggggtggtcatccgggaaggtatttgcagcgaccagggagaattatcatcccccgggggattaaaaaagtaaatgggttggctacacgggggatcctagggtcctgtcgtagaacacccccggggaacagatcagggtgcttccaaggaaacacacagacg

SEQ ID NO: 725599 - DNA, 335 bp, Homo sapiens
  misc_feature (186)..(186): n is a, c, g, or t
  misc_feature (239)..(239): n is a, c, g, or t
cacccacggtcgtcctgtgtaggcttgttcctgcagcgtgcgccgtatgctcttgagtgtcaagacagccggacccccagggacagtggcgacaggacagcatgcgaacctatgaacgggaagccctgaagaaaaagtttacgcgagtccatgatgcggagtcctccgatgaagacggctatgacnggggtccggccaatgacctttgaccttctcgcaggctgccagctggttcctcntccttctcctaccctggggctgggactcagtttcccatacagaacccacaaccttacctccctccgcctggtctttaataaacagagtattttcac

SEQ ID NO: 725600 - DNA, 152 bp, Homo sapiens
ggtaaacccagcccatgatccctaacagggtccctctcagccctcctaatgaccgtccggcctagccatgtgatttcacttcacttacataacggttctaatattaggtctactaatccacacatcttacccatataccattgatgggcgcg

SEQ ID NO: 725601 - DNA, 290 bp, Homo sapiens
  misc_feature (30)..(30): n is a, c, g, or t
ccaacatggtgaaaccctgtctctactaanaatacaaaaattagccagatgtgttggcgcgtgcataatcccagctacttgggaggctgagacaggagaattccttgaacgggggaggtggatgttgcagtgagctgagatcgcaccactgcactccagcctagaaaacagagggagactgtctcaaaaaagaaaaaaaaatccaaatgttatcttttgaacatgtaatcaatataaaaaagttacccatgagattttttttgtaactccacaatttattttatttcttc

SEQ ID NO: 725602 - DNA, 613 bp, Homo sapiens
tggcaaggctctctacctatttcgttcacaatgtttcttcagtttcagcaccagcgggcatctgggtcacgatcccgcggcctcggggaagggcaactccggacagtgcctccaacagggagctctggcccgagctcgggtccccgatgacggcgagggctggcagggccaggtccggctccacacctagagcccgcagggagtcaaggaggtcgaggcaggggcgcaccttctcctcataggggctgcacgggtggtactcaaccaccgagccgggattgggctggggccacagtagcatctccattcagaaatagagggggggatgcagcagcgggatcagctttggcgaggtccgcttcggaaacaaccatcttccttcttggcaaagtaagctctaatatacgtcccttcaaataaacgtaaggtcaacaagttaaagggtatcacagagcggttctccggcacctcctgggaaggggggcgggagggcggcgtacttcactccagattgcagggagggggagtcttcctgtagcctccgacccagaaccgatctcctcgcagggtggccacagaatacaaagccctgagctgagtgacaggtgcgcga

SEQ ID NO: 725603 - DNA, 301 bp, Homo sapiens
  misc_feature (177)..(177): n is a, c, g, or t
  misc_feature (220)..(220): n is a, c, g, or t
  misc_feature (226)..(226): n is a, c, g, or t
  misc_feature (244)..(244): n is a, c, g, or t
  misc_feature (272)..(272): n is a, c, g, or t
agacggcgagtataccagatcacactcttcgaggactcacggcatagcagaactccagatgatacagatgcaaccaagtcagtgctctctcgggtactaactgcaacggagagactacaagatgataccctttttacccatgtctctctactattgctgcttattgttaaccctatnaacgccaacaatcattatgacaagatcttggctcatagtcgtntcaggngtcgggaccaaggcccanatgtctgtgcccttcaacagatttcggncaccaaaaagaaatacttcagcacttgta

SEQ ID NO: 725604 - DNA, 307 bp, Homo sapiens
cttaatcatgtccaaagctaatccctgagccaaaaaaaccgccaaaaaaaccctaatttttgcctaaggggaaacccaaaaaaaaaaaacccccaaaaaatccctaacttttcccaaaactaaaccccaaaaaaaaaaaaccccctaaaaattccatattcttttccaaactttatccccgaaaaaaaaaaccccctaaaaaaatccttatttttttctaaagttaaccccaaaaaaaaaaaccctcccaaaaaatctcttttttttccctaaaggtaatccaaaaatcaaaaacttcctttaaata

SEQ ID NO: 725605 - DNA, 1043 bp, Homo sapiens
ggagggacggtgcaggcgcagcagtattgggtattggctggcctcgatttaaagagacagaagctgtcggggtcctggaagacggtccccaataccctaccccccaagtccttgggaccacttagggtaccccagagctaggggagataggtattagtaggcggctttcgcctagctccaagaatagctgctttagcgctctacaacgtaggtactacatagctggtagagcttgtttgctacatatgcgacgtagggctgctataggggcaacaggagcctaagagagtactaagagtagtacccacgcaataccaacatacatactgagcaggaagtaccatatagctaagtaagagagaagtactatacctatactacctataatataagccatgtaagagctaggcactaaggtaggtcgtagctaggtacaagcacaagcaacctaaagtacctagcctagttacacctaagacatcagcactagcatacattcctatgagtattagcgtgctatcatactttaccaactatttgtaaatacttctatagctacatagtctaaggcctatttaaaccgaacgcaaacatgaacacggaattggtccaggtccacataggcgtttcttttgcgctggaggttcactagaggccaaacaaagaactccggggcactgcacactggggaacaggacacgttctcggacttggctcggtggggctttataacaaaacccgtacagcgagccctgggtagttcatacaccgaatatacatgcatttcctggccgcttgagaaacttggcaaaaggctagaagtacccaagattgcccagaactgtggtggcagcaaagcgttcttaaggcgtttcagacggaaggccctgcagaaatccctcgcgggtgctgggcactacatttcgataaggattccgggcgaaccagcggagtatagggatcgcacgtgatggtgcggacatcggcaggatactgtaaagccactcggcgggctacgaattaacatgcggcctcgcggacat

SEQ ID NO: 725606 - DNA, 255 bp, Homo sapiens
tttcaactctctgcaccatttttgtggtcctcatcaggctcatccatttcatgagcaagcacttacctcttctcatctattcacatgctctcaccttctcttccaaacctggtcacacagtttcaatgcaactcagcatgtgtcatggtggcagcagcagtttgtcatgggctttgcatttcagcagtcagcaccacccacatttccaatcctggttcccagcacaatctccaagggggcatcctctcagcagtc

SEQ ID NO: 725607 - DNA, 158 bp, Homo sapiens
ctacaacctggctgtacctaccgacgggctactgtaggctgacttgaccgacgtactgcactgacgcgactattacgtgtctgtctgtctgtacggaacgactggactgcttgttactaacttactagccccactacggactacgtacacacggacac

SEQ ID NO: 725608 - DNA, 118 bp, Homo sapiens
gaattctgtgactgccgcggacacggccctatactactgtgcgagagaagtcagagataactatatcgaccacggtattgatgtctggggccaaggaacaatggtcaccgtctcttca

SEQ ID NO: 725609 - DNA, 388 bp, Homo sapiens
atgtgcgaagaacgtcagcggatgtcagaggggtgcttgggtaacctctgggactcagaagtgaatgggggctattcctagattttattgctatagccattatgattatataatgatgagtattgattggtagtatatggttatgagttcattagtccaggagacgtatatttgttgaagacggatagctacttagaacggattatggactgcggattgcttgccgtgaggaacctacttgactggcacgcttctgtgcgaccgagggtttatttcttttggttagaactggaaataaaagactagcatgtttatattctacggcctcactcaggtaaaccaatcagtgcgacgcttagcgcttgtgacgacgtgcccacgcgggatc

SEQ ID NO: 725610 - DNA, 137 bp, Homo sapiens
ccgtcaaagctgcctggaatccatgcaggaataaatggcggcttactcagggcgtggtcacgctccttccacctgtgggaagagaatccatagtggaaaatcatttcgtgctgcaacgcgacacacatacgtacatc

SEQ ID NO: 725611 - DNA, 113 bp, Homo sapiens
tggtgacagtggaaaatgctaatgaataatggtggcaataatgacaatagtgatggtgatggtggtggtgatgatgatgatgacgaagtgaggtgatggtggtggtgacgaga

SEQ ID NO: 725612 - DNA, 131 bp, Homo sapiens
ggtcatagaaagtgaaagaaagtgaggcctatattcagagttcagcaagataacaagccttacaaccaatgacaggagcttaagggaaaatatgacattccaaaataagagagcctcattatacctgagga

SEQ ID NO: 725613 - DNA, 212 bp, Homo sapiens
atctactacccagaacctagcagatagatgcaaccaacaaaaggccgcaggggaatgtgttgccacataaatccccaagtatgccaacattacacaaaagataggttattcatcataattgaattatccacaaacctccccaatcacaagtcttataagtggaagtaaacaatcacattattacagatctcaaacatgtcttcaacaattta

SEQ ID NO: 725614 - DNA, 287 bp, Homo sapiens
ggccagagtcaacagtgcacgctcctactttgggcagtcgctttacattttggggactcccttgcctgatatcacagtatagaatgttgaactagattattcccaagattttctaatccctgagaccttcgattctgatccctgaattatctgagacaagtctcagttaatttagaaagtgtattttgccaaggctgaggactcatgcccatgacacatcctcaggaggtcctgacgacatgtgctccaggtggtcatagcttttttttgtttatacattctttggg

SEQ ID NO: 725615 - DNA, 306 bp, Homo sapiens
ttttaaaataacatgtacatttatttcctcattcactcagtgctattttatccaatatataggctttatatttttctcatctatctatacttctccaatacttgtcttagcttgtcttcattttctatctgaaactcttgacaatattttcattttctatcttgtttctatcttccaattttcttctaagtttgtacattttgcccttagctttttgtttcctagctagtcttttttcttctgcttcctacttttcaggtttaaatttatcttttttcttctaaaagtatgtttttatcttctaat

SEQ ID NO: 725616 - DNA, 113 bp, Homo sapiens
ctcgattgctcttagctagtgtccgtggggcccgaagcgattgactttgaaaaatattagagtgtacaacagcatggcccagagccgtcctggatatccgcagtctaaggaat

SEQ ID NO: 725617 - DNA, 302 bp, Homo sapiens
tggaagcaagtgaggatcacttgaggcaggatttgagaccagcctggcaacataggagacctatacctacaaaaatttttttttaattagctaggcatggtggtgcgcacatatggtcccagctactcaggaggctgagatgtaaggattgcttgaacccaagaagttgaggttggactgagccatgattgtgccactgtgctccagcctgggagacaaagtgagatcctgtcacaaaaaataaaaaattttacaaaagggacatctactatgtgctaattgtgcgtgttggggataacata

SEQ ID NO: 725618 - DNA, 211 bp, Homo sapiens
tggtgcatgctgtatccagaggatcccacctacagcgcctatatagagggcagttattatttgtctcagagtgggcagtgctgagtggatgggatgctgagtgagcaacatccccccaggccccaaggacacacacactattgtcctatcccatgtggccatggctcgagggagctgaaccagcagaagtggagatggagtgctcacaact

SEQ ID NO: 725619 - DNA, 1202 bp, Homo sapiens
gattcatgttcagccgtggtgctggggtgagctggtacccaaggggccggggcgccgcggtccgcaggaagaggcgcggggttgcatggacttgtaaagcatactaagcattacaaacactggcttccagacagaagctcctgggtcatacctggactacacacggaagccaggacggacacacctggacgacgcggtcacctcccatgatacgaactgctcactgacggcgtagcgcttggcgagttacacggtgcactcggatctgccgcgggacccttggccatggaaacacacagacaccacaagatacccaccgggccgataagacaccgacggcaactggctgggactccacctcccggcctcccatggcacctgccccacaggccccctcggcacacggacttgcccacacaacacatacaaggcaccgcgcgcaccaccacgtacctggcaactgacttgacgctggcgatatcccataaccgccaccgtaggacggcggcttaacacctaccctgggcggcccgcgcaccatacccacgccacaccctaccgtaacgttccgtcggaaccggcgctaccctcggacccttggcctctggctgggcacaccgcggcaacgcaatacacccctggcacaaacgcggcaccgcccaccgccgcaacaacccaccccccggagcaacccgccagcacacaccctgggaaaccccgcacacccgtgccccacacatccatggatagccccacgcgcggagttctcccgtaacccttggccataccagggggcacccggcgagccactcccgctgggcaaccaccacctcaaccgccgcatcaccccgcccgccacccaccccccccacaacccggaacaacgccgaaaacgaagacgcagcccccccccgatcacaaaggggcctgaaaccgaggcacaccaacccccctgggagatgggcaaccctgggcgacacgggtctccaagtagcaacagccacccccgcaacacgcgccccgggggaacggcaaacctccccgcggggatcgggggcgacaccataggaaagacaaccagaggccccactgggcaacgtccccgggacgaaaccaccaccgagccaccggcgcgcatgcaccccacgggcgcgcgaccccacaccggcgcctcgccgcgcaccagacactatcacacccca

SEQ ID NO: 725620 - DNA, 740 bp, Homo sapiens
  misc_feature (35)..(35): n is a, c, g, or t
  misc_feature (109)..(109): n is a, c, g, or t
  misc_feature (118)..(118): n is a, c, g, or t
  misc_feature (150)..(151): n is a, c, g, or t
  misc_feature (161)..(161): n is a, c, g, or t
  misc_feature (167)..(167): n is a, c, g, or t
  misc_feature (181)..(181): n is a, c, g, or t
  misc_feature (203)..(203): n is a, c, g, or t
  misc_feature (207)..(207): n is a, c, g, or t
  misc_feature (228)..(228): n is a, c, g, or t
  misc_feature (252)..(252): n is a, c, g, or t
  misc_feature (294)..(294): n is a, c, g, or t
  misc_feature (329)..(332): n is a, c, g, or t
  misc_feature (336)..(336): n is a, c, g, or t
  misc_feature (339)..(340): n is a, c, g, or t
  misc_feature (361)..(361): n is a, c, g, or t
  misc_feature (423)..(423): n is a, c, g, or t
  misc_feature (434)..(434): n is a, c, g, or t
  misc_feature (460)..(460): n is a, c, g, or t
  misc_feature (485)..(485): n is a, c, g, or t
  misc_feature (491)..(491): n is a, c, g, or t
  misc_feature (501)..(501): n is a, c, g, or t
  misc_feature (645)..(645): n is a, c, g, or t
  misc_feature (698)..(698): n is a, c, g, or t
atgtcttacctgggcccccccctcccccccccagnctatggcggcgggacagccgggctgacaggccaaaggttgggggggtagggggatgtaaaagagttgggaacanagcccatcncccttgatgtactaatagctcccctccctttnnctgttgaccngttaancttagaccttaacntgccggatgtgggtagcgtttnatcnggttggtcctccctttccccnccgacgtagctccttcgggataanctggataccgaccccgcttcctgttcttccccttgcttttcntaactgttttgagtttaactggcttccccttaccnnnnctcnccnntcggtgagtggggccttttcnttcccctccccgccccccccctcccccccccccccctcccaccttgctgttatccccctttnggtcaataagnaaagcttttagtctcacccctaggtnatgcctgtcgaactggcttgtcacncacgcncttctctgcnagggggcgatgttggtgcaggagtgcagtgtttcgagggtgtgtgttccaagtatgtacaacacgcagcactgctgtatcaggtaaacatgtgcacaggggaagatgaggcgtgggctcatagaaagcagtcatatggaaatcnaaaggactttctctttcagagttcccctatctttatttgtagaggttatccantaatttctttaattacatcgcatacttctgagtccattcccg

SEQ ID NO: 725621 - DNA, 121 bp, Homo sapiens
  misc_feature (32)..(32): n is a, c, g, or t
  misc_feature (74)..(74): n is a, c, g, or t
  misc_feature (94)..(94): n is a, c, g, or t
tgaagcggcttcaaacccagggcggtgataancctgcccactgctgctgcttcctttccccttccttctctcancctccgctgtctcctattcnatccccactacacccccttgggaaatc

SEQ ID NO: 725622 - DNA, 273 bp, Homo sapiens
gggggaaattttaaaattttatttaatctaacatttaacttttaggtttttgtgggactcatctgaaaggttggcatttgttttctttttatgttaaaaatggattttagatgaatcaaaaatggggattcctagaaattttttttagggataaaaagatcattttatgttggcatttaaaaaaaatcatttttgttttattgttttgggtaaaccaaattcattggaccctggggggaaatttttgtttaaataaatgatttttatttttta

SEQ ID NO: 725623 - DNA, 715 bp, Homo sapiens
gaatgaggtttgagaatgattccctctgctatggaatgtggtccagacgtcaaccaggaacatgtaactggagagggacgaagaaagggtctgataaacgacagaggttttaacacagtccctaccattgggctgcattcctatgtatcacaagttgcaatacttcaaggtagcatacttaaagatcgtagagtcgaattaatgtcgttaggtaggctttatcgtttatagcttgaatccctctctcccgccttctttttggtctcagaggattagtatgtactaatatatgttctctgggctatggtcgtaggaataacttagagcgctggtattgcctcagctcgatcacataatgttgaagtggtggcagaaataacatatagagaagacggaccattctgaatgtagaaggattactctaaatggatttgcactcaagattggaataatcgttccaagtaatctggactcagtgattcttacagggaaaagggttgtaactgggggctggcttcagttggaaattccgaaggcatatctttggtagcgcaggttgtagaccgtgagataatgattagggtatggagatcccgaatgttggggactggtgtgaagcgtatcatacagattgttgataccaagggagccgttttgactaaggtaaaagggggaacgaggatccgggggaggaattgctgaagaagggttcgga

SEQ ID NO: 725624 - DNA, 862 bp, Homo sapiens
  misc_feature (29)..(29): n is a, c, g, or t
  misc_feature (62)..(62): n is a, c, g, or t
  misc_feature (91)..(91): n is a, c, g, or t
  misc_feature (100)..(100): n is a, c, g, or t
  misc_feature (107)..(107): n is a, c, g, or t
  misc_feature (126)..(126): n is a, c, g, or t
  misc_feature (129)..(130): n is a, c, g, or t
  misc_feature (138)..(138): n is a, c, g, or t
  misc_feature (165)..(165): n is a, c, g, or t
  misc_feature (176)..(176): n is a, c, g, or t
  misc_feature (186)..(186): n is a, c, g, or t
  misc_feature (197)..(197): n is a, c, g, or t
  misc_feature (218)..(218): n is a, c, g, or t
  misc_feature (221)..(222): n is a, c, g, or t
  misc_feature (241)..(241): n is a, c, g, or t
  misc_feature (248)..(248): n is a, c, g, or t
  misc_feature (250)..(250): n is a, c, g, or t
  misc_feature (253)..(253): n is a, c, g, or t
  misc_feature (265)..(265): n is a, c, g, or t
  misc_feature (268)..(269): n is a, c, g, or t
  misc_feature (288)..(288): n is a, c, g, or t
  misc_feature (359)..(359): n is a, c, g, or t
  misc_feature (361)..(363): n is a, c, g, or t
  misc_feature (405)..(405): n is a, c, g, or t
  misc_feature (494)..(494): n is a, c, g, or t
  misc_feature (498)..(498): n is a, c, g, or t
  misc_feature (743)..(743): n is a, c, g, or t
  misc_feature (857)..(857): n is a, c, g, or t
gggagggggaagaaaaggaggaacatgcnaaaaaccttatgacaatcatccaaatgtgaggnaagaacaaccgattcaccaactccacttnaacaatttnacaactntctacatctcactcttgantcnngccttccnggctgccacagcctggcagtccctagngcccctgggangagccctggntctccaaaagncagggggggagaagccctgcnggnngcgctgaccacttcccagngaactgncngtncgtgctcccaanggnntgaaccaacagcctaatgngaaaaggaactgcactggaaggggggggggggaatggtgatgggctgggcttatgtgagggtgtgtatatntnnntaagggagcgccagaatctttctctcagttacagcctcaggnaaaccacgttctggttggtgggttctgcagggatctctcccaccactgagcctctagtcccaaaaccatccttgacaacatcgtgtgtntgtnacttccctttgcccacctccaggccacctggggaagcccacaggcagccaagaccctgaaatgaaatgaacacaaagtctgactcggtaagtattagtttcaaacagaacactaaagagaaaagttgaagctgcaatgtgtgtttaaggcagagcccagcagatccgtgtccacccatgtgccaataagacaatgggcaaagctacaaatggcaagagaaaaatgggactattaatgcgtgtggnaaaggccttaatagttaagttacagctaagaatgtcatgtcttgggttagaattttcatttttagcaccgttaatgtattcacttaaatctatgttagcaccttgtctccaggnagaac

SEQ ID NO: 725625 - DNA, 466 bp, Homo sapiens
atccacccaaaaaaactggtgcttgttacccatgtgtatgtgtatgtacatgtgtgtgcatgtgcctgtgtgcacatgtgtccatgtatgcatgtgtgtgtctatatgtgcgtgtgcatctgtatgcacacgtgtgtgtgcaagtgtgtgtgtgtgtctgtgtttctacactgctccaccagcagcaggatgataactaaccttccttgaatgactttcagtttccacactggctaaagctctcaccccaaacacactctagatttttccctcccataggtttttacaatgtttctctcaaccattattaatttgaacaaacagcaggctgtcaagatttatgactcttaccatggctccaacccaatgcatcttgtattgattatttcctaaaatatctccaggcttgagtatataaaccactgcatggctccagcttcagctcacactgctgaagttattacca

SEQ ID NO: 725626 - DNA, 259 bp, Homo sapiens
  misc_feature (5)..(5): n is a, c, g, or t
  misc_feature (41)..(41): n is a, c, g, or t
  misc_feature (110)..(110): n is a, c, g, or t
tgtantcaatgacatggattaatagataattaaattatgcnaaatgggtacttatgctggtggttccagacaaacatgtggtcacatttctttttaatgaagcatatatnttgggcattactatttcaatgtttatttgtcattatgagttttatgttcacttgaggcagtgtttaatttaggttaaaaccttttcataatgtaaaatttgttgattcatttcatattgatacttaaaccaataaacctgaaatacatg

SEQ ID NO: 725627 - DNA, 232 bp, Homo sapiens
ctgccacgaagtgggaggcggcccgtgtggcggagcagctttatagcctacctgtgagggcctgtgcgtggagtggctccgcagatacctggtaaaacgggaatggagactgctgcagcgcgcggaccccccaaagacacatttgacccaccaccccatctctgaccatgaggccaccctgaggtgctgggccctgggcttctaccctgcggagatcacacttcgtgggcag

SEQ ID NO: 725628 - DNA, 186 bp, Homo sapiens
tcgagcgcaggttagcttagcctaatgatgatgtgttgtagccatggtaatactgctcagtactgagaggaacctgtaggtacagacatttggtgtatgtgcttgtgttgagtgagccaaatggggcgaagttacacatctgtgggattatgactgaacgcctctaagtcagaatcccgcccaggt

SEQ ID NO: 725629 - DNA, 445 bp, Homo sapiens
ggatcttatgtcatcccccttcgtcctcccagagtgttgggattacaggcgtcagccaccgtgaccggctcagactgtactcttctagccatctgaaatacgttttctaggtagagaatagattggtgtaagggtaccagttgtgaggataacagaaaacttggcagattatttaaaatcatcctgaaagtggtgctttatcttgatgaaacgtgatttgtaatccataggaaaattgtttcaacggtgcgcaaagagttgccggcggcgagcaggaggacttaccacaaagtgcaacagtaagggagcttcctaccctagcagttgcagagatcgttcacgtgctgatgcagatgtatgccacgtgcccttagactctctcaacattcaatttctcatgtgttggctttttcagatccccccttctgcaagaaaggctctttgc

SEQ ID NO: 725630 - DNA, 153 bp, Homo sapiens
atgatttatattatgcatatataaagtattttgtatgtgagcttgctacaccaagtggctacagtgacatgtgtgacatcatttccttgaactctgctaaaatatgcatttgtccacacatatggccttctgcagctaggcaagcagtcatat

SEQ ID NO: 725631 - DNA, 1019 bp, Homo sapiens
gaatatcttccgagtgcaaggagggaaacactggatccctatggcttgctcctagagatgggatggtccatgaatatcgtgaaatgttatcattggctgctcccacatgtgtgagcattggatctgatgaggtcggaaggaaatctcactctcagacctgaatacttagacggcaaagagtcccttgcacgaggtcggtggtatgttgtccgggcatgcccatggtgaccgtcctgacagacgcatcatttgttggcagtagaaggtaccactttacaagagaagcgcaaaggaccctagaggggatctgggcgcctcaggaccgctcttgagaatacggcctaccctagaatgtcatatactaaaggacatttcatcgtccagagaaatgcttctagtggcggattattccaggctttgtgatgacattaaatatcgggggtgaatttctataatgacgatggcgtgtttcaccgaaaggtaatggcttctgaataaggaacgcgcagtgttccaatgtgacagctgtaaggccattacagtttaaaggcaaatacgcagtaatgtacatggactagtaaaatctaatagaatgaagtattggttaagtcagaataagggagcgtatgattaaataattcaaaaagtggaggtaaaaagggtaaaagtgcagtggtggtcagtggctttcagtaaagaaagttaaaatacttgtctttgtgcaataaggtaacaggggatcttggaaggtgggaatcgtagggaaaatcattaggacccttggagatgaccaatggtcattagaaactcgatggaaaatatctgaggaaggaacacagtatgagaggggagaattttgagctggtagcatgtaggagatagagtaacagggatagaaaatcttagggagaagggaacaatggtaatttacgatacattaaaaaattcagataaaaaggaagggaaaaaaaaaaggttggagcaaggtgcataagtatagaaaggaaacagaggaatga

SEQ ID NO: 725632 - DNA, 381 bp, Homo sapiens
gctctagaggatcctaagctctggaaagggagaggagtctgttagagttggagggtggctctcacaagatggacggtaaaaggtggcactttattaaaaaggattaaggaggatttactcacaaaggaaaaaaagttaatctttttcttaagaggaaaaaaatactggtaatacatagaacaatctgcacatccagtcttggcactttttccaatttgactgatctctaaactggtgacccttgcatatatcttagtctcttttctacaatcttcttcagaaagctacagcagctaacaatcatgtataaagatgcatttcctagatcatcttcagaagaaaatctcttcagcactttccctagaatctgtctcctgacca

SEQ ID NO: 725633 - DNA, 112 bp, Homo sapiens
  misc_feature (16)..(16): n is a, c, g, or t
ccagctgtgaagagantctgtttgcttgtgtttgtttgtttgcagtctctctctgccaatggttggcaaggtgctggaaggcagcttgtggaggcgttggttccgcccactc

SEQ ID NO: 725634 - DNA, 207 bp, Homo sapiens
aaaagccgctcgcaagagtgcgcccactatgggaggggtaacagaaacctcatcgttacaggcctggtactgtggcgctccgtggaaatatcgacgttatcagaagtccactgaaccttctgattcgcacacttcccttccagctgtctggtgcgagaatattgctacatgactttagaaacattatctagcgcatccagacgcgaa

SEQ ID NO: 725635 - DNA, 635 bp, Homo sapiens
aagcactttcttgtaagcaaggccctccttttaccaccaagtccacttaaagcgcattaaaaccccaagttatgtgaggtttcttataaaacgtcccctgacaaagtcacgtcacggtttaagcaaactttttttcatctcttgaaatccgactggtgtctgatattttgcacaagctacttttgatagtgaaaataaattctgccagagtctcattcaatcatatataaccgtccaagcacgatagggtgcttaccccgcatataaaccccatcgtttgattcttatgcgcatattctaacagcatattctcgccaacgccctgctcatgtgagactgtcaggccatagagcggcacccactagcacttgttgtgtgtggccttaattagaagatgcgcattactcgcttgtttgttaccacaataaaggtgctaactttgatttcgctaactggtcgttactaatcattttttcccagtcattgaacagcgatggaagtctctaagggacactagatgtacaggcccgaagaggaaattgggcgcctaatcggtaacgcttattttatacagtggacgcacagtacctttgtgagtggcgcttgactgcggcttcatcaatgatttaccttcc

SEQ ID NO: 725636 - DNA, 326 bp, Homo sapiens
  misc_feature (105)..(105): n is a, c, g, or t
aactaacacagtggcacaagattagaaatgacggctcaggagtcatgcagccaaaggctcgagatcatgaacctccccaatgctcctgtagataatattattatngtaaaacctaacatgggtgtttgaggtatttttcagaccctgccttctgatggatcagctggcaccacccagaccaataaactggctcatctggtcttctggcccccacccaggaaccaactcagtgcaagaggatagcttcaactccttatgatttcatccccgaaccaaccaatcagcattcccgcttcccgagccccctgccagcacaagaaccaacg

SEQ ID NO: 725637 - DNA, 342 bp, Homo sapiens
gttttttgagatgggagtgcgctcttgtcgcccaggctggagtgcagtagcgcgatgtcggctcactgcaatcttcacctcccaggttcaaagctattctgctgctcagcctcataagtagctgggattacaggagcccaccaccacgcccggctaatttttgtccttttagtagagacggggtttcaccatgttggccaggctggtctcgaactccttacctcaggggatccgcccggctcagcctcccaaatgtgcttggggattacaggcgtgacgacttgtgcccggccagtttaaggcaattcttattagacctcctgcttactgatagatagcaga

SEQ ID NO: 725638 - DNA, 161 bp, Homo sapiens
aatcattctgatacagcctcatcaaaactgctctgtgaagttcttggcagggggagtgattgtatgaaaatgaaattttaaagtgacttcatcaaagggtcctgcttccctcactatagagccatcacttgtcaacaaaaacaagtaggcacaggcataaa

SEQ ID NO: 725639 - DNA, 531 bp, Homo sapiens
ggactcgatccatatctcctctacctcgggcttgcctcatcgctactattacatgcttgaccccacggcactcagccttaactgaacatgttgtcatgcagttgtgcattcgagctaaaatcgtatatgtcagatcgtcatctagtgtcaacctcacattcttcgtcgttgctttttccgtgttttaaacattctggttcctcagttttctcaaagaacgagaactttagacaagtagcaggacaagctacgccacagcaatgccaccaggcgacaatactatgaataagtcaggaggcctcctagaatgcagccaaataggaaactgttccaaacagaatcagtcttgcatacttctgctcagaaggctcctctcgctttggaaactggaatgaggatcaccaacaggatcctcattttacacaggggttatgagaggtacatcctctagcagagatgcttggtcattacctgtggtacatgagattaccgagcttaaagggaaaaaaaaccgatcttaatgttctccca

SEQ ID NO: 725640 - DNA, 1226 bp, Homo sapiens
cagcgggacctgcttcaccgagctgcagcgaagccggagaccctgggctggctccctctgcatgccccctgtgagcgggccatgccgccgcgggagctgagcgaggccgagcctgcaccggatccgggacctcgactcacctccctccgtcggaggcgtatattctgccaccccaagagctgtgggcagtcaaggttgcggtgactggttggagcagaagggccgcctgtatggagcaaatagctacgactacatcggtcgaccttatatgctgtgacaatgcggtacacgcactggatgcctgctaacactgagcgcgcagcattagacgcttgggaataatccaatatcgtccagtgcgaggcacacagtaccatttgggagtgcgacatagtgacggctaccggcgttgcggcaaatatgatggcatcaatgaggaaccaaccacgttgtcgaacaaggacgagaatatattaggaccccagaacagtctcaagtgaaccgcatttggggcgtagctcacggcgtgaataccccgaattgttagtatcacccgatgagaacaggttgccgtaaccaacgccagaccgaacacggcaaggacgcacaaaggcgtacgccgaattaccacaaacaagcacgtcaaaccaacggaatgacaaaccttgggtgcgttggcgccccggaaggaaaataccaacggcatagccagcaacagatagagccacaccaggaggatgcccagacccatatggttgccagtggcatatgcgctggcgcgcccacccaccaaggggagccagaacccccctatacgaaggaggagaacacagaatttagtaccaccacgcggtcacccgtaagatttacccaggccgtggcgaatcgcacacgggggtcgactcgcacaccggtcgggagcacgctgtgccctcccgcgcgagatggtccccccatagacgaaccacccacaagagaccgatccaagggggggatcgttgtgcaacacgcagagcacacggaatatccccaggacaggtcccactatccaatggcccttcacaccttcatgtaagtgagtgggctacaaaaagaccagcattagaaacagccaaatcgacagaacacacacttaccaacactacggaaccaggtacacctacacaggtacacctccgatagggcctaaatccccataccacagcgagtgacccggacactcacac

SEQ ID NO: 725641 - DNA, 577 bp, Homo sapiens
ggtgataagcgacgctcccaccttcgcctctaactcgctgccgccaccctgcccagtgtcctccggagtcccggacccgagcacgatgtggaaacgatggctggcgctctcgctggtgaccatcgtcctggtccacggcgaggaggaacctagaagcaaatccaagatctgcgccaatgtgttttgtggagctggcagggaatgtgccgtcacagagaagggggagcccacgtgcctctgcattgagcaatgcaaacctcacaagaggcctgtgtgtggcagtaatggcaagacctacctcaaccactgtgaacttcatagagatgcctgcctcactggatccaagatccaggttgattatgatgggcactgcaaagaaaagaagtctgcaagtccatctgccagcccagttgtctgctatcaagctaaccgcgatgagctccgacggcgcctcatccagtggctggaagctgagatcattccagatggctggttctctaaaggcagtaactacagtgagatcctagacaagtactttaagagctttgataatggcgactctcacctggactccagt

SEQ ID NO: 725642 - DNA, 103 bp, Homo sapiens
actgtgatagacaaataatcaaattgtcacgaactgcctgtaatgttaattagatcatgtggttatctggtgttgttttcctcatatttttgtgcttggagtt

SEQ ID NO: 725643 - DNA, 168 bp, Homo sapiens
tgtaccctttacgctgatgtagaaaacagaggctaatggtaacaagacggtacggggaacatggtggttttgaaaccacatttgttctgatccttgacaagactctgcctgatgtgctgagtggggagacgggtcagtgacaacctgctggcctacatgcacatgcct

SEQ ID NO: 725644 - DNA, 231 bp, Homo sapiens
ccacgctattacttgatatacaactgagatcatgtaaatgcctgtaagttttaaattctgcctacgattgaaggatctgccacaaaacaatcttccctgttctagaaggagaagactttactctacagaattctgccgagtgttacaaacacaagtgagaagaatctttgtgaactctctagttctattaatactattgcaggggcccagctcaaacgttcagctatcttt

SEQ ID NO: 725645 - DNA, 663 bp, Homo sapiens
  misc_feature (1)..(1): n is a, c, g, or t
  misc_feature (114)..(115): n is a, c, g, or t
  misc_feature (117)..(118): n is a, c, g, or t
  misc_feature (150)..(150): n is a, c, g, or t
  misc_feature (193)..(193): n is a, c, g, or t
  misc_feature (203)..(203): n is a, c, g, or t
  misc_feature (235)..(235): n is a, c, g, or t
  misc_feature (245)..(245): n is a, c, g, or t
  misc_feature (248)..(249): n is a, c, g, or t
  misc_feature (278)..(278): n is a, c, g, or t
  misc_feature (315)..(315): n is a, c, g, or t
  misc_feature (339)..(339): n is a, c, g, or t
  misc_feature (343)..(343): n is a, c, g, or t
  misc_feature (391)..(391): n is a, c, g, or t
  misc_feature (394)..(394): n is a, c, g, or t
  misc_feature (449)..(449): n is a, c, g, or t
  misc_feature (454)..(454): n is a, c, g, or t
  misc_feature (520)..(520): n is a, c, g, or t
  misc_feature (556)..(557): n is a, c, g, or t
  misc_feature (561)..(561): n is a, c, g, or t
  misc_feature (567)..(567): n is a, c, g, or t
  misc_feature (597)..(597): n is a, c, g, or t
  misc_feature (660)..(660): n is a, c, g, or t
nttttttagagtttaattctttttcctttttaaaatgccacaggagccaaggttaagcgattcttttaacttaggaactgaccctctccaggcagagtctccaaagtatattanntnnaaatttcaaagaggcagttctacaagtatganccttttaagaagccaatcctgttttccattgttttgctttcanacacgggttnaacttgaactcttacctttctccatttataanaaccaaaatncannttaaaaaatcaaaggctgggagcggtggntcatgcctgtaatcccggcatttagggaggccaaggngggttgatcacctgaagtcagganttcnataccagcctgaccaatatggtgaaacccccatctctactaaaaatanaanaatttttagcggcgggtgcctgtaatcccagctactcaggaggctgaggcggganaatcncttgaacccgggaggcggaggatgcagtgagattgcgccactgctactccagcctgggtgacacancgagtactttctcagaaaaaaaaaaaaaaaaatttnnttgnatggcntctgtggaagcaaatcttgatttaggggcncacaacctgagactccacccgctcaggatagacagacaggaaagccaaacgctctctggggancac

SEQ ID NO: 725646 - DNA, 179 bp, Homo sapiens
gtgaactacaagttgaagtcagtggcacatctgccctggaagccttcactacaagctttcacacctccattgatgacgtctttgccttcatcataaccatgcccacgtcttaccgcctggcctgctttccgggacgacgtggtgtttcttggtctacctgtaccaccggtggctttatc

SEQ ID NO: 725647 - DNA, 422 bp, Homo sapiens
tgtctgtttcatccataactcagccactggtggaacaaatctcataatcaagaggatcatagtccctggtaagtggatccctggagcattggcaccatgttttccagtaaagtctatctagctgtcagggaagagccacctgccctctgcaaagggagagggaaaatcaaaacccaggaaagggaatatgtttctgctccaaaaccaccagcttctgcctgtccccttcactctttctagatcattctttagacaatacactaacaatgaacaatctgaaaggaagttaaggaaagaatttcaattcacattaacatcaaaaggaataaaatattttggaataagtttaaccaaaaaggtcaaatgattataccttgaaaactacaaaacattgctgaaagaaattaaagacgatatcaata

SEQ ID NO: 725648 - DNA, 265 bp, Homo sapiens
tcgaaccgagctgtgtaccctagttttagaagtttcaatagcatctttatggtttcactggtgcaaaaaaaaaaatcataatggggatgcatttccggctaaatttacaaggaaggggatacataaattatatagatcacaagttttcttttatactatttaaaacccaatttatatggactaaatatgtccagaaggacaacatggggttcttaaatgggatgggctggatgtccaaatactggcaaaatataggcttctgggt

SEQ ID NO: 725649 - DNA, 91 bp, Homo sapiens
gctccctcccaaacatctgtgttacttctgtgccagcagtgactcgacaaccggggagctgttttttggagaaggctctaggctgaccgta

SEQ ID NO: 725650 - DNA, 380 bp, Homo sapiens
  misc_feature (13)..(13): n is a, c, g, or t
  misc_feature (145)..(145): n is a, c, g, or t
agaggacaaaggnggggaggttaggagagagaggaggagagatagaaagtaggtaaagagaaaacaatggtccccatattccctttaaagcccccagggtaaatttaaaaccctataattgataattgaaggtcttctctgtganactctaacactccaatacccaccttgttgtaagtgtaaaccaaggcatagcccgaaagcactgaggccactgacaacccgtagccttcctatcaaaaatccttaacccagtaacccatggatggcccaagtgaattcaatctgtagcggcaactgctttggtagcagaagaaagtagaaaaataacttttagaagaaacctcattgtgagcacacctcgccagttcagaactagc

SEQ ID NO: 725651 - DNA, 861 bp, Homo sapiens
ccccccttacccctgttgatacactataccgccatctttttgcccaaatcctctctacaaggtgctcactctgttgtccccaagctccaatttccgcggcagctgtcaacccatttccctttaatggctgtttatccccgctatcttatcatgggttccccacccacccctgtatccgccgggtccgaaggctcctctaaaccccctcttgcttagaaaatatttatacaaaccgcttaataaatataaatatctctgtcccactgttggatggcaaagccaccacattgggcagcgaacataatcacgtccaccccagcccttctgagaagaaaattcttcaccaaggagcattttaatgaaaaaatccgtaacaagccttacttcccaaaagtttgcttgagcatcctccatgactcctgcaatattccacacctcgcggttcctgtaagaaccccaattattcattggtggaactttcctctcgcctaacaaagttctcaacacgcccactttatgtatagactcgcccctctaatctttaataacccactcaattaaatggcgggtaacaaacattcactacaaacatcttccaagtataagtaaatttcaaaatgcccaaccaatcatgctccaccaacaactcgccgcttcttgctattcttctttactaaataaagactttttattttcttatgacaaacccctccacaaccacaaaatttgccacacgcaaccaagaccacagacaagctttagctggcgagagaagccatctgtcaccgtcaatttcccggccccccccccacccgggttttggcccccaaaaagattgtggggtaaacaacccccaaaaca

SEQ ID NO: 725652 - DNA, 181 bp, Homo sapiens
  misc_feature (25)..(25): n is a, c, g, or t
gctgagtgacccttacaagtccttnttgatcctgaactgggttaggtgccgctgttgctgctcgtgttgaatctagaaccgtagccagacatgggacttggaggacgagcaaaagatgctttaccgaattccggagatcctcaggaggatcccctaacaacagtagagagcatgcgagcag

SEQ ID NO: 725653 - DNA, 1308 bp, Homo sapiens
gtctcccaccgctgtgctttcgtaggtttgttactttccttctttttactcctcgtctttgttctctctacagctttttgtcccttcgtgacgctaggcatcgtatctctgtgccgctcccgtgactcgtagccctgctgccccttttgcatgttcgtgtcatccacccggttttccctctcgggtgttgttgctatttattcccactccttgggtttcttaaacgcttgtctacactttccgtctttcccgtgccccgtgttattctgtactcgtggattactaccttacttagcttcgcgagtacattcatgctaccagtcaacgactcagttaatcaacgtatgtgatcacttctgtcaaacttctgtacacgtaatattcctgtatcaccctgtgtgattcacaccctgacagcgtggtaacaaacagcgtttccacaccaagtatatccctactttgaacctttgctcagcttcatgccagcatgtatatgactgaatgcatgtatgcaaagcagtgcatgcactccaatggctagtatgtatgcattggatcgcatgtattttggtatgcatggagcgatagcttgcaagacttctagctgctctagtgtcacagtatactcttatagtccgatgatatcttcgctatcgcccaatatttgctacctcaaaggtcagatattcagaaatggtcacagagacctgctaaaatcctattcattcacatcatcgcaacgagtcatataatggactaagaatgcgctttcaagtactatcatggttttaaacctcctcacaacagccacacaatggaacctagtggctgctagatacgacacttaaacgctaagatatgtcaatgcaacgtactagagtacacaggtggttctcttccccaagtggaagccaaattcatcaacttatgtgaagaacttgcttccggatgactgaaccaagaggcctattcaagactctctggcagtggaggaagctctctttaacgcaaatagtgttgaaaccatctgtgttggccacattttccgtgcttattcttcatgtttctcgtaacacgttgatgagtctcggctgtgccttgttctgataactagcagacgtcgaggaacctttccgctaccgtgtcttgatacaatgttggccaggttctattgctcaagaatgtgttgtccaaaactcgcctgtttagttttgaaacgactggcactccaccctttgcttggtctttaagtatgtatggaatgttatgataggacattgtgagtagcggtaaacagcagcatggaaa

SEQ ID NO: 725654 - DNA, 745 bp, Homo sapiens
aggcatcaccatgttaaacgacgctcagacgtttgtaagaaatggtttcctgtatgaaagcacatggcggttgaatcttaagggtgtaaagtttctaatattcgtaaagatcctctatgaattagagtagtttgatcgcaatttgttaacgttaagtggatataaaatggagcaatgacaacaaaatgtaggcttgtaaaactgacttgtttcattaacgtgggttttgaaatctagccccagacatactgtgttgacgagatacttagagggagggagtaggttttgaagaggattgatggtggctggggagggaaggcctcctgaagttgagtattgatgcagagctttatagccatgaagaatctttcagtcatagtaactaataatataaacgtttcagtatttaaaaagacaaagtattttgtccatatgagagtctgcactgacatgaaaagttcacgtatggacgctggggccgaaaagctgttgattttctctaagttgacggttgtcaatatgatcgaactgttcgccaagttagtcaagtatgtctcaacagcgtagcatgatatacatgagggacagcgtgcagactgaatgacaaaaggaactccaaatacagctctgtacataaagttaaagtcctaattggaattgtactagtcctcccagtttgttacgtcggaaagattaaatgctacatgtgtaagtctgctaaatacggagcttaaaataatcgttt

SEQ ID NO: 725655 - DNA, 374 bp, Homo sapiens
gcggaccgcacacgcgatagcccacacgccgaatacccaaactgcacacgccgaatctccaaacacatgagctaaaggtcgtagtggacgaagttgttgcgcaacaacttcgtccactacgatctgagggccgtatggttactcggcgtgtgcatgcacacgccgaaccaccacacacttcttaaaatcaagtcttaatggacgaagttgttgcgcacacgccgaacgtccatacctgtccaaggagatctcagtggacgaaggcaacaacttcgtccactcggatttcacgcgaacaacgccgcgagtatggtgcaacaacttcgtccaccacgacatgacttgaagaagtgtgtggagcctcggcgtgtgca

SEQ ID NO: 725656 - DNA, 200 bp, Homo sapiens
agcggtaccataattaatgttggcccactaaacaggagattctggatcaggttgtaggtcaaagttttagaaagggctccaagggttggtttagatcggttacttgcgttggttggttggttgctatgcttgctcgcattgcttgtttggttggtttgttgctatgcttgcttgtatggttgattagggttgacgtcatg

SEQ ID NO: 725657 - DNA, 407 bp, Homo sapiens
gacacgtgcatgtaccggccatgcccgggctaatttttggcatttttagtagagatggggtttcaccatctgggccagtcgggtcttgaactccgggtgtggtgatctgcccgcctgggcctcccaaagggctgggattacaggcatcagccaccgcgcccggcctcccctcggcttttggtatcccttcgaggctcacaattcccagagctctccttctgggtgatagaaaggggggccacggcctgaggtgtgatggcagacctctccttggactctttctctgcaattactggttccggggagaccgtcaacctcatggttttagtgtccagggggttcccggctcaaatcacttcttccgggaagtggcaaagaggtgatttttccagctggctcagacgggt

SEQ ID NO: 725658 - DNA, 117 bp, Homo sapiens
ccaacaggaggagagattcctttggcttaggtcctcactgtggagaaaatgagaataatggaggacctcaaaagccctcaacaccaagaaacttaacaacttataatggcaccacca

SEQ ID NO: 725659 - DNA, 622 bp, Homo sapiens
acatgacggtcctttgcctgtacttgtgccctggtacgaccggacccgcgagcctcttgcctcgacgtgaagtgcagagaggactttgccaagcggatctgtacaacaccgacggtccttcgatgcattgtcctccgggacagcgcgctggaccgggacctcgcctcctgcctcgacgtggacgaatgtcgcgagcgaggcccagccctgtgcgggtcgcagcgctgtgagaactctccccggctcctacgcgtgttgtccgggactggatcctggggtaccacagcgggccccgagggcacctgtgaccgatgtgggaatgagtgccaaagaatatggtcccgagatttgtggagccagacgttgatgagaacacccctggatcctagcgctgacaaaccagactgtgaacctgtgtatcaggcccaacgaccagggcggcgggatgcacaggaatgtgaaacgagtgttgaaaacactaccgggtgtatgtgaagctgccctgacgtgaaaaatggacgaaaggctccttccatctgatgtcttgcaccaaaagcccgaagaagtttgaacccacagaacttgacaggcagtgttcacccaagaaactttagctagaact

SEQ ID NO: 725660 - DNA, 326 bp, Homo sapiens
gcgcgttcagcgtctaacggcagccactgtctctaccaagccaagagattcaatggtgagggtaggtgaccggaacacggagtcagaggagggcggtaaggcggtgcacgaggttgaggtggccctcaagcacaaccggttcacaataggagacctattacttcgacaatcgccgtgctccggctcaagaaccccatcaccttccgcagtaacgtggcgcctgtctgcctcccctagacgtgactgggccgagatcacgctgattacgctcaacacggggattgtgagcggcttcaggcgcacccccaagaagggcccggggtcca

SEQ ID NO: 725661 - DNA, 820 bp, Homo sapiens
cgcggtggctcgtgcctgtaatcccagcactttgggaggctgaggcgggtggatcacgaggtcaggagatcgagaccatcctgcctaacatggggaaaccctgtctctactaaaaatacaaaaaattagccgggcgtggtggcgggcgctgtaatcccagctacttgggaggctgaggcaggagaatggcgtgaacccgggaggcggagcttgcagtgagcggagatcgcgccatgactccagcctgggcaaacagagggaaactccatctcaaaaaggaacaaaaaacaaaaaaaacgagcacacttagtgcccacatctgtggtttctaatactattctccaataaaagaaaccaggatcctctgggtgcggtggctcaccacctgtaatccagcactttttttggagggcgaggcgggcggatttaacccttggagggggttccccaaacgggaagggtttccgcggaaagggaaaactttaaagggcccctttggggggcgccccaaaaaaacaccagagttttgggggcgggttgtgggggaaaaaagagacagaccccgctccctcgctggtggttggtggtggtccccactcgctttttccccgttttttaagaacgggttttttttaaaaacagacgcaagaaccaagcagcagtttttttttaagacgcgcagagaaaccaatgggagtgacgaaggactcaccaaccatcgttttttttcatgaacgtggcgcccctcccccaagataggggcgggcgcccccccggggtgtatggtggggggagaagcaaatgttgggggggggccatt

SEQ ID NO: 725662 - DNA, 916 bp, Homo sapiens
  misc_feature (916)..(916): n is a, c, g, or t
tggaaccacgtcctcttcatactggtaacctctgctgccgagcgaggtgtgtcgccgagatgtaatcgggctggacacatggagacgagacgtagctggtgtgcgcttccagtgagagtaaggcaggcaggtggccagcatccatgtctggaacggaacatcatagcatcgcactgccacccgcaaacacgttgcgttaatgcgagtggactggctaggtgtctgaaattgctagtgcatcgcagcacacatcaccgcttcctcttcgagctcgtcgtagcgatgaatcgtagcagagcagcccgagtttgcattgagtgtgaggccttagaggtggtaggttgtgaatcaatccatacacatactgatcgtcagcatcgtggagggctccatcgcacacaagatattcctacactacatcgaccatcaaccagacgctctcgcgaggtttggcacaagcacattttttgtggcctagaggagacaaggccttgtggcagttactagatcctatgacggcagccatgcccagtagggtcactttggtgactccaattcggcgatactagtaacattgaggtaggacaatcacactcaagagccccgtggggtagtccactaaggttagaagtgagccatttgatgcgtcgacgttttaccacccattttgcagcgcatagagcacttcgaagcaaggcgaaccaaacacgcactgaaacaaaaacccaagttcgcgcattagcagaacccaaaaatacccggagttggggaagtatgagaagggggatagaacacatggtgccgcagagacatagtgtacaaaagtagcctatgccgccaaaaccaaatttcgcccagagggacacatggtaggtcgccactccggattcttcaggtgccgtctgagaagcagaan

SEQ ID NO: 725663 - DNA, 598 bp, Homo sapiens
cgaacatgtcgatggctattttttgtatttttagtagagatgggatttcaccatgttggccaggctggccttgaactcctgacctcaagtgatccacccgcctcggcctcctaaagtgctgggattataggtgtgagcctccgtgccgggcccacaaagagattttatcatgaatgaatgttgaatatttttcaaatggcttttttacatatatattgggatggtcatattatttttctttttttcttttctttttttttttttggagatggagtctcgctcagtcatccaggctggaattgcagtgactcctcagctcacggcagcgtctgtcccccgggttctcaagcagttctcctgccttagccacccaagtagctgggattataggcatgcagcaccatgcctggctagtttggtatttttagtaaagacagagtttgtccatctgggtcatgctggtctcaaactcccgagctcagatgatccgcccacagttgcccccgacattgtgggaattacaggcttgacccaccgtgcctgggcaaacaaaggcgtttctatgctagggcgtccttgtgcctttatctgggtgagc

SEQ ID NO: 725664 - DNA, 124 bp, Homo sapiens
  misc_feature (75)..(75): n is a, c, g, or t
cgcatatggaactatgttaaccttttttgaggagctgccagctgttcgaagtgacatcaccgattgtacatcccntagcagcagtataatgaggttttcagtttctcatccttgggagcaattc

SEQ ID NO: 725665 - DNA, 672 bp, Homo sapiens
tataatactgaccaccatctccgtctccagagctatgtatcttcccaagacgaaactctgtgcctgttaggcacgaactctccatctccctatccgcccagccgcgggcaccccgacatttgaattgttgtctcgggtgagtctgactccttttagagcctcgaatgagggaaccatacagtatttgtcctttggtgactggcctatttcacttagcacaaggtcctcagggttcatccatgtcgtagcttgtggcagaattttattccttttgaaggctgaatagcattctattgtatgaatggaccacctttgcctatccgctcgtctgcccaatgacacttgggttattgagaactatgccactatgaacatgggtgtgcaaacagagtgactcttttagaacacaggtcagtccgtgacagtcctctgttcaacccgggccttcctgttctctcagtggagaagcccaaagcctttatgatggtccccaggacctgtacaccccaccccatcacgtcctgcagccacactgagctcctgctcttgctcagacacatgggcacactgccgccttatggcacaggcacaggctgctctcctgtcccctctgcctggacacccttccccaggcggtcccatgctgtcctccaccaccctccagtgtttgcc

SEQ ID NO: 725666 - DNA, 117 bp, Homo sapiens
aggaccactacgcagtatcagacaacttatcagctatacgtgcaaagatgtatggcggatagagggttaatacgatgaataagggccatctctcagccaggacagcttactttttgc

SEQ ID NO: 725667 - DNA, 892 bp, Homo sapiens
atttaaaaaacattgaaataattaaaaagaatcaagtcagaaattctagagttgaaaaatgcacttgacatactgaagagtgcatcagagtctcttagtaacagaattgataaaacagaagaattagtgagcttgaagacaggctatttgaaaatgtaaagtcagaggagacagaaaaggaatactctaaaagaatgaagaacagctataatatctaggaaatagcctcaaaagggcaaacataagaattatgtccttaaagaggaggtagagaaagagataggggtaaaaagtttattcaaagtgataataccagagaacttctcaaacctagaaaaagatatcaacattcaagtgtaagaaggttatgaagcaccaagcgtatttaacccaatgaagactaactcaaggcatttaataatcaaaccagcaaaggccatacaagaaaagatcctaaaagcagcaagaacaaagaaacaaataacctacaatggagctctgataaatttggcagaagactgttcaatagaaattttacaggccaggagagagtggcatgacatgtttaaagtgctgaaggaaacaatttttgtatcctataagcagtatattcagggcaaataagcttcaaacacgaaggagacaatcaaaagctgtcccagagaacaaaaacagatggtttcatcaacaccagacttgtcctacaagaagtggtagatagagtcttcaggcccgaaagaaaagctgtgatcggcaccagaatttctgtgggccccacccactcgcggtaaaagacccgcccatggggctcggagggtggggtaaaacccactgttcaaccaaagaatgagcgggcggcacaacccggtggggccagtgtttgacacaacgg

SEQ ID NO: 725668 - DNA, 529 bp, Homo sapiens
  misc_feature (223)..(223): n is a, c, g, or t
  misc_feature (383)..(383): n is a, c, g, or t
  misc_feature (393)..(393): n is a, c, g, or t
  misc_feature (446)..(446): n is a, c, g, or t
  misc_feature (484)..(484): n is a, c, g, or t
  misc_feature (521)..(521): n is a, c, g, or t
tcagcaaagcatttgtattggtccattctcatgctgctaataaagacatacccgaggctgggtaatttataaaggaaaaaggtttaattgactcacagttcagcacagctggggagtcctcaggaaatttacaatcatggcagaaggcgaaggggaagcaaggcaccttcttcacaaggtgccaggaaggagaagtgcaagcagaggaaatggccgaggctancaaaaccatcagctctctgagactcactcattatcacaagaacagcatggggtaaacttcccccatgatttcaattacctccacttggtcccacttcttgacacatggtgattatgggagattattaatttcaagttgagttttgggccggaacacaggnttgatatccnttgaaaacctttttggtattaaattattacccttcatattgtcatatattctnaatttcggtgggggaatgcataatttacttccaatttnaaattgttttaaattttatttcttggttatttccctntttttcat

SEQ ID NO: 725669 - DNA, 198 bp, Homo sapiens
agggggtcccccccccctttttttttggaaaggagcccgggaaaagaaatttttccctttgaattccccttttttttttccccaaagggggtttaaaaagttttccccccggggttaaaaaaaaaaaaaaaaaggggggaaaattggaaaaccggggcgggccccccaaaaaattaaaaaaaaagggggggcccctta

SEQ ID NO: 725670 - DNA, 471 bp, Homo sapiens
ctcatttgagttctttgcagtatagtttttgtgttcatgtcttatttatatgatagacttaggcttccttaaggattgacatgatgttaaatgtatctttatattattcataatactttaaagtcttctccatctactaaattttcaattaaaatttgttgactcagctgggctcagtggcttacacctgtaatcccagcactttgggaggccaaggcggttggatcacctgagatcaggagttcgagaccagcctggccaacagggagaagccccgtctctactaaaaatacaaaaattagccaggcatggtggcaggtgcctgtaatcccagctacttgggaggctgaggcaggagaatcgcttaaaaccgggaggcagaggttgcagtgagccaagatcatgccactgcccttcagccttggcaacagagcaagactccatctccaaacaaacaaactgaaatgagcc

SEQ ID NO: 725671 - DNA, 316 bp, Homo sapiens
tttttttaaatttgtttatcttccttgtaaactctggatattagacctttgtcagatgaatagattgcaaaaatattcttccattctgtaaattgtctgttcactctgatgatagtttcatttgctgtgcagaagctcattagtttaattagatcccatttgtcaatttttgcttttattgaaattgcttttggtatttttgccatgaaagcatttttttttttttggctcacccattaaaacctatattggccatgctagcttaggtttttcctgtaaacagaccttagactatgtggaggcaggagagtcgacg

SEQ ID NO: 725672 - DNA, 448 bp, Homo sapiens
tggcttaggtgaacctagcttggtggccctggtggtgtttggggccctcactgctgcccctggttactggcctactgtgttgatgaccctgaagggcctggcgccggggtgtttgtcccccctgaaccctgttgctaacccgacccaaaactatgttccagcgtgtcaggaacccgagtgttcacgttagcaatgctgtcaaaggggctcccccccctacacgttgacttgccccctgagcctggaaagaccacagcactgtgatggaggtcgggctttctggcccccttcctcacctcttccacccctcagactggagtggtccgttctcaccacccttcagcttgggtacacacacagaggagacctcagcctcacaccagaaatattatttttttaatacacagaatgtaagatggaattttatcaaataaaactatgaaaatgc

SEQ ID NO: 725673 - DNA, 340 bp, Homo sapiens
  misc_feature (145)..(145): n is a, c, g, or t
gaggggggggggggggggcccccccccccgccggggttattttttggtttttttgtaaaggggggggttccccggggggggccgggggggtttttttcccccccaagggggttgggtggcccggggccccccaggggggggggangggggggtgacccccccccccgggccccaccccaattttttgggggggcaatttttttgggggaccccccttgggttttcccggggattttaaaaggggttttcccccccttagggaaaaaaagggggggtttaaaagggggtggggacccggttttgggggaggggttttttttaaaaaattttttttccccca

SEQ ID NO: 725674 - DNA, 708 bp, Homo sapiens
  misc_feature (270)..(270): n is a, c, g, or t
  misc_feature (284)..(285): n is a, c, g, or t
  misc_feature (305)..(305): n is a, c, g, or t
gaattatgtaggaggcaggggactgtgtgtaatttcagtatgatggacgtgctctgagctatgtgaattcagtgcgacgtgtgctcgtgcagtgtctgcacacccggtggctctggccccgccggtgcctgttggcccagcccgccggcccctgagctccgtgtagcccgccgctggaggagctgttcacccggtggcgggcccttgcggaccttcctcgatgcgccaggcggggtctgaagcccatttgaaggtcaggaggcccgagtngctggcggtgatcnnacgctgaacgagaaggagcnggagctgcgggagactgagcacttgctgcacgatgagaatgaagatttaaggaaacttgcagagaatgacatcactttgtgtccaaaagaaataactcagctgaagcatcagattatcttacttttggttccctcagaagaaacagatgcaacaatgattctgatccctggaagtaaactgcaggagttggaggtcagggaggcaagtgtcgtacacatcagagcattcatcggatatgtatcagcaaatatgctgccgtttaaaagatggcatctgagagcctggaatatttccaagtgaagctaggtggccttagacatgcatctgcaggcatagggggtccagaggctataggcactgacattcgacggaggtgtcacggagtacaaagagtgcaagaca

SEQ ID NO: 725675 - DNA, 379 bp, Homo sapiens
ggcgggtggatcacgaaatcaggagatcaagaccatcctggctaacacggtgaaaccccgtctctactaaaaatacaaaaaattagccgggcgtggtggtgggtgcctgtagtcccagctactctggagggtgaggcaagagaatggtgtgaacccgggaagcagagcttgcagtgagccaagatcgcgccactgtactccagccgggagacacggcaagactccgtctcaaaaaaaaaaaaaaaaaaaaaaataagcgggggaagggggggggggccccggggaatccccaggctaacctcagggagggagagagggatgggggcatacgggcgacttggaggccgggggggacagaggggagagactcaggctcctc

SEQ ID NO: 725676 - DNA, 846 bp, Homo sapiens
tagtgggagaagaagaaaagagtggagcgaaaggagtctaatgtgatagagcccacgaggggggggggcaggagagggcggctgacagagggggggcgccgcgacgcgcgcgccgccggctgggggaacgaggagaagcgagtgctaggggcccggccgccaaggacgccacaggggggctgggcagagaaacacggggaggggtgaggccgttcctccactatacaatagcatagcgaaaggggggagagcagagcgccagcaaggcgacaagccggaggacagccggggcgctgccgagagggaggcgccccaaggaggacgggaggcgccccgggcagccaagggagagtacacgtgggcaggggtgcaaccacacggggcgggaaagaagtggcgaaggaagtcaggcgcacctggagccgcatgtgggaaagaaaccaagggagtaaacggggcgggcgccctccctgtgagcacacagacgatggaagagttacatatgtggagggcgcgcacgctgccggacagaaagtagccgttcgtgcgcaatgcagggggggccggctggggaagacggttcaattcgcgcccgaagcggacagaccgaggagcgtccaccgggcagcacgactgcccgggagtggtgcagcctcctggcaggcagccccctcgtggcggcttggacggactcccatcccgcagaagagcaccactcgtgtcgaggccaccgtccggtccctccgggggacacaacacgggcgcacgccccatcagttctccaccgcgggagggccagtcccaatataaaaagaacgaggtcttaaggcggcccatcaaagacaa

SEQ ID NO: 725677 - DNA, 886 bp, Homo sapiens
ggacgaagcgaggaggctaagaaagtggtgaatcccctgtttgagaaaaggcctaagaatttaaggcattggacaggacatccagctccaaaagagacctcatcccgcttagtgaaatggccccgttatatctaggttgctaatggcagagagccatcctctatagaacgcgtgaaagctgcctccgtgcttgaattatagccaacgtttcagcgccacggtcgctgtggtagccgctcgagatcatgcgtatcgtcagcgtgctataagactggacccagcaatgtacaagaccagagacaagagcaagagaagaagcagagactgttggcccgggtgcgagaagaaggcttgctgtgcaatacgtgggacgtcccaacaatagagaccaccgtgtccttcgagcaggaagttaacactcgtcaccaccttggtggagaacaagaaagctcagtctggtggtgattgcagcacgtagctgtgggatcccatctgagactggttgtcttcttgcctgccctgtgtcgctaatatggcgggtcccttactgcccttatcaagggaaaggcaagactgggacgtctagtccacaggaagacctgcaccagtgtcgccttcacacaggtgaactcggatatgacaaagggcgcttgtgggctaaagcttggtggaagctatcaggaccaaattacaactgatcacgataccgattgagatccgccgtcactggggtgggatgtactgggtcctaagtctgtggctcgtatcggccagctcgaaagggcaaaggtaaaggaattgccacttaaactgggttaatgtccccgtggagtttctggccttaaaatacttggatcatcacactttctcttcaaaaaaagaaacg

SEQ ID NO: 725678 - DNA, 711 bp, Homo sapiens
cacgcgtcgctcatttttccaaccatatttacgctggtctgtgaagctgtgtattaggtttagttaggtgtagttttgttttgttttattattatactttaagttacagggtacagtgtgcacaacatgcaggtttgttacatatgtatacatgtgccatgttggtgtgctgcacccattaactcgtcatttacattaggtatatctcctaatgctttcccttccctctcccctcaccccacgataggcccccatgtgtgatgttccccttcctgtgtccaagtgttctcattgttcatttcccaccgtatgagtgagaacatgcagtgtttggttatttgttcttgcaatagtttgctgagaatgatggtttccagcattcatccatgtccctccaaaggacatgaactcatcatttttatggctgcatagtattccatggtgtatatgtgccacatttacttaatccagtctatcattgttggacatatgggtaggttccaagtctttgctatcgtgaatagtgccgcaataaacatacgtgtgcatgtgtctgtatagcagcatgatctcataatccttcgggtatatacccagtaatgggatcgctgggtcaaatggtatctctagttctagatccctgaggaatcgccacactgacttccacaatggttgaactactttacagtcccaccaacagtgtaacagtgt

SEQ ID NO: 725679 - DNA, 246 bp, Homo sapiens
gtgagggaaacctgggttgtttggctcaaagtgcccattgtacttgcctaattaaatttggcccaaaccggcttccatccatagggactgtgctctaacttaatgtgtcaatcagttgtaagctaatgtagatttatggacttgcaaccaagcaactgagagttaaccaatcataggagccaaaccctttaacaatcctaggctggatgctgccaaattatgcccacataaggcaaatatttaact

SEQ ID NO: 725680 - DNA, 903 bp, Homo sapiens
tacatgtaggtttatttctgggctgttgttctgttccatggtctatatgtctgtcttaatgtcagtaccttactgttttcactactgtagcttgtagtataatttgaaatcaggaagtgtaatgccctccagctttgttctttttgcttagtattgccttagctatttgggctctttttggttccatatgaattttaaaactgttttttctaattctctgaagaatgtcattgtagattgataggaagatagtagactgacaggaatagtattgaatctgtacatgctttgggcagtatggcattaaccaacgttatttcttcctatccatgaggcatggaatattattatccatatggtgagggtacattacatgattttattcgaaaaagagtttgctaagttattcatggtaagaaggctccagggagagacatcacactagataaggacatggattgcactagagataattattacctcattgaacaagagaggaaacatgagacgatcgagatggtacagcgcaacccaacaatgtaagttatgaagtacacgagtgctacaaacaacagagcataaaaggaggaacgagcagagacgccaggaagacaacagacacacagcaagagacagcaccatgagagggacacagtcgagaacaagcgagagagggacgagaatgaagagaccaaccacgagtacaagaggagacacaaaacagggaaaccgggaacagagagcaaaacagcacgaaacgagataaacaagaggaaaagccacagcacagaggaacaagcaaagcatcacacgacagtgcagtgacaggagcgcccagcagcagacgagtgcaacagcaaggtctagagaacaccaaaaagcgcgccacagaccacaagggag

SEQ ID NO: 725681 - DNA, 133 bp, Homo sapiens
cacgaggccgacctccaacctgccactttgtgttccactttgcagaatcccaatgaggcagtcagaacaggacactttgggaaggacaggccccgtatgagttttgacatcaagcctctctgcctatcaaact

SEQ ID NO: 725682 - DNA, 868 bp, Homo sapiens
agcttacccttgaccacatatctcgaacatctacactatatctaataacactcattcctctctacaagacaacgtgttttctaattgtcagttcccagatggtggcgtagtgcctattttgtttcacccacagagtctgttatcatttcttagaacgtttgttattttctcctctctttcccccaactatgcaatcttaaaagccctgtgtgtctaaatcgagtgcgcctcatctcctgtaaaaacgggtcccccgcaaattataccaccaggcggctcttaataaattcgcccccaactcgtgggttatggtatctcccgccccttggtatttgttgtgttgcgaacccgagccccaaatgatgggtgggacccccccgccgcccaccgcaaagatctgtctcccggacgaaatattagtatatgcgacgtgccccaattaagtggggaaaccacttttgcttctccccgaaagatagatcgtttatccccgtgaatcccacgggtcccctgtccagttgttggacaaaagaaaactgacgctaagaggggggtagaaaattaaccctactgggaaacgagggaggcttccccgagggtccacttgtacacatgacaggagggagcttccactaagattatggatcgcccgcacgcgtggtgccgcaaaaaaataggagaaccactattagaagggttcgagaaaccttagtataaggatgttcgcccccgcaagccccccccgagcacccacagggaagcaccctcaagcaaaaaaaaagggttagataaccaaaggaccaaaatttaattttttaaaatgttacccccccatggagaaataaaaataacctgttccacaaaaaca

SEQ ID NO: 725683 - DNA, 352 bp, Homo sapiens
ggatgtgtgcatctgtgcatttttaaaaaattatgagggtcacagtaagaaacagtaaatcttgacatgtagtttaaatatgagttggagaccagcctagccaacatggtgaaaacccatttctactaaaaatacaaaaattagcctggtgtggtggcgggcgcctgtaatcctagctactcacgaggctgaggtaggataatcgcttgaacccgggaggcggaggatgcagtgaggggagattgctccgttgcactctagcctgtgatagacacacacacacacacacacacacacacacacacacacacacagaggggagatcgctccgttgcactgtagcctgagatag

SEQ ID NO: 725684 - DNA, 559 bp, Homo sapiens
  misc_feature (4)..(4): n is a, c, g, or t
  misc_feature (33)..(33): n is a, c, g, or t
aaanatgcgaaagggaaagctgcaagtgactgnaaagctctaatttagagagtgttaagtgtgatttggagaaaagcatgaaagctggtttgaaaattcactctcatttgagtggcatccagaaagagattaaatacagtgactcattgcttcagatgaaagcaaaagaatatgaactcctggccaaggaattcaattcacttcacattagcaacaaagatgggtgccagttaaaggaaaacagagcgaaggaatctgaggttcccagtagcaatggggagattcctccctttactcaaagagtatttagcaattacacaaatgacacagactcggacactggtatcagttctaaccacagtcaggactccgaaacaacagtaggagatgtggtgctgttgtcaacatagttccaatggctcctttctgacctgctttcatgttttaatgtttgtttaatttaataggaaacctcattttaaatataacactcaaaaaaatgtaaatcatattgtagtattcaatagttaataaaaactcgagaaatgtgttgtttctg

SEQ ID NO: 725685 - DNA, 340 bp, Homo sapiens
  misc_feature (5)..(5): n is a, c, g, or t
  misc_feature (47)..(47): n is a, c, g, or t
cccanttcccgggatgacagggagtatatggaattacacaggacacntgtatcatgcatgtgttatacatgattgagacatatatgtccaaaagacgctctgtggggaacacagaacttcagctgggaagtcaaaggcagtggggccacagcaggctggtgcaaagtctctgtcttcagtgactgaggacatgaaggatggtgtggctgcgtgcctacagggagatcggcgggaccagacagaggaaagggcagtggtgtcccaggcaggctccatgtctccaaccttgggaacaaggctcaattcaagttaaatcaggacaagggagctctgtgaggct

SEQ ID NO: 725686 - DNA, 199 bp, Homo sapiens
gtcagtgatttcagacttgcagatcatccatggagtaatgcttacatcttttggccagtcctacctcccggagctctccaggcccagaactttctccagtcagcctctacagatcaagctcatgactcacaatggcctatttaggcccataccctacgtcacggcagcctccggagataattttactgcctcaaaacag

SEQ ID NO: 725687 - DNA, 266 bp, Homo sapiens
cttgccttcgggcataataatactcttttaactacatttaacaaatctttattgggctgctgctatatggtaggcacccttgtgtgtccttttaggtcattagtgcttaggagaagccgaggaccgtggatgctttgcagggagtacgacgagacggacacgttttgccctttacacactactcttgtgatgagggaaggtctcacctgaagtgcggtcttccggacggtgtgcgacgcagccatgtggttgtctgggcagcgctg

SEQ ID NO: 725688 - DNA, 268 bp, Homo sapiens
ctagttttagaagtttcaatagcagcacaacacaacaatatctgcacctcctagcaccacatctgacctggtggaagaagctacgagctacgacagcagccgggggtcaatggcaacaacacactttcctgagagctccacaacctcaggccgtagtgaggaatcaacagcatcccacagcagccctgataccaatggaatcacacccttacctgcccattgtactaccccgggcagcaatgtgctattgaaacttctagaaactagg

SEQ ID NO: 725689 - DNA, 689 bp, Homo sapiens
  misc_feature (379)..(379): n is a, c, g, or t
agcggaggagagacgggagaagagagcgcgatgagaggggagggcgtatatgtcctagggggcgccgatcaagaatacagtgcattgcgagtagggatggtatcagattgtgtccacgttcggagttcagacgtggacacacgccacgagtctgacgaatttaatggaggtggctaaagcgaagcattcagcagatctacctatatgtcgtattcatggcatctcacatgctcttgcagacgaggaggtctaatgtctatttgaggagtacttataactgggacataggaaatgtactggtagaaagttagccattactagcgaattcagtatatttgacgggataagctaactgctcaccgttccttacgcgtgtgcnatcgagctgcacacaaggtcgtgttcaccgaaatcaagaactaggtcaggaacaagtgcgcaatattagctccaattgccagaaattgaatggaaccacggaaggactgcaaagaggcacggcttcttcacttgtagcctctagattttgaaagtaactaattccagagtgggagaacagaggttatggaactatccgtcggagtgaatcgaggtgcacagggaagagctgtactccagaaaagttgtccaaggacgtggtagcgtggaattcttagatgggatgaaagaggtagtatgagtaaggggaa

SEQ ID NO: 725690 - DNA, 930 bp, Homo sapiens
tcaaggtcaaagctgttttatccaccactataagcaatcatgttggcccttttttttcccataagaggtaggtctctcagaattcccagggtatttctattccttttttccccccatttggcttagcagttctgcaattagagaccctattgccattctttcaggagaacatgacggagaaagtgtgattataatcacaaccgggaacatccggctcatggagggtataaagtaaaaggatatggtgattatatcaaaacttctgtgaactcacttttctaccacttgatgggtcacaaatgattggaataagatgaagctgaattgcagtagggaaatccttttttactggggcgttcttcattatagccttcaacccacaagctcttataatttaacccttgggaataaggcaaatctgtatttaataccagaattttggcagcacaaagggatacgtgtggggccctggggtgggtatggatgcatatgatttccccaggtgtggtctactgtgtattattccagataggaagacggattaaaattgagaaaattcatcccttcaattaatgtgtcgaatttgccccacccgtttacaaatttgtccagggagtgttgaaagggacttcctttaattcacagaatttttgtagaacatccttgtgtatatgtggtgggcagtaccctgatgtgggaacaccgtgtcctgacacttgtggttatcgggttaccaagttgtggattgagtgatattggagattggtgtttagtggcacaggaaatatggttatgagcgaagttcgacaattttgacggtattgtttctaatcgaattacgaagatagtggttggtgaagaaagaaaaaagaggggcgtgatatctggggacaggagaccgttgaagggaatggttaaagtgacggttat

SEQ ID NO: 725691 - DNA, 667 bp, Homo sapiens
tctatgcccaaaggtagagttctggctaaaaacctggatgaggaagggtttgaaagtgaagactgcgtcgatgatgacaatgagtgcatgggaggctctgatgctggaatgataaaggtgatgaatcagctccgattccttgcagaactggcctatgagctggatgcgcatgatgcgcctgaaagcagtcagcaggcacctcctaaggacaacgagataagcacgtcttacaacgcttgtaacgtgcattccccgctgaagcttatcaacagtatggtcatctcgggaccgtgctgcttcatcatggcgcaatgattggctgactcccagaacatgtgctgccttacagcaccgtgagcctttcgtcgacatagggaacgaccgtccaatttgaatctagctgtgacatgctagtgagctagtcatcatcgtcgagcatgatgctgatgtcctaaccatgtatagagattacagaaacagccagtgatttaggcaggaagaaccatttaggcggagcaaatacaaggtgcctttttaaagccaggcgattttccattaggcagggctcaacaaatctcccatatttggctgcaatagcctggttcccctgtatttgaagtggcaattccatccctttgaacggcgttttacatcgaaggaattggtt

SEQ ID NO: 725692 - DNA, 778 bp, Homo sapiens
  misc_feature (7)..(7): n is a, c, g, or t
  misc_feature (29)..(29): n is a, c, g, or t
  misc_feature (47)..(48): n is a, c, g, or t
  misc_feature (53)..(53): n is a, c, g, or t
  misc_feature (57)..(57): n is a, c, g, or t
  misc_feature (77)..(77): n is a, c, g, or t
  misc_feature (102)..(102): n is a, c, g, or t
  misc_feature (111)..(111): n is a, c, g, or t
  misc_feature (136)..(137): n is a, c, g, or t
  misc_feature (155)..(155): n is a, c, g, or t
  misc_feature (160)..(160): n is a, c, g, or t
  misc_feature (171)..(171): n is a, c, g, or t
  misc_feature (175)..(175): n is a, c, g, or t
  misc_feature (177)..(177): n is a, c, g, or t
  misc_feature (181)..(181): n is a, c, g, or t
  misc_feature (185)..(185): n is a, c, g, or t
  misc_feature (203)..(203): n is a, c, g, or t
  misc_feature (207)..(207): n is a, c, g, or t
  misc_feature (215)..(216): n is a, c, g, or t
  misc_feature (223)..(223): n is a, c, g, or t
  misc_feature (227)..(227): n is a, c, g, or t
  misc_feature (229)..(229): n is a, c, g, or t
  misc_feature (232)..(232): n is a, c, g, or t
  misc_feature (235)..(235): n is a, c, g, or t
  misc_feature (241)..(242): n is a, c, g, or t
  misc_feature (251)..(251): n is a, c, g, or t
  misc_feature (254)..(254): n is a, c, g, or t
  misc_feature (265)..(265): n is a, c, g, or t
  misc_feature (272)..(272): n is a, c, g, or t
  misc_feature (298)..(298): n is a, c, g, or t
  misc_feature (307)..(311): n is a, c, g, or t
  misc_feature (313)..(313): n is a, c, g, or t
  misc_feature (340)..(340): n is a, c, g, or t
  misc_feature (407)..(409): n is a, c, g, or t
  misc_feature (416)..(417): n is a, c, g, or t
  misc_feature (421)..(421): n is a, c, g, or t
  misc_feature (425)..(425): n is a, c, g, or t
  misc_feature (430)..(430): n is a, c, g, or t
  misc_feature (439)..(439): n is a, c, g, or t
  misc_feature (441)..(442): n is a, c, g, or t
  misc_feature (450)..(451): n is a, c, g, or t
  misc_feature (455)..(456): n is a, c, g, or t
  misc_feature (464)..(465): n is a, c, g, or t
  misc_feature (468)..(468): n is a, c, g, or t
  misc_feature (476)..(476): n is a, c, g, or t
  misc_feature (478)..(479): n is a, c, g, or t
  misc_feature (482)..(482): n is a, c, g, or t
  misc_feature (517)..(517): n is a, c, g, or t
  misc_feature (519)..(519): n is a, c, g, or t
  misc_feature (525)..(525): n is a, c, g, or t
  misc_feature (544)..(544): n is a, c, g, or t
  misc_feature (552)..(553): n is a, c, g, or t
  misc_feature (555)..(556): n is a, c, g, or t
  misc_feature (576)..(577): n is a, c, g, or t
  misc_feature (580)..(580): n is a, c, g, or t
  misc_feature (587)..(587): n is a, c, g, or t
  misc_feature (591)..(592): n is a, c, g, or t
  misc_feature (600)..(600): n is a, c, g, or t
  misc_feature (607)..(607): n is a, c, g, or t
  misc_feature (612)..(612): n is a, c, g, or t
  misc_feature (616)..(616): n is a, c, g, or t
  misc_feature (639)..(639): n is a, c, g, or t
  misc_feature (653)..(653): n is a, c, g, or t
  misc_feature (672)..(672): n is a, c, g, or t
  misc_feature (683)..(683): n is a, c, g, or t
  misc_feature (712)..(712): n is a, c, g, or t
  misc_feature (752)..(752): n is a, c, g, or t
gccctgncttgcgttccagtgttccagcntctgggagatgaacctcnnggcgngcgngggcgagagtgggggcagcntgcccccggcgctctccgacctctncctggcgcntttgctgaagaagcgtagtcggccnnaggctgatatcgcatccnttgantactgtgaaanaggncntgtncaanaacgggtctcctgccccnggtngccctgcnnaggtcangggncnggnggngcgganngtgcgaatnatncagtttgcganggtcacngaagagcccatgggaatcactctgangctgaatgnnnnncngtcctgtacggtggccagaattcttcntggtggcatgatccatagacaaggctcccttcacgtgggggatgagatcctagaaatcaatggcacnnntgtgacnnatcnttcngtggntcagctgcngnnggcgatgnnagannccaaaggnntgntctcattnanngtnattcccaaccagcaaagccgtcttcctgcactacngntgttcntgagagcgcagtttgactntgatcccnnannggacaatctgatcccttgcnnggnggcgggnctgnngtttgctnctggggncattntccngattatcaacaaggatgacagcnattggtggcagggncgggtggaaggctcctccnaggagtcagcnggattgatcccttcccctgagctgcaggnatggcgagtggcaagtatggctcagtcagctcctagcgangcccgagctgcagtccctttgggaag

SEQ ID NO: 725693 - DNA, 496 bp, Homo sapiens
  misc_feature (27)..(27): n is a, c, g, or t
agtcttttgcactacttgtaggatctnaatggagactataagaggatcagtcgagactaatagaagggaacactgggtatctgtcttttagtctcacactttaaagcaaaatatgaaatctagttattgtttataggtcagagagttagaatcccaaattgattcagattaatctcttgtccactaatatgcctgtttctgtatacttcaactcatttggtaaaaggtagcaggcaatggttgcatccttaaatacatagactggtctgatggacaatacaagctttaaagaggatgtggagtacaaccctttgggaaaacagtttgatattaattcataaacttgggaaaagtgcgtaaacggtaagccagccatttaaccctgacatatctctaggcgtagagatccactggccttgggttctcgggtagtggatggggctgttcatggcagcattatttgtaatagcaaaaatgagaaaccgtcgaattcgag

SEQ ID NO: 725694 - DNA, 218 bp, Homo sapiens
ctctcaaaaaaaaacaactgtgtgtcataatcagcagtgacaatcatcttaagcaacaacaaaacaaaacaaaacaaagtattggattagttcactgaactgatggaacctagatacaaatagctaatctcagcactttgggaggccgaggcgggcggatctcaaggtcaggagttcgagaccagcctgaccaacataatggaaaccccgtctctact

SEQ ID NO: 725695 - DNA, 222 bp, Homo sapiens
gctccaccttaccaccagacaaccttagccaaaccatttaccaaataaaggtataggccgatagaaaataaaaaccttgcgccataaatatagtaccccaagggaaaagattgaaaaattttaaccaagccataatttagccaagggcctaacccctatacccttctacaaaatgaaatttaacctaggggaaccctttaacaggggggcccaaattttaaa

SEQ ID NO: 725696 - DNA, 682 bp, Homo sapiens
tttgctcccgctgtgcggaaaagaatccaggcccttccacgcgcgtgtgggtgcgggggccccgaagtgctcgtggtctccccgctaggtctccgctagggcaggacaccggaatcatgtggtgggaccaccagcacccgccgtgttcaccttcgaggcggacgagaatgagaacatcaccgtgttgacagggcatccggttttcgggaaacatgtgattgatcgattgaggaatcctctccatctgttcgaagtctcagtggtatcgtggtgcttatggtgcctcaagtttctgaatgacagacttgacacaaagcaagagtacgctgaggagctggcattggacgcaagccaagaaagaatccgaagatcaggaaacgattaaagcaaggccaaaagagcttggaccgagagagggcttgctgcccaattgagcagttaaacccaggagccaatccatttcggagagcaggacttattgttagacgaggaggagaaaagggcgcataagggcaaaaagacacctgagggattagacacaggtttgagaaggagaaaagaccggggtgctaaaagaaaacagggatgcatttcttacaaaagaaacaggtggatagactggaggaaaaggagtcagagtctacaagatgtcccattgaaaattatcagaaaagttgtgatg

SEQ ID NO: 725697 - DNA, 345 bp, Homo sapiens
  misc_feature (33)..(33): n is a, c, g, or t
  misc_feature (71)..(71): n is a, c, g, or t
  misc_feature (308)..(308): n is a, c, g, or t
  misc_feature (321)..(321): n is a, c, g, or t
aaaaaaattttaagcaaagccaggagttagtgnctctctgaagtaaattcaattgcaaaatcttggcagangcagaaatggctcatatcagaagtgtccaaataaaagttctgggaaactagggattttgctttccagagcaatgggaatagcttccaaggtcagagtaaggtaatgagaatcttcccgggcaaattcccagtgccaggctttctgaaagaagtcaaaagcttggaacctcaatttggggcgccatccatgactcatctagcagcccctctctttttccctttcactttggatggttnccattctatatgncccatttactagcttggccatagg

SEQ ID NO: 725698 - DNA, 889 bp, Homo sapiens
ctcgcaccccatttggacccatgaggcctaccttgagggtcctggccctgtgctttttaccctttcggagatctacacttgacctgcaccgggatggcgagggaccaaaactcaggacactgagctttgtgggagacccagacctagcaggagatagaaccttccagaagtgggcaacttggtggtgccttttggagaagagcagagatacacatgccatgtacagcatgaggggctgccgaagccccttctaccctgagaatgggagccgtcttttcccagttccaccgtctccccatcgtgggccattgtttgcttggcctggctgtctctagccagattgtggtctatcggagactgtggtcgctgctgtgatagtgttagagaggaagaagctccaggtcgcgcccaatagagcagaggaggctatctatctccaacgctgcgtgtcagcgtagcagtgccccacggagagatttgcatgtgttctctccacagtcgtgcaaaaggcctagaccgacagcattgtcttgtgagaggactgtagatccaggaagttactttgcacgcgcttcccccttgtgagatcgagaaccctgcgggcatttcatttgtgctaaagcacctgaatgtcgatctgcgtccctgttagcattatgtgaggaggtggagagaccagctccacccacggcgtgtcccaaccgctgacacccttgttttccactggcgtgacacatgggtttcctcccccctcatctttccgggtccagagaagtgggggtggacgtaccacatctcatggtggtcaacatgtgatgtgcagcgtgaagacagcaaccttgtattacttcccgacagtaaataaagaatgggaagattatttgctttt

SEQ ID NO: 725699 - DNA, 169 bp, Homo sapiens
ggaggacgcacagtttctatcttatgacaataagtaccacaaggagcaagaggaggcagattttgacaatgaggaccagcaagccgcaagagtttccagattttgaccataagtaccacaattcgcaagaggatccagattttaactataagtaccaccaggcgcaaga

SEQ ID NO: 725700 - DNA, 427 bp, Homo sapiens
aacgatgaacagattcttttaagggttttcattcccaaataaaagtcttcagtttaccaagaataccatttttgatttaatcattcaaccttcccttggctggctcagattctcacccaaacatattaaaaagcatgcattctgcctgccacctaaaatgtcaacattgcccatatgccaattgcatgtcccgtcaggagatactgtaaccctcttcggagttcaattactgcaccgacacttttcttaagactaaaactcgtgccgaatttctgcaatcccggggatccactatttctagaaccggccgcacccccgtgggacctccatttctttttccctttaaccaggggctaaatttccaacttggggaaaatctgggccataactgtttccttgcggaaaaattttatacggtcaacaatac

SEQ ID NO: 725701 - DNA, 810 bp, Homo sapiens
cctcgtcgattgtgttctctgttatttacgcgccgccctcttaattagggggcggccgtatgatggcttgcttgcgcgtcgcatggcgcgtagtcgagctgctggttggttcctcgtgcgagagtattctctgtgttcgctgggtaatctcggctcgccactaatagctcttggtgttgtgtgcgccacgctctctgttgtgcggcaatgtttcatccttgtgccgggtgtccgcgagacaccaatggctccgcgcggatttttcgcggccccctctttccgccgccgcgcgtgctatgccaacatttgtgtccccaccgctgtccatcgtggccccccccatcggccaccgttgttgtgtgcgcccccggggttggctgctcgaccccttgtgcggtgcaaattttcttggctcgcctctttctactggcccgttaggggcccactgctggttgttgtcacaccctgtgtggaatctcctggtagaccgcgctgggagttttctattcttctcgtgcctcgctcccacttgatgttggggcacaaatcccactgtgctgggggcactgcctccactcgggccgtggtgaaatcgagaagagagggcttttgagtgcactctgggccccacagggcgcccatttttctcgcccacagggcctataggcgggctactctcccgcaggattaggaccattatcttgggtcgattcctccaacggttgtgcgccccagcctgtgccccgagccccctggagtctttcgtacgctcctaccctcatataacccctcggggagcatagatcaaga

SEQ ID NO: 725702 - DNA, 180 bp, Homo sapiens
ggatttgctggtgcagtacaactaggcttaatagggacatggttttggaagttctggccagaagaattaggcaagaaaaagaaataaagggcacacaaactgaaaaggagaagtaaaactatctctatttgcagatgacataatcttatatgtagaaaacccttgaagctcaactaaaaa

SEQ ID NO: 725703 - DNA, 800 bp, Homo sapiens
tggcctcaaaaagctttctccccattgggtccaaggcttgtaaggcctcgttaaaaaagctgcctatgggctggcaggagcagcaggtttaggcagaagcccttattcactttggcagggggcccttcaacactgtcgctggcgctcacaaaggctcttacagtcaccgctctgacagtgagcctttcgcaagcagtatactcgcccagcccagcctccgggccacccagcctgtgggaggctgggcacagggtggctcacccatccttctgtgactaagctcacacattcctcatctaggcaagctgagtctccaggcaagctcaccagaaaagtgggggctccgctgcgggcgcagaaacccagggcatgacagcatccaaaaaggggcccggggacaccagcctatacacacactacccgagggccccaggggcacgagccctcaccccagcggcccgacacgaggggagataaacacaccacacaagctcaactctaacagacgggcggactcacctcgaaagcgctacccgtggaacagacaaaaggcgccgcacgccgaccacacgacggaagaacaccgccactcctcaccagcggcacaacagcggcctccgaatacacccctctccgcgcgacctaatacctccatgcgagcaccaagctcccgggcggcaaccacaccggtgggctctcgcaaggcccctcccccagaaacacccaaaccatcaacacggcgacgccacaacactaacaacacgcccccaaacccagcaggctaggggtggacacgacac

SEQ ID NO: 725704 - DNA, 383 bp, Homo sapiens
  misc_feature (383)..(383): n is a, c, g, or t
tgcagtatggtggggttctgaacaaggccaggtttcagaccacggtcttcttatatctttatatggcaggaagagggtgagaaagctctcggggatcccttttataagagcactagtaccattcagtgagggttttactctcatgacctaatcacctccctaaggcccggcctcctaagaccatcacattaagggttaggatttccacatacaaatttgggagagacataaacattcagtccataacaagggcaaaagtgacacgaagtgtgctcttaggtgggatcataaaaaaggcccatacttccaccttctcttcttagaaggttggctttggaaaccaagaagtccatggagaggaccttgacccacatcggtacggn

SEQ ID NO: 725705 - DNA, 162 bp, Homo sapiens
  misc_feature (4)..(4): n is a, c, g, or t
ctanagatccccggtgctcgccgaatgcagttgaagatgtgcccattttcagggtctttgctgtacatgttaggatactccactttgtacttcttgcgggcgcgtggaagcattgatggctaggtgggccaccattataaagctgacagcaccaccaataca

SEQ ID NO: 725706 - DNA, 485 bp, Homo sapiens
aaaattaaaaaactttttctctctgaaaaatcctgttaagctgggcgctgtggttcatgcctgtaatcccagcacttcgggaggctgagttgggaagaaattaatagcttgaggccaggagttcaagatcatcctgggcagcaaagtcatacactcttgagggaagagagagaccttctcatattgttttatattgttttatactcagtacctgttttaagaaaaaaacaaggaagtgaaatcaaagacaggcagcccggcaccaggcctgaaaccagccctgggcctgcctggcctaaacctagtagttaaaaatcaacttacgacttagaacctgatgttatccgtagattccaagcattgtataaaaaaattgtgaaactccctgttgtgttctgtaccagtgcatgaaacccctgtcacatatcccctagattgctcaatcaatcacgaccctttcatgtgaaatctttagtgttgtgagc

SEQ ID NO: 725707 - DNA, 211 bp, Homo sapiens
  misc_feature (4)..(4): n is a, c, g, or t
  misc_feature (29)..(29): n is a, c, g, or t
  misc_feature (103)..(103): n is a, c, g, or t
  misc_feature (109)..(109): n is a, c, g, or t
cttnttaaacatgtgtatccctattaaantcacttgtactctttaagcctcagttttcacagctggtccaggtagagttaaactacacgtggtctcatctctntccctngcctggcttgtgacatacatgcaagtgtttgttgagcgaggtccctttagcaatagatttagcgtgtactgaaagtttgattgtcacacatctaatgtgcat

SEQ ID NO: 725708 - DNA, 183 bp, Homo sapiens
  misc_feature (159)..(159): n is a, c, g, or t
gatgatctagaggatcctggctcagtgatcttcccacctcggctcccaaagtgctgggattacgggtgtgagcactgtgctagccctcctcctatttaaaaaaagatattcttccctttgtcaagcagagtttttaaaaattataaatgtgactcacanaatttgaacatgaaaccaaggtta

SEQ ID NO: 725709 - DNA, 783 bp, Homo sapiens
  misc_feature (783)..(783): n is a, c, g, or t
ctgatatgcacttggttgtatggaactgcactcaagactagtctgggataaactgtcatcagtaccctctggcatgtatagattccgcgatatgggtaacttcacctgtccttactttatactgcactcgagcaccaggctgcatactcatggagttcttccattgtcgtgccacctatacagatgactgatggcccaggagaaattcatgcccaagctctggagagtgtgtggggacttggtgagaggacatggttttattgttatctgtttagttcctgctgcggaagatgagactctcgctctctttgtcatttccccacatgcacagaaacacacatatttctacttttctcatcctctcaacagggtgtcataactttggttaaatcaatagtcagtgtttgtatattattattggataaatattacttacagtggaacccattgtgtgtatgactagatattctttcttgtagaactttatgtttatacaccagttaatacttatctgattaatttgcagttgctctaatgacctgtacacctggtattaatttatgctgaactctccaacacagactgaaatcttgacttactatgttcaaacccattgggggatactacacgcttttttttttatttatcgatacattctccctaggctttccctctacctgctctagtctaaactcggttgctctctaagccaaagggaccggtatcattcttttctgcccttggccttaatctgggaagtcacgttggatgtttctcccgtan

SEQ ID NO: 725710 - DNA, 119 bp, Homo sapiens
tgggcggatcacaaggccaggagttcaagaccagcctgaccaacatagtgaaaccccgtctctgctaaaaaatattttaaaattagccgggtattgtagcattgctgtagtcccagcta

SEQ ID NO: 725711 - DNA, 405 bp, Homo sapiens
  misc_feature (9)..(9): n is a, c, g, or t
  misc_feature (21)..(21): n is a, c, g, or t
  misc_feature (105)..(105): n is a, c, g, or t
  misc_feature (254)..(254): n is a, c, g, or t
  misc_feature (315)..(315): n is a, c, g, or t
  misc_feature (318)..(318): n is a, c, g, or t
  misc_feature (373)..(373): n is a, c, g, or t
ggccgggcngggaaattgttnaactatgcaggttgaaacccaatagccctgaggtccctttcgcaaggtggcagaagccaagggcgcagctccctcaggggcccnactgacatccttcttgcccagcttcggaagctgtggctgccggtgtgtgcccagtctggcttcggctcccaggggtcgtgggcgggtgggaagccctcgctgggccatctcctcggtacaggtcagcccctccacagccttgatccttntgacaacctggtggtgcgtctcgccctccacgttgacgccgttgacctcgaccaggcggtnccnccagcgcagcgcggcggcctcggcgggggaaccgggttccacgcgccggatgaanctgcccgcggcggcccttctcgccgtgcaggt

SEQ ID NO: 725712 - DNA, 1954 bp, Homo sapiens
  misc_feature (798)..(798): n is a, c, g, or t
accgcacccctgtgtgttctcgcgtcttgtgttctcgtccttggtcgaatcgtgttgggtggggcccccaccaccgggtgtgttgttttcgacagctcagcgtcagtatggtggggtggccgccctcctctatatggtggtttctactactctctcttgggtgaatgcacgatgtttcgctccagtctactaggttcgactcatactatctgtgggtgtgtgcatttcgcccactccttctcttttggtgagttctttcttcttccatccccgctcgtgagttattggctatgactaccctcctctcccccgttgttttttttctttccgccggcatctctttgtttagtgagagtgtcgttcttccgaaggtttttttctctcccgcctcctcgacactcacaacagtagtgtggtggtgctgcacacctcatgattccagtctttcgttctatcctgtgatggctccccaccgtgtttttgttagctgggtgtgggctcgctacctcttctcttgtagtaacaccattgcttctctcttatctcagtaccttgttgtctgtggagtggaggctgtcttacttattctttgcatacgcgtctctctctttttttcaccattccagtctgacgcaacaggtgcggggcgaccacactctctgtgtgtggttggtcgaactctaacctctctgcttccacccacacacacagagaggtgttgtgtgtcgctgctcccatgattgttgttcctcgacttcttagtactcctctcctgttctttgttgtctggtcacgtangcagaaactaatgtgtttgtttctgttttggtggtcgacccctacatcaggaggggtgcgccctcttttctttgctttgtgtttaattgctctagcaacacatgttcgttcctgctcttcatcttgaggtggctcgtcggctgcttcgttcttgtcctcaccccctctagtcttgtcgtgcgcaaattggtgcgggcagagcgccgctgctttttcttcttattcgtagatgacactcttcgttttcgtcgtgtgttgttgattataagctcgtctatgagatggtgggcggagcaccacatcagcctgtggttgtcctctcctctcgcggctgctgagtgtttgtgatgccccccacctcctcttttgtctcccttctctggtttgtctccactccactcccttcactctctcggctgttaggactgcacccctccgccgcccgtccgcttagtgtgtggtgtggccgtccacccgcgtgctctctctcccactctctccgcgcgcgagagagatctatttgtcctcccgctcgtctgtctttgtgtgtgtgtatattagatagagagaccgcgtcttgtgtgcgcgtggtgtgtgttgtgttgtgtgcggagagagtgtgtggtgtgtgtgcgttggatagatgtaaggtattccacacacacactctctcacacacctcgaggtggtctctctctctgcttatatatatagagagagagaggctccgctgctcgtgagagagagatgtgtttgtgcgtgtgatgatgagtgagagagagagagagagtgctatgatagagagagagtgttgtctctctctctctgtttacgagatacgagagagagacgactctctctctctctctcttcattatgtgttgttgtctttgtctcctctctggcagctctctctctcgcgcgcctcttggaggcgctcgctgtgctcccccccacacgcggtggtgcctcggggtggtgtaaaccaccgcgcgagagatgggtggggggagtctcctcccctccccccaccacatcatgtcgttttccccgacccacctctctgtttgtggaaaaaaaaaagggggagagaggaggtgagacgtatcgatgtgcttcgggggtttacccacaccataaagtaagagaaaataga

SEQ ID NO: 725713 - DNA, 490 bp, Homo sapiens
  misc_feature (38)..(38): n is a, c, g, or t
aacgtatacataaatattattagcatcagttacttgcnttacaacaggatctgtgggctggatgcatggctcacacctgtaatcccacactttgggaggcggaggtgggtggatcacgaggtcaggagatcaagaccatcctgggctaacattggtgaaacccccattttctacttaaaaaatacaacaaggggcagggcctgaatactaaccctcaggcttcgcgttttcttctctttttgcctcaccgtgctgtcagctccagaacatgcccttgggaatgagcagcctcccatctccacattctggcccctggagtccctgcacttccttctgatcagggaagtgattcaaggtgggacatgatcccctttgaacatcgggacctgaggctgagggcattaaaagagtcaccctctctcatgacctgctgcaagaaaacagccccttatttatcaaatgccttttcctgcccctccgaagaactcag

SEQ ID NO: 725714 - DNA, 411 bp, Homo sapiens
  misc_feature (18)..(18): n is a, c, g, or t
  misc_feature (121)..(121): n is a, c, g, or t
ggttttaacctaataaanccctgaactggggctactgccctttttttgaaaagatgccctgccccaaagaggagggaatctggagaggcagtctggcagcagtggccttgctgaggtgtgngtgctttgcccagttcgaacttccctggtggctttgtttacactgtgagggcaaaaccacctattcaagcctcagcaatggtggatgcccctcctcccactaagcttgagtgtcccaggtcaggctcagactgctgtgctagcagctagaatttcaagccagtggatcttagcttgctgggctttcatgggggtgggaccccgccaagccagacacttggctctctgcttcagcccacttttcaggggagtgaatggttctgtctcactggcattccaggcgccactgag

SEQ ID NO: 725715 - DNA, 351 bp, Homo sapiens
tcgacctgggccgggggacgtggctcacgcctacaataccagcactttgggaggccgaggtgggcagatcacaagttcaaaagatcaagaccatcctggccaacatggtgaaaccagtctctactaaaaatacaaaaaattagctgagcgtggtggtgtgcacctgtagtcccagctactcgggaggccgagctgaggcaggagaatcgcttgaacctgggaggcggaggttgcagtgagccgagatcgcgccactgcaacccagcctgggcgacagagcgagactccgtctccaaaaaatgaaaatgaaaatgaaacgcaacaaaataattaaaaagtgagtttctgggg

SEQ ID NO: 725716 - DNA, 455 bp, Homo sapiens
  misc_feature (261)..(261): n is a, c, g, or t
  misc_feature (306)..(306): n is a, c, g, or t
  misc_feature (344)..(344): n is a, c, g, or t
  misc_feature (372)..(372): n is a, c, g, or t
  misc_feature (384)..(384): n is a, c, g, or t
  misc_feature (402)..(402): n is a, c, g, or t
  misc_feature (426)..(426): n is a, c, g, or t
  misc_feature (445)..(445): n is a, c, g, or t
  misc_feature (454)..(454): n is a, c, g, or t
ggccgcattcggaccggtccctacaaacaagggggtgattagtatgttgggacaaacacgctgttgctaaatggaaacactgacctcacagtgcatcctcctgccaacacacacacacacacacctctcacacatgcacgcttacacacacacacacacacacacacacacacacacatacacacacacacacacacgctctctctctctctctctctctctctctgtcagtgtgttatcggtgtggagcggaggccgcgnaggtgcctcggtccttcagcacccctcggcccgacgcacccacgnccctcaccccccgagagccgaacgcttccccgcaccgnccccggttcccttccctcggccgggagngacttctgcagnttcgttgtttccgaattnggcaccagcaatgtcgggccagtngtaggagggtggaagagcnccggggagnc

SEQ ID NO: 725717 - DNA, 419 bp, Homo sapiens
  misc_feature (174)..(174): n is a, c, g, or t
  misc_feature (249)..(249): n is a, c, g, or t
  misc_feature (271)..(272): n is a, c, g, or t
  misc_feature (305)..(306): n is a, c, g, or t
  misc_feature (316)..(316): n is a, c, g, or t
taaatagttttaattttttaataaaattttctctacgttctatatgcaattgttatatatctatttgaatagctgaaggactaaaatacttttttaagagataacttcaggaaaccgattatagttttacctatcgtgcatgtgctgttaatcatgtggtacatctcgtgaagnctgatgttgatttacagaacccatttcatttatcatatgtagtaatggagattcacatgtagtatgtgatctacntatagatgtcgtacatgattcnnttgggcatgattactgtcgaaacttacagatanntctaaatttnaaaaaatttttataaaggggggaaaaatttggggggttttttaaaaaagggggggttttaaatttacctagtcattcttctatcatgtatattgatgctgaaa

SEQ ID NO: 725718 - DNA, 980 bp, Homo sapiens
  misc_feature (569)..(569): n is a, c, g, or t
atttcggaacgagggagtcggtgtttacactgggttaggttcagctttctgcgtatcgggtagtatttggagtagagagaaagattggctgcaggggaaataaattgcatgttatagaccgatgtcagctcgaaaggagcaaagccattttggaaatctagctcttggccagtatctacgtttaggcacgacagcgccgttaagcaacacaaaatgaagggcgaggaatgattttctacacactgtgcttggaaaatttaaataggtaacctttgggcttgcacctgggcgtcttcttcggagtccagatctgggaagtcctagaataaaaaaaaatcacaagaggtgtgatcagttatacttcaggttactgccatgtggagagcatagcaggaacataaaaggagaaaatggaagtgttaggagagcaacagggtgaacaagacgtaatagagatgggaaaaagaagcacaaagacatagcaagacatttgatcttcagagagaaaatttcggacctaaaccgtgagtaaagcaaattctgaggagcccttgcttgcctgtaaccangtgtgaggtcgtgagactgcaggaacatgttcgattcggtttatgcgtgcttggctaccattgcggggaaagagaaagctttaacatatttgtgagcctaaaccgttgctatttagtaagtggtataaaggttggttatattatctgctagccataaagcatcatttttttccttaaagtgtgtgaatgaaacgcagccaaactgtgggcaaattcagagagaaaattcaattcttaagtatgtgttctggaagagtttcctcttagtatagtgcccagaatttcgattggtcattctttggtcattgttcatacttaagtaaggtggcttttgatgaaacggtatcatctgatggtcttttgaaagttaatgtgagacagctaatgtcaacccctcgtacatttaggaaa

SEQ ID NO: 725719 - DNA, 253 bp, Homo sapiens
cgggagaatacagaataagcttcagctacaagtgactgtggtgatatggatgaaatacagtagccaagagaatggtccaagtgatcccccatccatttatccctgtcatcctaggtctgatcaaatataaaatccgtggtccagaaaaacttcctgcgctgtgtggagacaccccaactaggtcataaaatctagaggttttctacaaggtaccttccctctcactgcaattgcagcaaactgatttatgggc

SEQ ID NO: 725720 - DNA, 323 bp, Homo sapiens
  misc_feature (178)..(178): n is a, c, g, or t
  misc_feature (280)..(280): n is a, c, g, or t
taaatggtcattttcaaacgttttttggacaagctttttactatatttcttagccttggtgtaaaaacaatagcacaggaatctgtccttgtctattttaggctttttcatcgaagttgtctgccccaaatttatttggctgagtggtcactagtatgttgaaagtcatttgggttcngtttttagaatttgactggttgaataagtggttggtatgaagctatgtgtaattggcagacttatctgttgcacttggttagctttaattgttctgtattcnaaaattaagtttgttcaataaatctgcagagattgaacaaata

SEQ ID NO: 725721 - DNA, 321 bp, Homo sapiens
ctcctactttagatctgatgaacacttaacgtctctgcaggtccatttttatacaaattgatagaccgtaataactttctggcttgccacacgcatatctttcttttctgctcatccaataaacatgctgtgccctacctgtgatagattttccaagacaaaaatacctggcgcagcattttagcaaaatatgacttcagatggcattcaacaaatggagtttccccaagcacagttctgtgatatgtgcgtgtgagagtgtgtgtatatatgtgtatatgttttttaagtttttatttgtattgtgcttaaagtttgcca

SEQ ID NO: 725722 - DNA, 116 bp, Homo sapiens
  misc_feature (61)..(61): n is a, c, g, or t
tacacggcaggtattctcattactgcctttgatctgtagtagctcaggagcccgttgctgngcacgaaccatcgccgctggtagcctttgatatattggtccatctgacccatctt

SEQ ID NO: 725723 - DNA, 246 bp, Homo sapiens
tgcggcgggtaggcgtacggccacggctattggttgcatgagtaggctgatggtttcgataataactagtatggggactaggggtgtacggtgtgccttgtggtaagacgtgggctagggcatttttaatcttagagcgaaagcctgtaatcactgcgcccgctcataaggggatggccactggataggtttatagactagttgggtggttggtgtaaatgacgtaacggcggacgattgttcacg

SEQ ID NO: 725724 - DNA, 221 bp, Homo sapiens
ttttttttggtgaggcggggagatgggaggcacagggatggagttttcctctgttgcccaggctgcagcacagtgtcgtgatcttggctcaccgcaacctccgcctaccaggttccagcgattctcctgcctcagcctcgcaagtagctgggattacaggagtcacctggctaagttttttttttggttttttttttttttgtttttgagatggcgtttcg

SEQ ID NO: 725725 - DNA, 110 bp, Homo sapiens
tctagaggatccctggtcattttctacacctaccaccctgataggtttcaattgattgaatgttaccatgagtgaggcgcaatcgcatccaagcctgcatgcttgtagaa

SEQ ID NO: 725726 - DNA, 125 bp, Homo sapiens
gacgagacccttcttccagtagtcgagatcctgcagcgcgacggcctgcgggtccgtcatctcgaggatctcgcgcgagatcgatttgccgaagccggtggcgtactcgagcctggccttgctct

SEQ ID NO: 725727 - DNA, 1792 bp, Homo sapiens
  misc_feature (713)..(713): n is a, c, g, or t
taccatgcaacgaaacctttattaactttttgggaacaggttcagctattactgaaacttgtaatttctaaatcttaatgttgggggcaaatgggctatagtggcaagatgtaatggccactcatctggggcactggcagaatggccatagacctgagaaagaattacacagccacccctccaggcgcaagagaccagtgtggcaggggctcagacctctctttctctgtgagaagtgttgtgagtgctcaagaaaagaaggtgcgggccatctcttctccaggcgtgctgtgcctgtgcaacaaatatagaagcctctcgtgggtgagctcgagggggagatgtgcctcttctttatatctctgtgagaaactcttgtgagaccatctccacatatttctccgaagtgcggtgttcccacagtggggcccctccccaactctcccagaaggagtgaaagtggctcttgtgccccggggttcagcagaggggctctctctcacacagaaacagacattctgtgacacacttctcccccacacctctcctctcagagcaaacacgcggaagaagactacccagaggcgtcgtgccacaggagggagctccgaaaactactcctcattcttctgtagcggacaagtcgtcgtcggcgtcgtcaacgaactcctcgagagacaacaatacggcacaaggaggttgagcccgcaggnccaccacaacttctctgcttccccaaaagcacctatttgtcgtcttggtcgcaccccctgttggatcgcacgcagcaacggcaatcgttgagtagacgccgccccttcttgttcgtccgccgttgaagcgtcctcctcggtggggtgcggtggccgaccagtacacggtcggccgccgtcttctcaccctagatcgtgcattctccgctcggtggaaaggaaccatcctcctggtgggcggccgctgtgttctgtccgaaccgccgattattacttttacttccgaggcaaggtttgagtgagttgtgcttcccccgtgttgggggcggagctctctcctcccaagcgttcttcccccatgatgacgtgctcgtacggtgccgcctcccttgttggcgccgcggtgttctctacgaagggggcgtgcatcctgttcgttcagcgcggcaaacaacggcacatcttctgcgtgggcggctcataattctcgtacgacgcctgtacctttactaaacaacaccgcgctccagtgactgacacccccccgcagtgggcgttcaccaccggagcggcgtctgcacgacccatcctgccgacattatatccatcaaggataggaataagttgacttgtctgaattacagctgctctccgaggggacatccaagcgcgcaagagtctatcctacgaggcgcagctaaatcaatctactctgccgccctaacaacgatagctgtgcgtatatttgcacgtccattgtcccgaccgagcacgtcatcttttcgtagcggcccactcaccgtggcctttgatgaccttcgcgcgcgacaggcataaacttcgcccctcctttaccctctaatcatttgcccgtgggagcacacctccttgctgacggccccgtgtcaccaacatcagcttgttatccatcgcgcgcttgttggctgtgctacatcgctcggtgtgggtcgtccatcccccaattcctccttccgaactgactgctcctccatcactgtatgacatttgtgcccccgcgcaggctgtaacgcgggggacggtttcttaccctcatgcca

SEQ ID NO: 725728 - DNA, 914 bp, Homo sapiens
  misc_feature (626)..(626): n is a, c, g, or t
  misc_feature (650)..(650): n is a, c, g, or t
  misc_feature (656)..(657): n is a, c, g, or t
  misc_feature (693)..(693): n is a, c, g, or t
  misc_feature (710)..(710): n is a, c, g, or t
  misc_feature (715)..(715): n is a, c, g, or t
  misc_feature (721)..(722): n is a, c, g, or t
  misc_feature (725)..(725): n is a, c, g, or t
gtcctggtgcggagcgtcacgtctcgtgcgtgttcattcagccacgatgcctgaggaaacccagacccaagaccaaccaatggaggaggaggaggtcgagacctttgcctttcaggcagaaattgcccagttaatgtccttgatcatcaataccttctactcgaacaaagagatctttctgagggagctcatctccaattcatcggacgctctggataaaatccgttacgagagcctgacggaccccagtaaactggactcggggaaggagctgcacatcaatctcattcccagcaaacaggaccgaaccctgaccattgtggataccgggattggaatgaccaaggccgacttgatcaataaccttggcaccattgccaagtcgggcaccaaagccttcatggaggctttgcaggctggtgcagatatctctatgattggccagtttggtgttggtttttactctgcctatttggttgctgagaaagtgactgtcatcacgaagcataacgacgatgagcagtatgcctgggagtcctcagctgggggatccttcacagtgaggactgacacaggtgaaccaatgggtcgtggaacaaaggttatcttgcatctgaaagaagacnaaacagagtatttggaggaaaggngataanngagatcgtgaagaagcattctcagttcattggtatnccattactctcttgtgnagaanggacgnnatnacgaagtcagtgatggaagggagggtggagaacagggagaagaaagagggagagaaaaaacagagaataaggggctggtggtatactgtaatagaaaagttgggtcttaggaaaaagggggacaaggttgtggaggaaaaaaaaatagggagtttgttaaaaactcaaaaacgcggtgtggaatcttgt

SEQ ID NO: 725729 - DNA, 839 bp, Homo sapiens
  misc_feature (127)..(127): n is a, c, g, or t
  misc_feature (163)..(163): n is a, c, g, or t
  misc_feature (180)..(180): n is a, c, g, or t
  misc_feature (219)..(219): n is a, c, g, or t
  misc_feature (241)..(241): n is a, c, g, or t
  misc_feature (247)..(247): n is a, c, g, or t
  misc_feature (265)..(267): n is a, c, g, or t
  misc_feature (271)..(272): n is a, c, g, or t
  misc_feature (295)..(296): n is a, c, g, or t
  misc_feature (298)..(298): n is a, c, g, or t
  misc_feature (303)..(303): n is a, c, g, or t
  misc_feature (310)..(310): n is a, c, g, or t
  misc_feature (322)..(322): n is a, c, g, or t
  misc_feature (340)..(340): n is a, c, g, or t
  misc_feature (343)..(343): n is a, c, g, or t
  misc_feature (364)..(364): n is a, c, g, or t
  misc_feature (384)..(384): n is a, c, g, or t
  misc_feature (396)..(396): n is a, c, g, or t
  misc_feature (416)..(416): n is a, c, g, or t
  misc_feature (465)..(465): n is a, c, g, or t
  misc_feature (472)..(472): n is a, c, g, or t
  misc_feature (474)..(474): n is a, c, g, or t
  misc_feature (544)..(544): n is a, c, g, or t
  misc_feature (555)..(555): n is a, c, g, or t
  misc_feature (562)..(562): n is a, c, g, or t
  misc_feature (572)..(572): n is a, c, g, or t
  misc_feature (575)..(575): n is a, c, g, or t
  misc_feature (578)..(578): n is a, c, g, or t
  misc_feature (581)..(581): n is a, c, g, or t
  misc_feature (598)..(598): n is a, c, g, or t
  misc_feature (600)..(600): n is a, c, g, or t
  misc_feature (607)..(607): n is a, c, g, or t
  misc_feature (616)..(616): n is a, c, g, or t
  misc_feature (619)..(620): n is a, c, g, or t
  misc_feature (623)..(623): n is a, c, g, or t
  misc_feature (628)..(628): n is a, c, g, or t
  misc_feature (648)..(649): n is a, c, g, or t
  misc_feature (652)..(652): n is a, c, g, or t
  misc_feature (655)..(656): n is a, c, g, or t
  misc_feature (671)..(671): n is a, c, g, or t
  misc_feature (685)..(685): n is a, c, g, or t
  misc_feature (688)..(688): n is a, c, g, or t
  misc_feature (693)..(693): n is a, c, g, or t
gccgacggctcgggagcgcgcgcggtcgcgtgcgggagggggcgggtggggaaggatcgcaggcgagattacgaggcgaggtcggcgcccgcccccgcctggcccccagtgcccacccggtcggccnggcacagccatgatcaaggcgatcctaatcttcaanaaccacggaagccgggntctccaagttctaccagccctacagtgaagatacacaanagcaaatcatcagggagacttnccatgngtatctaagagagatgannntgtnngtaatttcctagaaggaggatannantgggnggatctngaaacaaagtgntttatagacttatgcaangtnatattggtctctgtgtggatnctcagaaagtgaactgtggnatttagatctanttcaagtatttgtggaaacnttagacaaatgttggaaaatgtctgtgagctggattgattttccatgtnagacaangnttcacaatattcttgcagaaatggtgatgggggaatggtcatgggacaaatatgatgagattgttacacnaaattggtgcnaaaatangtggaaaatntgnggntgnttagcaggagctcagcngngtgtatnaggtaaganttnnatnttcgnagatccagaattttacctgnngcntcnnttaagggcaactgcnttttaataaatgtnaanggccncccggtaatagggggagagattaagtacacaggcgtgtcaaaaagaggggggtaaattggctggtaagcagggttaagggggaaagaaaatcggggttggggaaaaaggcttggattaaacgggcgcaggggttgtagaagggata

SEQ ID NO: 725730 - DNA, 117 bp, Homo sapiens
tctagaggagcttgttttaggtacagaggcaaaatttagaacgttactgaggttggtccaggcactcattcttccaaaggcctaggatggttattttggtaggttagttggttggtt

SEQ ID NO: 725731 - DNA, 637 bp, Homo sapiens
tgtagtccaatattttttcctttataaatccatactgtactcccatggctctagctacttatactttaaaattgggctgggcagccttgatgtgtttctaggtactagcagtaagttttctgaccttgcgcacagcgccaggcaaagtacagttatagaatccaaatacagatggccagacaactcgatgtgcatctcaacccgtgttcttccccatagaatggcccagtgcaggtgtgggggctgctccctctgcctcaccccgactccaccccacgtcagggattactccaggggccacttatggcctcttgacccattcccttccccacctttggagctctaggtgagagtggggagaagaaatgcgaccagtgggttggggaagatggtacgggatccattgcgagagagtgtgtctggcaccttgagattgcagggatcaggaaacatgtgggagagcccataaagctactggtgaggacaacaaatggatgtatagtgactatgacaatctagagagacactggacaccaaggaccccaggacgcaatgcccgaacagcagagcccactgtcttgacctggaagaaaaggccaccccttaggcttctgaaatgactaatggaatagaaaga

SEQ ID NO: 725732 - DNA, 478 bp, Homo sapiens
gttcgacggaagcagactgttgctaggtgacaccaaatccagtgtctgtttgagctctggatgatcagctacaagctgtttgtaggagctcgggagggcggttgttgggtacctaagagatggcgacattttttggcggtggcgaatgtttacctctgcttctgtcccctaacagcaagcagtgtgcgcccgagccgcgtttctttcctcactggcaggagacctgacaccacccgcctgtacgacttcaactcctactggagggtgcacgctggaaacttctccaccatcccccagtacttcaaggagaatggctatgtgaccatgtcggtgggaaaagtctttcaccctggtactgctccatgtccagagtctgggttctcttggtttgtggtgtctgaatccagcattcccatcctggggatggggctgtctttgcagagccctcttctggctgggcgagtccctcgctagtcag

SEQ ID NO: 725733 - DNA, 211 bp, Homo sapiens
tcgcgttttcttcgtagggaaagataagagagttcggtgaccataagaggactccattttcaccgctgaaatagaatgatcgcccttatagtctggctggcaaatcgttagaaaaagaagtttatttacatgtatgtggctatttccactaccaagatctagctgagcaagttcacacttcttaaacttcccagttcagcaacagctagtg

SEQ ID NO: 725734 - DNA, 178 bp, Homo sapiens
atgactggtcatttcttaacttgcaaactggtcttacctgctggcacatactgtgatgtcatttctggagataaaagttaatggcaattgcacaggcattaaaatttacgtttctgatgacggcaaaggcctcaatgtttctatctagtaagctctgcttgagatccattgtagttgc

SEQ ID NO: 725735 - DNA, 163 bp, Homo sapiens
cgggtagactgcatccttggcacactatagccaaatttcttgccatatgggcttgagtttcaacatgtcggagagcacaggaacctgaaagcataacttttctgttgaccctgatggtgggcccaagaagattctagagagtcaaacagcacaacaggttgag

SEQ ID NO: 725736 - DNA, 1689 bp, Homo sapiens
  misc_feature (872)..(872): n is a, c, g, or t
  misc_feature (968)..(968): n is a, c, g, or t
  misc_feature (1108)..(1108): n is a, c, g, or t
gttttttcgtgcgtcgtgctggtgatgttagttatcgatctctcccgttgtcgtcttctcgttttcgttctctctcgttttgttctcttctgcgtttggctgtggttcttgtctttgcttccgcctctttgtttttctctcttttttccttagtttttttgttgtcttgctgctgctctgtcggtctgtcgtgtattgtgtctgtgtgtgcgtctgtcggtggttttgtcgtggtttgttttgtttcttcgtttcgttgatgttttgtgtcttcctgttttgtctcttttgttgtcttcggtctttgtgtttttgcttgtctttgtctctcctgcttgtgtctgcttcgctcttttctctctgttggcgtcgctttgttctgttgtttctgtttccttctttttttttctgttcgttcttgtgttcttttttgttctttcgttctattctttgctgtcctcttctttttcttcacttcgtcgcttgtctttgtgtttgttctgccgtctatgttgttgtgtctctgcctgtctgcgttctcttctctattcctctcttttgtctttcttgcctttgtttcggtcgtttcgctttcttcgttgtgttctctctgttgttttcctgtctttcgtctgctgctgcgtcttccttcgttttgtctttctgtcttcttcttctttgtctctccgtggtctgttcctgtcttttgttttgttatcatttcttgtttgtgtttgtttgtctgctgttgttgtgtgtgtgtgcccccccccgcgccgtcgtgtgggggggtggttctaatattttaaaccccagcgagcgctcctcggtttttgtatgatggtggcacccctcgtgcccgatatttttcnccctgtggggggagacgccccccatctccccccccccgcgttttttgtgggaacccccccccctataggggatagaaatcacctcgcggggggctncggcgatattccacagaactctctcccgcgggagtcttttttagacctcttttaggtgtcccccccgcggggtgacctgcgtgatatacaccgcgatatggtgtgcacacacccgcggtatcacacgcgcctttatgtgnccccctttatgggcgccctatatttttataggggggaccacccctctttatgggacacccccgtttggtgaccccacaaaaaaacccccgcgcgttgggttataccgcgcttccgcgggaattttcccccgcgggagtatattttttctgagacaccaccgcggggtctcccacgctgagagtttctgagatagagatataagggggtaggagaaaactgtccctctccacatcacctcacacatatatttatattgagcgcacatttactcacacgtggagacaatagggcgcccacatatggagaacacataccccgagaaaccacattgttctcccgctctttgagggaggcttatcacatttttaaatggctccacataaataattgagatgagatgggagaggcacggtgagagttttgagatgaataaaggggtgagagaaaactggaaatccccacacacacccggttttgtgttgcttgttttttttatatggcccccgatttaattggggaaaattggcccctttggaaaattttcccccatattacccttccaatataaagcgccatggga

SEQ ID NO: 725737 - DNA, 303 bp, Homo sapiens
agaaagatttttttttaaaaaaaaaagctagaataacccaaaaaacccccttttggattatgcttccctcaaaggaggcaggcaggggggaccccccaggggctttaaaaccctgggcatgttttctttctcccattgggcaatggggacatggacgttccctggaacgggctttttctttcgtctttttttttttttttttttggcccctggcaagctgtgcgtgacattctttatggctttttgtatgtcaaaatcttcaaactaaactttctaaaaaattaaactttaataatgggccca

SEQ ID NO: 725738 - DNA, 246 bp, Homo sapiens
gggacgaggtgatgggtgcaatagggtgattaggaaagaaaaataatagatagttacgaagtcttgagaccaagaaatggattcatttctagatatcttctctttaataatcagtagtatggccgaaagaaaaaaaataagagggctgacaaatccgttctgttaatgggtgggtttgctttccatggtatagagacgggattatcacagtggtccatagcacctgactgatagtgagttagtgta

SEQ ID NO: 725739 - DNA, 383 bp, Homo sapiens
  misc_feature (17)..(17): n is a, c, g, or t
  misc_feature (166)..(166): n is a, c, g, or t
tggaaatggtgttaagncagggttttggttgtttgttgccatccctcaccctttgccatttccctttttagagaatgtaaatgatttttatgttaggccaaaataaacaacttatagggtacatatgttgttataaaaggtaaaagtgatgcatgccaaaccaaantaaaccaatttggattatttggtatttgggtaattttcacaaaaatgattgaaaaaagaatttgcagtttactgagggcatttcagttcctcctaccccctcaacaggactttgtccagactttcctccttttacctttgtgccttgactgtggttttttgtggcaaaaaactttggttggttaaaataatatggaacaaaggatcccctgaagtga

SEQ ID NO: 725740 - DNA, 312 bp, Homo sapiens
gtgtctgacctgtaatttttatgggcgtacatatgaatagcaagtttagttgaaatagttgatgctgtaatagtttatgctgtaatagtttatgctgtaatagtttatgctgtaatagtttatgctgtaatagtttatgctgtaatagtttatgctgtaatagtttatgctgtaatagtttatgctgtaatagtttatgctgtaatagtttatgctgtaatcagtttatgctgtaatagtttatgctgtaatagtttatgctgtaatagtttatgctgtaatagtttatgctggggttcctctagaggcgac

SEQ ID NO: 725741 - DNA, 243 bp, Homo sapiens
cgtgcacaggttaatcgcttcacttgataactaccgtgcgccacagttgtctgcttggccgtgttctacgccatcgctggggggcttatcctggagagggcctactactacgcctttgccgcacatcacacgtgcatcacggacaccacccgcgtgcgcatcatcctgtcgcgggtcacatcatccatcatctctttcatgttctcctacctctcgctcatcatttgccgtaatcttatcacc

SEQ ID NO: 725742 - DNA, 667 bp, Homo sapiens
ttgttttagaaaatagctttataggctaacattatgttaatgtcatttaatgtttgtcatttaaaatattttaaatgttttctgttagtttctttttgtatattctatgggtattttattgatacatgatagtgtacatttttatggggtgcatgtgatatttgatatgtgcatacaagtgtagcaatcaaatcagggtaatgggatattcatcacctcaaacatttatcatttattgtgtggaaacattcaaaccttttcttctagctatttatccattgtggatacttatatcaattctatatcttagctgtggtggaaataggaggctggccaataacatgtaggaggtgccagatacccacaaaaaaaaaaaaaaaaacaaaacaaaaaacaccacgctttgttgcggcgccccccgcggcgccccgagaaaagagttcctaagaccccacctgcgtgtgggcgcgcgcgcgcggcgcccaggttaggttaggaacccgggcaaaacccgggtcccaaaggagcccccggggccagccccacgctgcggtggctcctccccccaaaaaaaaaacccgccgcgggcccccgcgcgctctggaacacccccagaggcgcccggggcccccgggcccccccacggggccagaagctgaataacacg

SEQ ID NO: 725743 - DNA, 145 bp, Homo sapiens
actctcatacccgcgctacacaattatgaatatcagaaatcaatacctcttacatcatcactgtttcacagctatgcctgactaaatgacacttgaacaaataactacatatagcaacataacttacgctgaactttatacctcc

SEQ ID NO: 725744 - DNA, 227 bp, Homo sapiens
ggggccccgggggggccggcccccaaaacgggggggggtttttttaaatttgcccaggtcccgggggccccccccccccgggggccccccccccccccttttttttccccccccctggaagcccccaagggaatgggggccccgggggccggggggctttttttcccgggttttttttttttttttgggtaaaaaaccgggggggggccggggcctttgttttttta

SEQ ID NO: 725745 - DNA, 482 bp, Homo sapiens
  misc_feature (315)..(315): n is a, c, g, or t
  misc_feature (370)..(370): n is a, c, g, or t
  misc_feature (399)..(399): n is a, c, g, or t
  misc_feature (455)..(455): n is a, c, g, or t
agagggtttctatatcgaaggcaagaatctttagctcttcttccccctccattggtattaggcctttgtcgatgaggtatctctttgcaaatggaatatcgtattcgaagatgtccacaactgctggatgttctctaactttttctctaatagtgggaacatcttggggatgttccaaataaagtttccacacggtaataggcttgccgagaaactttttctcaaccttctctacatcaacaattctcacaatctttccatgcctttcccccgttattttcttaacttcttcaatctttgaatcatccctgagangagcgtaaatgtatggtctaaaagttctatcatgctctatcttaaatctcccgtnctcttttttgatagcctaatacaggtttnccttcttcctctaggagagacaaatgacagattctgacatttatatttgtgtattncctggatttatagtatgtgactttcct

SEQ ID NO: 725746 - DNA, 434 bp, Homo sapiens
  misc_feature (24)..(24): n is a, c, g, or t
  misc_feature (29)..(29): n is a, c, g, or t
  misc_feature (81)..(81): n is a, c, g, or t
  misc_feature (171)..(171): n is a, c, g, or t
  misc_feature (237)..(237): n is a, c, g, or t
  misc_feature (314)..(314): n is a, c, g, or t
  misc_feature (317)..(318): n is a, c, g, or t
  misc_feature (337)..(337): n is a, c, g, or t
  misc_feature (345)..(345): n is a, c, g, or t
  misc_feature (377)..(377): n is a, c, g, or t
  misc_feature (401)..(401): n is a, c, g, or t
  misc_feature (415)..(415): n is a, c, g, or t
aactcctaaaaccccccttccggnaaaanatcccccctgctggacccgaggaagcgctgtgcccctgagcctaagaaaggnaggtggccggatggaagtgggaaagtgaagaagacactgatttttaaaatatcaaaaatttccccttcctgaagtcgttcgggatgtgtncccttaaaaagaagatggaattctctgtagagcgtctcaatcccacttttaacccatggatgagancagactcccatttaccctgaaatagcagcttctcttgagaggagagtgacatggaagcaactccgtctgctgccgcngannccctcacactgagttcagntgtccgcnctccctccctcccatctgggggtagtgccttntgctgggtgttggagcagagtganggagcggaaaatanagacctgcacttttcgaaa

SEQ ID NO: 725747 - DNA, 1132 bp, Homo sapiens
  misc_feature (217)..(217): n is a, c, g, or t
  misc_feature (258)..(258): n is a, c, g, or t
ctgattattgtgtatcacggtacagcatcgtagggttcccctaaatcttgccctgttctacgtgtttatagtttgttatccccttactgagcggcctctactaggtggctgtgattaactgtcccaagcacggatagggaacgtcgaatgggttgagcctctggcagatcactttgtaacccaactcctgcctagatccctgatttcggcgtgcctngatcgtgggcacgcagaaaccttatgcataacgtgacctgntctctggcggcatgtcagtggtagacataagactctacctttaaacaatccaagtcagttccgtcattcactatcaacagatgccgaggctgtgatcacacttaggacgcgcagctcaatccgtaatcagtccgttcagtcgcatttctacgtctgtcgtccgaactcggacaccagttaggtgagtgtcgaagctcagagattctggggcagtaagatcaaatgtccattgtttactgattgcacttctagtctctcttggtctggttacctgtttatccaggaatatttgtatggccttttcaggctgcgtgacgtttaggcagacaaaccatgtagagtacgccccatatgccctgcaacggttcctgtcggctctcaatgtgtcgcgtgcttgtgaccaagtccgtacatggcgtgatctccaggctcctttcccttgtttgggctgccacaagaccatgctacccccagaagggtcaatgttggcgcagctggtagtagggctctgatgctgcttctacagagctttcagtgcttgagcaggagtccgacgcccattggatacacgctccattaagcgagtagggaccatacatgtttccggtctccctattcagaacccagttgcacagtgttgacacaagggggcctcagggttcccagtgtaccatgtcactggtgatatcctacgaagctcagtttgtcacgtaacgttcggggtcattccctgggtgttgacattgccacgcgcgaaatggctcactttccctgagcgaatgctgcctcctgattttagctgcatgacctccaggcttctggctttgacacttaattaagcccttcttcctggtgaacccggatactctccatg

SEQ ID NO: 725748 - DNA, 1527 bp, Homo sapiens
  misc_feature (3)..(3): n is a, c, g, or t
  misc_feature (1220)..(1220): n is a, c, g, or t
ctngtatgttacgggcctggcttctacgtggtcctcactatagagtcgcttcgtctctaagtagtgcgtctccgcgtgcgtgctgtgtgaagtaagattgttggctgataatccttggtgccccctgctgttgtgaggtggtgctgagtgtttgtctattggtgggcgcccggtgtgggttgttataatatatgagtgggttggggggaaagaatcgcccactaggtgtgcaaaaatatgttggtgggtcgcaccacagccacactttgtgtaggtgtggatttgagttttgataagaaaggggaatcttcttttgggggggccaactacaaagggtgggggaacgaaagccaggctgctctgtggctctctatgcgcagtggcgcctaaaaggcggtggtgtgctccaacacaacgtctgcccctcccctcagggggatatgagggggggggtcgttgtgcctctccccctccgcggagttttctccccgtgttgctttaggtgtcgcggccgccggcttgtgtgagggcgtcctcgtgtgtttctccctccccgcagtacgcgcgttgttgtatgacttctcccccggaggtcccaccccccctgtgtgagagtttgtgggggcgccccgtcgcgccccctttcgcgctataggcccccccccctcgtgagaccacatcccctctctctcacaggctatatctccctcacagcgggccacccactcgggtcgtcgcgctctctcgagagggagagagagagggagatagaagatagagcgctcctctctctcgcgagggctctttctccactcggccctcttctcggactctgtgtttctttcgctccacacacacgctgatcacccacgcgagactgtctctctgagtgacacctgcgggtgtgtccacacactctcacacagagcacacacccacctcaattgcgcacacagcgcgcccggagagccttctctctgagaggcgactctcggcgccacacgttgtcccacagggcgccttctcactctctctgagagggtgaacagagaatgtgttacgacactctcacacgctgctgcgcacacgcctctcacacagcacacagtgtggactctcacacaggcgagacacctctgatatgccccaacagctctcctctgggcccgcgcgcctctcacacacttcttgagaaactctggtgttgtcccagagagagnccctctgagagcccacaggccacacaggagtttgtgcccacaaatatgtttctctggggggcccaaccacaaatgtcacaggagagccgagaccctggggcgtgcacacacatcccctgcccacatctcccaagaaaagacctgttccctgtcacaggaatttgtttcccctcttgcctgttggccggtgacctgcttttggaaccacagaacacaggctcccgactccccgagtattttttcccggaccccttgagtgggccaacccaaccccggctccccagtatccataaaccccttttctgta

SEQ ID NO: 725749 - DNA, 632 bp, Homo sapiens
  misc_feature (408)..(408): n is a, c, g, or t
cacaggcactattcacagtgtggaagccttaggggaacatggagaaagaaggagaccacataccccaaaggacctaagaacactttaaaaagcaacatgtaaaatgatggaaattaatatagtacagaatatattccctgtgagatcttctttgtaatgttcatggtactgcctagggcggtgctgagcacacagcaagttaataaactgactgaattcatttacaaaaaaaaacaaaaatgaaaaataaaagaaaaaaaaacaaaaaaacaaaaaaatcaataaaaacaacgaaagaacaatcaaacaaaacgaaaaaggcggcggcgccgcccgcacagaacatacctcccgccgagcggaagccaccaaccagtcaaggcagcccaccacacctttgttttgganaagcagagctgggccgcccccatatgatggaggtccgattcctattctatcaaacagacaacgcggaaccgccgcggccgcgctctttatcacacccagctccgctgtgacaggggcacacaccgagccccatctcggccgtgcgcctttcgttgtgggagcagagacccagcactccatctgtagccggggcggcacacacttgatctgcggaccgaacaacc

SEQ ID NO: 725750 - DNA, 178 bp, Homo sapiens
agactgtggtcaatgactcccctcaagagccctgcagcaggagggacaggtgcaggagccatgccacagtcccgacagaagagcctagtcctgaaccgggcagggtcacccggggtcacaggaagagaccccaggagcagcacccaggagtcagaaacaggactggctggatgggatg

SEQ ID NO: 725751 - DNA, 440 bp, Homo sapiens
ctcaacgcttatacttcattagaatataatgatgactaatgcatatgagcaccatctttttgtgccaagatgcttttttgggctgccagctcaattgatcttcacaatgagttctatgaagtagaagagtagtattcgcatatcttgcacgttgggaaacaggttcacgctcaaggtgaagtcgtagttgggcacatagctagtgagtggcacggtcaagatagatagcaatcaggtctatctgtccctgcaggttgatcacctaaacaggcgtgacacctgtgcgtcaccgggcaggtacagagataattgaggtgttctcttcctactctctttaaaccgtagggattggctacactgggtgtggggtcgaggggtaatttaattgaccgtggtggatacgtgggctctgtagtagaaggatcaagcgttgaggggta

SEQ ID NO: 725752 - DNA, 436 bp, Homo sapiens
  misc_feature (2)..(2): n is a, c, g, or t
  misc_feature (368)..(368): n is a, c, g, or t
tnacatatccccaagaacatctaaaagcgttcccagtaacatttgcttagtccattcactctcaaaaacacgcccgtcttcctacctggaaacttctgttgagggatgcgatgaaggggagtgaggcgtttcagtgctgcctcagcccaatcctgattctccgtgtggcagcgcttcttgtgttctaggtcgccccacagaaccagttatgtgcttacgcctgtgtctctgtctgtgctgttcccttcctggggccagcaccagggctgctgggcaggcctttgtttgcagtgtgggaaacacccactctggggctgggcactatctgttcgagaatttaaaagtgatcataaatctgtatggaaagntgatgtgcttttcgttattaccatgcaccagcatttccagtcagtgttcgggccataacatcatctgt

SEQ ID NO: 725753 - DNA, 353 bp, Homo sapiens
  misc_feature (8)..(8): n is a, c, g, or t
  misc_feature (28)..(28): n is a, c, g, or t
  misc_feature (307)..(307): n is a, c, g, or t
  misc_feature (349)..(350): n is a, c, g, or t
tggggttncccccccagaaagaagggantccttaaagaaagtcctaggcagggggcaagtggcctcatgccctgtaatcccactttgggaggcctaaagtgggaggatcaccttgaacccccaggagtttaagactagcccgggcaacacagcaagatgccccatctctacaaaaaaatttaaaaattagctgggcatggtgtcatgcacccgtagtcccagctacttgggaggcttagctgggaggagttggagctcgagagttcaaggctgagtccaggagctggaggctgtagtgagctatganttgtgccgctgcactctagtctgggtgacaaagcaagacttnnttt

SEQ ID NO: 725754 - DNA, 175 bp, Homo sapiens
cacgaggaggcgatccgcactcatggagtgtggagcagcgtggacttcctgagtacctccgtgggtgacgatgtgtgagtacaacgaccctatcggaagaggacctgacaggagatcccagccggagcagagtggatttcctgtgccaacctgcaagcggcaatgtgcacgccaa

SEQ ID NO: 725755 - DNA, 286 bp, Homo sapiens
caggtttcggtctagaggatccagacgtccaggtatgcaataaaacttccactttgcagctgagacctctgtcatagctcacccatcccagtccttgctctattccttacccagagaaacaaaaccaggaatgagtagatggaaggggatgcagagttgcgcggctattccacgggcccccatccaactccagctcccatgcagcatcgtataggggtctcattatcccatgaccagcctcctcagccctgaagaagagaccctaccaaggcaagaagggacgtcg

SEQ ID NO: 725756 - DNA, 707 bp, Homo sapiens
ggacatgttcatggtcgtggacctgctactggggctggggacctgctgctacagctgacagacagaactgtgcagattctccgcatggtacacggtgaggctgtcatccatgctgatgcgagaagagggtggagccgggtcttcgattggcccaagcaaaggccggtctgcactgacgatctcaccttatgagctggagtgagatgatcctggagtccaggcccatgggacgaagaacgagagagagcgtctggccgaaaaacaagtcccgggcacaacgagcagggtacagctccggagtcgcgaggaatgactatcttcagagactgccgtcgagtgcctagtccgagcgaggacttcgtgattttgaacagagaaaagctgaagaggagccaggaggctcccgagggagcctctccccgcccctgagtccagggatgctgcggagcctgtggaggacgaggcggaacgctccgccctgccatgtgcggcccatttgcccctcggcgggagcggctaggccgggacgcccgtggtcctcaccccttgagctgcttttggagactcggctgccagagggagggccatgggccgaggcctgggattcacgttcccacccagactggctggctggtgcccacagtgccccggacacatttcacacctcaggctcgtggtggtgcaggggacaagaggtgtgggtgcaa

SEQ ID NO: 725757 - DNA, 539 bp, Homo sapiens
tagtgtgacactatgttctcggagaactatctctatcaccgtttactggatagatagcccataataggcacatagctctgggaggcactgaggatgcgcaactgcccaggggacgacatgggagaggcacacaggctaggggcagtgccagcatgggcagagcgtggacgtgactggcctcactgccctgatgctgccgtctctcctgcacgcagttggacaagctcaggatgatcattgagagcgtggtgacctcctcctacacgctcctgtccatgagcagtgtcagcacctgccaagttcctgtatcgtgagttatttacatgctaggtggatggagcatgtccgttccccatggcatgtgagcaggagcgtgtgcaagcccacacctcacagcccaagagcctgtggcggggcctgtttgtcattagggtcctctgtgtgtttatggcccggtatactagcagcagcacttaacgatttagctaaagagagatgtctcatgctagatggtgggctgctgagaaagctcagaggct

SEQ ID NO: 725758 - DNA, 716 bp, Homo sapiens
  misc_feature (10)..(10): n is a, c, g, or t
  misc_feature (55)..(55): n is a, c, g, or t
  misc_feature (63)..(63): n is a, c, g, or t
  misc_feature (74)..(74): n is a, c, g, or t
  misc_feature (98)..(98): n is a, c, g, or t
  misc_feature (124)..(124): n is a, c, g, or t
  misc_feature (165)..(165): n is a, c, g, or t
  misc_feature (172)..(172): n is a, c, g, or t
  misc_feature (186)..(186): n is a, c, g, or t
  misc_feature (191)..(191): n is a, c, g, or t
  misc_feature (197)..(197): n is a, c, g, or t
  misc_feature (210)..(210): n is a, c, g, or t
  misc_feature (218)..(218): n is a, c, g, or t
  misc_feature (229)..(229): n is a, c, g, or t
  misc_feature (242)..(242): n is a, c, g, or t
  misc_feature (244)..(244): n is a, c, g, or t
  misc_feature (269)..(269): n is a, c, g, or t
  misc_feature (274)..(274): n is a, c, g, or t
  misc_feature (281)..(281): n is a, c, g, or t
  misc_feature (300)..(300): n is a, c, g, or t
  misc_feature (302)..(302): n is a, c, g, or t
  misc_feature (315)..(315): n is a, c, g, or t
  misc_feature (326)..(326): n is a, c, g, or t
  misc_feature (333)..(333): n is a, c, g, or t
  misc_feature (343)..(343): n is a, c, g, or t
  misc_feature (382)..(382): n is a, c, g, or t
  misc_feature (389)..(389): n is a, c, g, or t
  misc_feature (414)..(414): n is a, c, g, or t
  misc_feature (420)..(420): n is a, c, g, or t
  misc_feature (422)..(422): n is a, c, g, or t
  misc_feature (434)..(434): n is a, c, g, or t
  misc_feature (438)..(438): n is a, c, g, or t
  misc_feature (441)..(441): n is a, c, g, or t
  misc_feature (445)..(445): n is a, c, g, or t
  misc_feature (448)..(448): n is a, c, g, or t
  misc_feature (451)..(451): n is a, c, g, or t
  misc_feature (477)..(477): n is a, c, g, or t
  misc_feature (492)..(492): n is a, c, g, or t
  misc_feature (495)..(495): n is a, c, g, or t
  misc_feature (511)..(511): n is a, c, g, or t
  misc_feature (529)..(529): n is a, c, g, or t
  misc_feature (569)..(569): n is a, c, g, or t
  misc_feature (601)..(601): n is a, c, g, or t
  misc_feature (612)..(612): n is a, c, g, or t
  misc_feature (649)..(649): n is a, c, g, or t
  misc_feature (654)..(654): n is a, c, g, or t
  misc_feature (694)..(694): n is a, c, g, or t
cttttcctcntcttctctgttgttgttcatcctcagggctgggtggggtgcagcncttgagtnccaagtgtgtngaggctcctggtcctgggtgtgcnggtggatgagtgggcacatgcccccncctggggtggtggagccgcttcagtggaggtggggcatgangcggtanggcacacgccggcngtgcncctgcnaggccaggccgtncttctgcnggcactccgcncatcccgggcctnanggtgcaccagcggcgcggtgaagtngaggnggtagangtggggcagcgggggtganancccgcggcaaggnccaagccaganccatgangaggtctccnagaaagtggggatggcggaccataccccaccacccaganaccagcngtttccgccctgtggctgtggaganggtctnangcccagccactntggngtnaganggnttntttcggaaagtgtttttctgggaatncgccccacggaagangtngtaaccaatagcattnatgaggcagaagacagangccatgggcaaccccaggggctgcgggtggtgcagcaggnactgggcctgcaggctgtaggtgaagggcacncaggccatgtncgcaaacgccagcgtgaagccaaaaccgttatgtgtnatatncatggtggtgaggacggcctcctcgtgccacacggcatcnaccacgtagagcgactggtagc

SEQ ID NO: 725759 - DNA, 251 bp, Homo sapiens
aggttacagcactgccgctgagctccaccttctcagatgagcagcagcgttagattctcataggagaacgcacctgttgtgaaccgtgcatgtgagggatcgaggttgcgctgtccttatgagaatctaatacctattgatctgttactttctcccatcacgctcaggtgggaccatccagttgcaggaaaacaagcttaacacgcccactgattctacattatgggtctccctctgttgtccaaggctgg

SEQ ID NO: 725760 - DNA, 156 bp, Homo sapiens
ggcagagtaggctgtggctcgtggacttcagcacaaccatcaacattgctgttcaaagaagattacagtttacgtccattccaagttgtaaatagctagtcttttttttttttttttttttttttttttaaaaaatacaatggggttttttttatt

SEQ ID NO: 725761 - DNA, 414 bp, Homo sapiens
cctggcttgctcaggtctccctattccttaagaaacaagaatactgaaattaggctaattagtaatcccacaatggtctcttaagtgttcaggtgaaaggaagaatcacacatccctccctctaaatcaaaagctagaaattattaagcttggtgaggaaatgtacgtcaaaacctgaaataggcaaaaaactaggccacttgtgccaaatagttagccaggttgtgaatgtgaagggaaaggtcttgaaggacattaaacatggtactccatgaacacacaaatgacacgagaacaaaacagccttattactgatatggagaaagtttgagtggtctggatagaagatcaaaccagccacaacattcccttaagccaaagcctagacctgagcaagccagggggtaccgagct

SEQ ID NO: 725762 - DNA, 237 bp, Homo sapiens
  misc_feature (85)..(85): n is a, c, g, or t
  misc_feature (89)..(89): n is a, c, g, or t
gggatactggacttctcgccccactacactcctttgtcttgactagtctggagttgagataggtgtgaagggcgagaaggcttcnaggntcaggtcatgaggtggatcagtttctttaagccgatgggtccagacttttcagccctgccagagaattcctaattccatctctcaggttttccagtggtaatgaaagctagccaagttggctatgctaaccaaagaaggtcaggtatg

SEQ ID NO: 725763 - DNA, 528 bp, Homo sapiens
tgcaagctccaggacatgcaagagatcattcccccctttggggaggaactggacgccctacgccccgaactggggcggccgaacatgtaatcccagtgctgctgggcctccaaaacccacctggagaaggaaatcaccccgtcccgacggctcctggggggggagagtgaagggacccgggaagaatcaaagtcgggcctgaaagtgtctgcaactccaaagatcaaggccataacccaggagaccctcaacgggagatttgttctttttcaagtgaatgaaatcccaaagcccgcctgggaccaatgaaagtttccccctgttgtaaaatcttttttcccccaagggaagtccttgcccagacccccgggggtgggttttaaaagatacccttggaattatcagacccagaaactttttttttttttttctgtaacagtctcccccgacttctcataatgctcttaatatattgcccttttctaatcaaagtgcgggtttttgggggtaaagctctactttcctcca

SEQ ID NO: 725764 - DNA, 757 bp, Homo sapiens
  misc_feature (28)..(28): n is a, c, g, or t
  misc_feature (74)..(74): n is a, c, g, or t
  misc_feature (88)..(88): n is a, c, g, or t
  misc_feature (98)..(100): n is a, c, g, or t
  misc_feature (104)..(104): n is a, c, g, or t
  misc_feature (116)..(118): n is a, c, g, or t
  misc_feature (122)..(122): n is a, c, g, or t
  misc_feature (135)..(135): n is a, c, g, or t
  misc_feature (143)..(144): n is a, c, g, or t
  misc_feature (146)..(146): n is a, c, g, or t
  misc_feature (148)..(148): n is a, c, g, or t
  misc_feature (153)..(153): n is a, c, g, or t
  misc_feature (156)..(156): n is a, c, g, or t
  misc_feature (184)..(184): n is a, c, g, or t
  misc_feature (186)..(186): n is a, c, g, or t
  misc_feature (190)..(191): n is a, c, g, or t
  misc_feature (193)..(193): n is a, c, g, or t
  misc_feature (198)..(198): n is a, c, g, or t
  misc_feature (201)..(201): n is a, c, g, or t
  misc_feature (236)..(237): n is a, c, g, or t
  misc_feature (245)..(245): n is a, c, g, or t
  misc_feature (256)..(256): n is a, c, g, or t
  misc_feature (288)..(288): n is a, c, g, or t
  misc_feature (291)..(292): n is a, c, g, or t
  misc_feature (295)..(295): n is a, c, g, or t
  misc_feature (305)..(306): n is a, c, g, or t
  misc_feature (310)..(310): n is a, c, g, or t
  misc_feature (314)..(314): n is a, c, g, or t
  misc_feature (317)..(318): n is a, c, g, or t
  misc_feature (333)..(333): n is a, c, g, or t
  misc_feature (363)..(365): n is a, c, g, or t
  misc_feature (371)..(371): n is a, c, g, or t
  misc_feature (378)..(378): n is a, c, g, or t
  misc_feature (400)..(400): n is a, c, g, or t
  misc_feature (412)..(412): n is a, c, g, or t
  misc_feature (439)..(439): n is a, c, g, or t
  misc_feature (450)..(450): n is a, c, g, or t
  misc_feature (452)..(452): n is a, c, g, or t
  misc_feature (457)..(457): n is a, c, g, or t
  misc_feature (470)..(470): n is a, c, g, or t
  misc_feature (482)..(482): n is a, c, g, or t
  misc_feature (502)..(502): n is a, c, g, or t
  misc_feature (511)..(511): n is a, c, g, or t
  misc_feature (513)..(513): n is a, c, g, or t
  misc_feature (521)..(521): n is a, c, g, or t
  misc_feature (529)..(529): n is a, c, g, or t
  misc_feature (557)..(557): n is a, c, g, or t
  misc_feature (568)..(568): n is a, c, g, or t
  misc_feature (570)..(570): n is a, c, g, or t
  misc_feature (574)..(574): n is a, c, g, or t
  misc_feature (618)..(618): n is a, c, g, or t
  misc_feature (648)..(648): n is a, c, g, or t
  misc_feature (692)..(692): n is a, c, g, or t
  misc_feature (735)..(735): n is a, c, g, or t
taatggaagaccaggcatagagattgancctaagacttatgtttctgaagaagaatctagaacaatcaaaaganaaacaataattgangatataattnnngttnactttccaaaannntccngacagggcaatcngaggtttnntntnttttnttnttgtttcaggtaaaatttaccaagattntntcanntncaganatntcctgacaagtttttttttttcaagctaatttttnngtgttttntttgttcattntgatacagaggggggggggggggggggggggnggnnggntggttggttnntttntttnttnnttggttggttttttngttggttggttggtgggcttgttggggttnnngttgtnttgggtnggtgggagggatgataattttnctgacttttttntgtctactacaatggagcagtagctgncagagtttttntntggtnaacacttagatgntaatttttctcncaaattagtttttgtttttnggggctgantncctttagngttcagantgtctgccactcacatattctttttttntcttttttatntntttnttctgcccaagtgatgacttaaaattactcaagaatggaaaaanacagagcgtcaaaggactagcagtgagtgntgaagccaattacacacagagagttggtctaaaacaattgtttnactatggttacaagacagaatatgtgtcaaaaatacccaaganccaagagacatacaacatcaaa

SEQ ID NO: 725765 - DNA, 762 bp, Homo sapiens
attacttatatggtataaattaaagttcaggcatttatggggagaaaaggccctccccaccgagccgatcatcggtgccacatctgacggagtggtgagaagttagtctgtgcctaccgcagtagtactgacgtcccgcttagcttgttcgtatactagtatagagttgatcacgtgatagatcgctcaacatggcatgctataatcttgccagtctgtagcgttgactccgcttttggtcattattgacagcttgagattttagttgccattatgttaaaaacatctaaataggtgtcagtttctcaggagtagattgttagtgttgacttttcctgtaaacgcagacatcgttcttggcctgccctgcattgtatacctagatttcattgttgtctctcatgcttcttgagttgcttcatggtttatgctcgcatggaaagctatcagtaacagtttcatgcttataccaaagaattaaatctgatctttaatatctgatattttcctggtactcgtactgataagggattatcgcgcaagtcagtcacagaattttggcaaataaattctagtctctccttagctattctgatgctttctcatataggccaagaactcattgcaaaacattttgcaaggatgaatgcctgtatttggtctaggaacagtacatttcagtctgatttagaattactggttcgcttattcctaacgcccaggaaaagcagctgcagcccaagtttgcctgtctttacaatg

SEQ ID NO: 725766 - DNA, 142 bp, Homo sapiens
cgatcctgcgcgtctagacgttgttgctcgcgggcttgaggtgatctggtgaagttttccagcgcggatcttttgtttcatagtgaaagcgcgcgtaccacagcacagtgccgttttctttgtcgcgaatctcgtactcgtc

SEQ ID NO: 725767 - DNA, 1000 bp, Homo sapiens
cccattctaatcgcaatggcattcctaatgcttaccgaacgaaaaattctaggctatatacaactacgcaaaggccccaacgttgtaggccccatacgggtctactacaacccgttcgctgacgccataaaactcttcaccaaagagcccctaaaacccgcacatctaccatcaccctctagatctaccgccctggagcttagctctcaccatcgtcttcatacgtatgaaacgccgccgcgtccccatacaccgaaagcggccctggtcagatcgcttcgaaccctagtgcggctccatatgtattgattctagaccaacgttctaggcctgagactcggtttatcgtcaaatccctctgtatcagtggatgatgacatcagagacgtcaagacgtacgtcggccgtgactcggagacactgcgagccagtacgccacaacaatctcgatatgataggttcacccctagcccatcattgctatcgtataccaacattgacgtaataagtggctcctttaacgctctcgcgcccttatcaacgaacacaagaacagctctgattactcctgccattcatgacccttggtcataatatgatttatctccacactagcagagaacaatcgaaccccttcgatcttgccgaaggggagtccgaactagtctcaggcgtcaatatcgaatacgtccgcaggccccttcgcccgtattcttcataggcgaatacacaaacattattataatgatacacctcatcatacacatcttgctaggaactacatatgaccgcacctctcccctgaactctacacaacatatttgtcaccaagaacctactttaaactccctgtcctgatgaattcggaaagataccccgattcggtagaacaatcataacctctatgaaaaagttcttaaccatccaccaagttctgtttgatattgtccatcctaaatccagatccctaaacttaaaaaaaaaaacggggttttcgggg

SEQ ID NO: 725768 - DNA, 320 bp, Homo sapiens
  misc_feature (156)..(156): n is a, c, g, or t
  misc_feature (164)..(164): n is a, c, g, or t
  misc_feature (203)..(203): n is a, c, g, or t
  misc_feature (205)..(205): n is a, c, g, or t
  misc_feature (270)..(270): n is a, c, g, or t
  misc_feature (299)..(299): n is a, c, g, or t
attagtgtaaaaacgtccgggtccaaagagagagcttccaaaagccaggatcgcaaatcagccagcagagagaagcggtccgtcgtgtcctttgataaggtcaaggagcctcggaagtcaagagactcagagtcccatagggtgcgtgaacgagtnaacgtaancaacgcatgcaggcgcagtgggagcgcgaggagctgagncntgggagattgcccgagagaggctggccttccagcgccagtctggaagcgggaccattggagcggngaacggctggagcgcgaacgatgcacgtngagcacgagcgcaggccagca

SEQ ID NO: 725769 - DNA, 310 bp, Homo sapiens
tgggggaggggtccaaagcttaaagctactttcccagtagttggccattttctccgaggtagttggggctggctctttcagtaatggctaattggtgtggtcaaatttgggtctacaacagtaggcaacagatgaagataagtgggtggaatggtctccagcactatgcatccctattttctaatttatgggtggtacactcacttttcagtaaatggtggtttcaaacgtgggtggttttttaaaaaacaaatcaatggtagggactggaatgtggaatgtagcaatggtaataaagttaattgggtct

SEQ ID NO: 725770 - DNA, 288 bp, Homo sapiens
cgtcgacgagagagagagagagagagagagagagagaggaagagaggaagaggaaaggctagagagaaagagagagggaaagaggagaggaaagaagaagacaaagagatggggaagaggagagagaagtgagaagtgagaggtgagaggacaaaggagtgagagagcaaggtgggggctgagcacccttttatggtcttcactgttgttaggtaactgaggagggagtcagatgtctctgagtagctccacaggatgtgctcaggggttcatagtggacaggtagac

SEQ ID NO: 725771 - DNA, 211 bp, Homo sapiens
ggagattcttataagtgggagacaaggaagggaacctgagctgcccgggctactgcccttacctggggcttcattggagtacacagagatgcggtccaactgcaggtcacttggccccgtggtaagtgccggtggggtcgatgccatgttcattactgatcacctcccagaacttggcaccgatctggttgccacactgaccagcctggat

SEQ ID NO: 725772 - DNA, 128 bp, Homo sapiens
  misc_feature (85)..(85): n is a, c, g, or t
tggtgaactggaataacttggcaaactacaattatactaaagttttatactggaaaattcaaatcagcttactcataatctccangatagctcttccatcattattttaattaaggggtaccgagctc

SEQ ID NO: 725773 - DNA, 1665 bp, Homo sapiens
ggggattttttaaaagcttcctaggaagagatgatctccgatgtgatgaatacgaataaaagggccctttaatgggcaaaaaaaaaaaaaaaaaaaaaaaaaaaaaaaaaaaaaaaaaaaaaaaaaaaaaaaagagagagagagagagagagagagagaagaagagatatataatatattataggaagagagagagagagagagagagagagggaggggggcgtgtttatctatgttcatctatctagctgaggggggcgcgatgcaataattgatgaggcgtagaacatcaagtatatatgtcagaggagagagcaaagaggagcgcaacaggattataatcaagaggagtagtatatatattactggagcacaagaccaacagagagggagaaaggaaaaacaaacaaaaacaaaagaagaagagcaaaggagggagacgacagagaggcccggaggcggcgaaccaaacaaaaagaaatagcgcgaaagccgacagagaccgacaaaacagaagacgcaaaattgtgcaaacagcccgacacacaggagagagcggagagagaatacaacaaaagaaagacaaaacagagagaaagaaaaaaaagacagagagccgcacagacaaagagaaagcgacataccaccctcccacatcactatgacatagaacaaggagagaggagaggagatagagagagagacggaaaaaaaaagaaagaagcagggagacataaaagaggccgagcaagacaaatagtagtaataaaaaaaccagagcacagggcagagacgaaaacttaacaaagaaagagaaaaaaaaaagagacaacacaaccaggcgggagacaggggcagcggcataaaacgaccggagggcgaccaagaagaaagaggaaggaaaagaacagcaggaagacaggacacaaaggaaaaagaagcgggaacagaacgagacgaagaacaaggagcaaggcgaagagaaaggaggacaaggaagacaacacaaaagaaagaatagaaaaaacaacagaaaagaagaagaaaaggaaacgagaacgaacgaggcgccagaaaagaagcagaacaaagacaagaagcacggaacacgagacgagaaacagcgagaaacgaacagagaaaacacaaagagaacacagaagagagagaaaaagagaaaaggaaaaaaagaaaaacaaaaaaaagaggaaaaaaagaaacagagcaagagagacaagaaagaacaaaagaagagagaagagaacgagggggaggcaaggaagcagggaggagggagagaagagaggggagagagcgaccggcaaagagcgacgggcgacaacgggggggaggagcaagagaggcgcgggacgcagcgagaggacagacgaacaccggaacgagaaacaacgaagcgaagaagaagaacgagagagagagcccctaacaagcgagacagaaagagacgaacagacaccacaaggaagagccgaagaacagagccacgaaagtcaaagacaaggacgaggagagaacagaagagaagagggaagcagaacggaagagagaaaaacaaagagccgcggaagaacgaacacgaaagagagacggcaagaccgaagaacgagaagagaagaaacggggagcaagacaggagatagtaaa

SEQ ID NO: 725774 - DNA, 302 bp, Homo sapiens
accgatcgctctctctggtaggggataagtggcaccaaggttgtgtctgattctgtcagtgtcaagcattcacggctccatcaaatctcagggaagcagtgattggaggacacaatttgacctattaacctattcatgcgttagtataggttggacgctcaatatcgaggttttactgactagatgtcatagctggtccctttgtctaccatgaaggcacaatcagagtgctccagggtggtgtgggtggtgaggatggagttgtagggctcaactacagctgtggaaacctggggcgccgg

SEQ ID NO: 725775 - DNA, 103 bp, Homo sapiens
cgcctgaatgtgtctgcgttctgttagcataatgtgaggaggtggagagacagcccacccttgttgtccactgtgacccctgttccatgctgacctgtgtttc

SEQ ID NO: 725776 - DNA, 420 bp, Homo sapiens
  misc_feature (2)..(2): n is a, c, g, or t
  misc_feature (53)..(53): n is a, c, g, or t
anaatcctgtaggtttacctttgtggaattttgaaagtaataatagacatatnagctaaagcaaaaccggactaatttgtaatgatttatttatttatttatttatttatttttattttttttttttttgggacggagtctcactctgtcacccaggctggagtatagtggtgcaatctggactcactgcaacctccacctcctgggttcaagccattctgctgcttcagcctcctgagtagctgggactacagcacctgccaccacacctggctaattttttgtattttcagtagagacaggtttcaccatattagccaggatggtctcgatctcttgacctcgtgatccacctgccttggcctcccaaagtgctgggattacaggtgtaagccatcgcgcccagccaattttgtgatt

SEQ ID NO: 725777 - DNA, 104 bp, Homo sapiens
cgcggacgtacactgaccacgcacgacacgcactggaccacgaccttgtacgaccgacggacggacacttcgcccactggactggacggacggacacttcgccg

SEQ ID NO: 725778 - DNA, 1161 bp, Homo sapiens
  misc_feature (281)..(281): n is a, c, g, or t
  misc_feature (657)..(657): n is a, c, g, or t
  misc_feature (748)..(748): n is a, c, g, or t
ggattaatagagtggctggacacatatacggtgaccttgacatggagctatctgttgaagcaccatgttcccaagcaggagcacaggcggctgtaccgtgagtgatcccatggggcgaccggccgctgtgaaactagtagagagcattaggcctgaacatagaaatgctccagggacacagaccatcgactggtgtgggagcttgtgactactgcgtagatgttcagtcaagggcctgctacagtcgttgacatcgagaactagctcgacgctctttatgntaggcaataatcgagacaaacgtacaacgttgtccgtgcgtagtacgtcgtgctatatagaggtcgagtggcactttcggtgcaaggactagacgttaacaagggccacatgatagagcatgtgtccatgggcaggcaatcccggcgtgccgctcaccatgtccggcccatggcgtgcatccaacgacatccgtcgcacctcaatgtgcacgtaccaagtgcgcgacatggcggaattccctgtcgagccggaatatggcgcaggaacaagaaaccactccgtggataacaaaaacgttctctaagtgggcctggggcgcccaggtgggcacggaacctatgggccggagcccgaattgaaaatccgggacgcacntacggaagccatctcgggagaggccaaatagggcggatatcgtgggcagtacccgccataagcgagccatgcgtgtgtcttaggcacaagnattcacccagtgtaaggatctgcactgggcccgtgtatattgaggcgcttaagagactatcggccccagggtctcatagttcaatagttccgtggggacttggacttataagccaccaacaagtgtgacgcacaggcacaagacagcgaaggagggccgcgattgtacacttgggttaacccaaggtccaaagtttccacacatcggggacgagtaacgaacgcggagccaagacagtataccccaggggcgtgcacacattgtgcctccggcggcgattaccaaaagtgagacactcgctcgtatgggtgcactcccgttggcccatttcaaagccgcgaagagaggccacaaatctcacgaaagtgtgagggacaccttgtggcttgggaatatcaccataggcgatcacg

SEQ ID NO: 725779 - DNA, 839 bp, Homo sapiens
gtgttaaggtggtcactgcaatgattgctgtgcctgcccatgatgtgctgctagatgtgctgcggaactggagtgatatgctgctgtgtttgctgttggttggcttgtggtgctcgtgcttggttgctgtgctgtgcttgagctgtggcctggtggcttgggtgctgagtgtgcacttggactgtgctgtgccagtgctgctccctgtgagcctggctgctggaagctggcaagaatgcctgaggctggagtgtgccctgtggtccagtactggtggtgcgagcgctgctgccctgcgccgatcgcgtcttcgtgtgggtgcttcagcttctcgggggcgctggtgctgtgccttcctttgtggtgcccagctccgtggcccgggcccctgctgcctggctgccctgaccgctgccgcaggatccagcccgtgccctatcgcctggagctggaccaaaagatttcatctagcttgcttgcaggcatatggattcacacttgctgtcctctaagactgcggatgttacgaaagtctggggtgatgggactcaacaaagattctcagcttggatttcacatggagcctggaaagataaaacgaggggctacgagtatgtgtatggagaccctcacccgtactccctgacctcttggacagacctcaatgagacaacgggtgctgcaaggtctcctgcggacgagctcactactcttgtgtagacttgacagggaaggagtcttcaggcattgggaaacaattcttatgggccatgttggagaaggttgttcgaaatgagattacagtgaaagttcaagagtccacaggaatcagaaattca

SEQ ID NO: 725780 - DNA, 276 bp, Homo sapiens
tcataagattaagctttatgacttgtagggtggtaggatcctgtgtcatgtctgggtgacgtccgcatcagcaggatgcattggggtatattgtctctcgattgctgtatgcaggccctggggtaatctgttgattcgatattacatatcctataattcgagggtgggcatccacgtgtttccccattggtaccagctcgtagccacgaggtgtcctgggtgcagactggtggacaaagtagaacgaaccttcttttcccgctctgcaggcatggg

SEQ ID NO: 725781 - DNA, 587 bp, Homo sapiens
gttcccactctgtcacgccaggctggagtgcagtagcacggtttatgactcactgtaatctggaactactgggctcgggtgattctcctgacctcagcttcgcaagtggctgggactacaggtgcacaccaggcatgcccggttaatttttttttgttttaatagagacggggactcattatgttgcccaggctggagttcgcgtaagtggtgcaatctgtgggctcactgctgacccaatcctcccaggctcgggcgagttcctgtccacctgcagcctcctgagacagctgtggactgaatgcttggtgccaccatgccttgctaattttgggattattctgtacagacggggtccccctatgttgcctaggttggttagggaaactccataggccgtcagagcgatcctccacacctcagcctcccaaagtgatttatctctaattagcccaagggtgctatctaaagccttacaagtgcttggaacatagcagtgtcgaaagtaacaaatatagatcccatgctgaggcgactgcatccagaccagctaaagtttctaaataggccacatagaccgagggacc

SEQ ID NO: 725782 - DNA, 1391 bp, Homo sapiens
cgggaacgcgccggcgtgagaataaggaagcagttgacgctgccgtcgtctactggcttgttacgagtgagcactgcgaacaccctgcatgtcgcgtagtgtgacgcgtgcacggtcatgacggcctcgatctgtgcgacccatccccccggcgcggagagaaccacccaccttcccccgcggctgctatgctcgtcaccacgtcctgtttcggccttgcacgcgggtcccttgaacgctcgcatgcgaagatcgtctgtggccgcccgcgcgacaagcgcaccctgcgcagttctgtgagctggttggacgcgaggcagctgttgcggcgtgctcctgcattcggccggaggcgccgtctccagcacgagttgcctgtccccacttcgcttgaccgaatcccgcagcgcgccctgtgagcggcgttagtctcctgcgcagggctccagtgacgcccggcccgcgtagcggcgggtgactgcgcccagttcgtgcctgatgtgcgcctggtccactgggggccgccgtcgcgataggcttcgagacgtggagagggcatctgcacgcgtgcgccgccatggggtagcgtcgtgccggacgcgtgccaaacgggacgccatgtggtgccttgttgcttcgcgtgctggcgtggttgcctggacagtagcagtttccgattcgcgcccccctttgtgggcggcctcggtggaggccatccccttggcccccaggggcacttgaggccgcattttcttgcgaaggggcaccgacttgtgtccatctgttgcgccaagctctgtgcgtgtccgttgtgggcggacgccggtgtgggcgcaacgacgcggggccaccacgcccccgcggttcgtttgccgccttgacgagcccccttttggcacctacgttttcaaccaccaaattggggggtgccccgcatagttgctttggccccgttttcgtctcgcccggttcccaacttttgtgtgggggccacattgtggtgtggtttcaaagccccccattaaagactttttggggcccattcccgtgtgtttatggcggccgacgagtgaccgcgcgcgtttgcgcggcatagaccgtgtgttcctgtggcaaaggggaattgtgcggccgtgggaggccaccgttgtccgaggtaaccctctgtgcccctgtgtaagtggcacgtctgttggagcaaacctttcccaaggtgtggccttgtgatgaacctatgtaggcggttttctgccccctgtgacgaggttgtactttagaccgcgaccacaagcgcgtgaaactggtcgcgtcacccgcgtgtgctcccgggccgcgccccgcgctttttatccccccgtggtttttttcggcaggccctttgctttcgcgcc

SEQ ID NO: 725783 - DNA, 114 bp, Homo sapiens
tcacaaataagagcagatggatggaacagcttcagttgaattcaatggacctgctgaagtcccatgatgtcacccaatggatccattcctcccattcatgtgcctccaggttat

SEQ ID NO: 725784 - DNA, 959 bp, Homo sapiens
  misc_feature (657)..(657): n is a, c, g, or t
tggatcggatattccttcctcatgcacacggaggacggagagacgaaggcggtggccatatcactggtgtcacccggagcaggactgtctagaaggacttaccgtcgcctacaccattcatcgacatgcaatggaggccgcggtacctgcacactagctacgccaacaagtacagcttctggctgaccaccattcgcgcagcgagagctaccagggcctcgccacttccgcgcaagacgcagctgcaagggcctggcactcataccgtcacgacacatcagcacgcgtgccagtgtgtgctatgatagaagcctgtgatgccgcccgtcagtagcctacggaagggccattgttggatgcttattcttaagttattacctctaaggtgccaagccaagaaatttggttagattctgttctttaatgaaaaagaaaaggtctaccagagaggagatttgtgcccctccaggcatggcagacgagcttttgatgagccgtgctcgaggcacaactgtcgaaccgaagcggggtgctaaagacacctacggagggtcccgtggaggggcacggccttgtgtccaacagaaagccaggaggcagaccttggtacccctcgtcagtcctggttagacgcgccgtcgtgtacaaggcacgggntatagcagttccgtcacacgccgcatgtaatccacttgcaattttcacaatgcccaggatgacaatttcacattgttcaaagctcctcttcctcggggggtgttggaccagtacgaggacaaaccagcaacgataggatgccaggccgtgggcagaaaggctcaagaggggctacagggggctcaggcaaccgttccccaaaacaaggggccccgttggggtggggccttgggcccaaggttttctacggcgaatgttatgccacagccatgttgtttcccaaatcgtcgggggagagggaa

SEQ ID NO: 725785 - DNA, 409 bp, Homo sapiens
cgcacatgtagatttctctgtgcgcgtgcgcgttccctcttcccccgccctcagggtccacgggcaccatggcgtattaggggcagcagtgcctgcggcagcatatggcctttgcagcggcggcagcagcaccaggctctgtaacggcaacccccagaggcttaagccatggcgcttctcacggcattcagcagcagcgttgctgtgaccgacaaagacaccttcgaattaagcacattcctcgagtccagcaaagcaccgcaacatgaccgcaatgagcttgctgagcaccgaggtgttggtgggggacttgatgtccccctttgacccgtcgggtttgggggctgaagaaagcgctatggctcttagacgagtacctggaggtggccaagccttccctcgggttctt

SEQ ID NO: 725786 - DNA, 114 bp, Homo sapiens
ctgttctggtgtcgtgtcacagtcccaattgtagggctgtgtcatggatacgattaatgagatcctgccatttcagatgcagacttttacatatcacaagggcacgtgggatcg

SEQ ID NO: 725787 - DNA, 878 bp, Homo sapiens
agcgggtcggtcccggaggcggcggcgcgtgcggagggtcacctcggttgggggagaagatggaatgagttgaggtcaggccctggatagtagctttgctgtgtctcaagatctgaacaggacagcagcccgacgagcccccggatcgtatccgcgagtacaaatgtccaagatacgagttccttgagagcagagtgagcgccgacggagggtaactgggaactgcggaaatccaagcggcctgggattatgtgaagcatgccgagacagactggctgaagatgactggtagcgaggggatggagagtgacggaagatagaataagaatagatgacagaagcaaactggacattgacaactgtctaagaagttaaccaaagagacagcatatgctaatcaattgatgcgtttctgaagtggtgtaatagaaggttgcctgtcagaagtgtggggcaggaagtggatatgtgggtacgtgatgcacctgataggaggaaagaagactcttatcgtggactccaggggtgtctaggagaatgactagcaggcaagagtggcataactgtagtcaacgaaggttgtatgcatgtacactgtctgggcacggagtgcacagcagcgtcgaagactcatagcaggcaacaatgaactatgagcacatgtctaagatttgggatttatcatagtgaaggtaaaggcagatggtacctaagatttctgtgatgatgaatgtgctgtgtggggggaacatgccttgtggatgatttggccagaatgactattccggattcgtactgtgatggagttcaagaaggttgagcagaaagaagaaggagggggaagaaaaaagcaagcttaatcctttgaaacaagaggg

SEQ ID NO: 725788 - DNA, 378 bp, Homo sapiens
ggaagatggcggccgttcaggcggccgaggtgaaagtggatggcagcgagccgaaactgagcaaggaatgaagctaaaggagacggccttaaagttttaaaaaggaaaggaaggcaggaaaggggggcccaacccagaaagggccttagtttgggaaacagctaaacccaaggccacttcttccttccaccaacccacaccactttaatttggtggggccccatagggaggagagctgtgccccaataaaatcacttcaaactcgcagataagcatttcataacctgaggatcagtggggagccccataccacacagtttccatgtggacatctcactcacttacttcatccaaaatatggtcaccttcagcctgggg

SEQ ID NO: 725789 - DNA, 292 bp, Homo sapiens
cagatgaagctaaaattcgatatttagtagttttcttgctgaaatagagatggcatttgtttttttattgtcattaaagtctattaagttaattttaatttgtttttacaaccaattactaaaaatggcattattattataatacatttgaaattccagaacagttaaaatcatggaaataccaagttgaaatatacttgcaatatgttcttgcaaccattactattttaagcttaattataatatattatccaatgaagcaattaggcattttataagcagataaattcac

SEQ ID NO: 725790 - DNA, 329 bp, Homo sapiens
attcgcggccgcgtcgaccaatggcgcaatctcggctcactgcaaccttcgcctcccaagttcaagcaatactgcttgctcagccttgctgagtagctgggattacatgcatatgccaccatgcctggctaattgtgtatttgtagtagagatggggtttctccatattggtcaggctggtcttgaactactgacctcatgtgatccatctgcctcaggctcccaaagtgctgggattacaggcgtgagccaccatcccggccgggaactccgtcaacgcggccgcgaattgagtagtagtggtagtgatagtagacgacccgggaatt

SEQ ID NO: 725791 - DNA, 153 bp, Homo sapiens
ggaagacatatttgactttcatttagaagacggcacattcttacttcttgaacaacagttcggcttttcttctctgaacgtggcctatgctaatgctttagtctttgagtattgtgatgactgagtgagaggagggatttgcttggggcagca

SEQ ID NO: 725792 - DNA, 1878 bp, Homo sapiens
  misc_feature (1684)..(1684): n is a, c, g, or t
tcgcggcgcggcacggggcggggccgcgggacgccaggaggcggcagcgcggcacgcctggcagcttagacttaaactgcccttaactggcactaacagaacaacactctggacctgcttaaacgacttgaacctactctgtaagcctactgccaactgcgacttcccatcacgctgggcaaaaccactgctactgctaaaaccaaacagctgctgcgcgcttcacactgctgaacgcacactgacccacactctgctctctgcacacactggcgccgcactctgctctaattcacacgctgcacgcgaactttccacgccccaaacggcctctgcactccacttgcactgcaaaccccaacctgcgccttaaccttgtccctctccaactgcaacaccaaccctgacacttctcccacaccgccaccctaacttacacaccttacacccccttgacccttcccaaaacctccatcaccccttgcaccaccgccaacaagaccaacccttcttcccccacccttgcccaccacgccaaagcacttccctccacaaagaccccaaatatcttccaacacttccaaacgcccatttggacttggacgccaacctttcttctcacaacccgccaaaactttcccgggccattccccttaaacatttcgtccccaaccccaacagtcccgcctttcccccgccctgtttcccgctctactggcgggccaaaataacgggtccaaccccgttgtgcgggagcccattactcataacccagggacggccactttcagtcaacgcggccgaccccttgtctaaacaagccaaagggggacaaaacacacccttcacatggcacgacaccaacccgccaacaccccgcgcccctcatcaggggcagcgcccccaccccaaaaaagcgccggggcaaacgacaaccgttttataaacgcccccacttgacgatacaccccgggggcccgccccccacccccaactgttggggcccaaaacaccccccccccctggtgcgcagtgcctaccgaccgcgcccgtgtccaagacgaaccaaacatgcacgacggggacgggcacccactccaacagcacaaccctcctcaaaacccctctcgggcgcgcctctctatccaccaccaacacccgcccacacttcctcaccccacaccgcctttgtggcggcgaaaccacacccgccccccacccaccccggtggagcaggcgacaaaacccccatttcgtaggcgccgggcgcaacaacaacccccgcccgacccccctcctgtgggccacccacccccacaatgcggcgcccaaaaccctcataactgccccagcaaaacaagacgaccccctctttctacaacccacttcttttcccccccacatacatccccccccaacaacagcctcttttttacactcgcacactcataaaacaccaaagcaagacgtcttattatatcgccacacgcccccacatcctgggaggccactgaatcactgtccaatcaccccacggcgatgttcaaaaacaaactcatctatcgcccaccacacccgacctccctccacccgcatcaaacgaaccaccatttacacttatcccccactaatccacgtcacaaccctgaagccgcacaaaaccactcttcttcctcccccgcanacaacaacctactatgaggccgccgatcgacccacacacatccctcttttcacagatgctcaacactcacttaaccacaccgcgcaacatggatgacaccccccacactcctacaaatcccactgcccaaaaatacacgctcattttccagtaccccaccaacgagagcaactaatcccatatcaatggagcgc

SEQ ID NO: 725793 - DNA, 443 bp, Homo sapiens
gagtggtgttgttggggggatgtggctctttggggtgtcaggccacggggtgagcccaagccacgaggtgagctggaacaagaagggcaagaaggtcaactctcagacgctttgagacgacttgagtttgatgtagagtgcatggggcagtgctagaggatccacgccgctgtaggacaccgcggggatgaaaatcgtgtacgatgtgtgtggcccacgaactcggattgggagagatcactagtccgatgccaacgctatactgtcctccgcagaggacctagctgcctctcctggcttccccgaacatcaacgatgggcccactagttgacaggtggtcggacgcggatcacggacagccacccatgctctgtgcagccatgcggcaacccctgaccctgacgatcacctgtgttcaacggacttccctgcctgtggatcc

SEQ ID NO: 725794 - DNA, 107 bp, Homo sapiens
acgtgcagaatggcacctcgaaagggaaggaaagaaggaagaccagtcatcagcctcggacctcagtggctgaaggagagaatgtatttggtgtctgccatatcttt

SEQ ID NO: 725795 - DNA, 183 bp, Homo sapiens
gttcagggttgttggaaaggattcaaactggctaatgggggaaaggggaaaccaaaagggcaaggggccaattacctacttaaaactgctcaattaagtaggggggctatggaaaggttgcccctcatgactttggatttaaaaacaattaactttaaataaagcaggttaaggtttttccca

SEQ ID NO: 725796 - DNA, 108 bp, Homo sapiens
attgattgtactggtacaggctcgtaggaagagacccgcactatactgatcctcgtcggggggaagtaatggcaatccccgatccccatcacgaattggggttcaacg

SEQ ID NO: 725797 - DNA, 598 bp, Homo sapiens
  misc_feature (327)..(327): n is a, c, g, or t
tgtggagagggggtctcagtctttcctcgggggcagtggcaacgaccacgtcctctgctgggtgatcacaagggcttgctgctctgtccctgcccttggggtgccccactctggatgtgggggagccacctgcctctactgggggcccagcagccttctgcattagccgccctgcagccagcaaaggagcggcggagttcctcctcttcatcatcgtcgtcgtcgtcctcctcctcctcgggctccagttctagtgactcagagggctctagccttcctgtgcaacctgaggttgcactgaagagaggacagaactagaggaaaggnctttaatttaacagcggggagggatggcagttaggacctcaagaggaacttcccttgggttggagggatcttcagagtgtgtccccagccccacccaagccccaagggaggcttgtcgagagggacgtcctcgggagccaaccccatgcaaagggaagaggggctctagcagttccagttccagctcctcctcttcatcttcctcctcatcctcctccttctttttttcctcctcctcttcctcttcttcttcttcctccttattttcctt

SEQ ID NO: 725798 - DNA, 226 bp, Homo sapiens
tgatctagaggatcccgtgtgctgggatcataggagtatagtagttcgcttggactgggtgaagtcttagcatgtactggctcggaggtggggtgctggctccggaggtcgccccaaccgaaatttttaatggcaggttgggtagtttaggaccggggggttggtaaggtacggttggcattaataaattaaagctccatagggtcttctcgtccggcggtccaac

SEQ ID NO: 725799 - DNA, 1302 bp, Homo sapiens
  misc_feature (291)..(291): n is a, c, g, or t
  misc_feature (351)..(351): n is a, c, g, or t
  misc_feature (436)..(437): n is a, c, g, or t
agctaatcaaggccatttaagtcccaagcttagctgtctagcttggtcggatagaacgagcagggttctatgcgtcgctgtgccaaggtagtagcaggagtgcagtgaagggactgaccgctcagcgagcacagcactactcctgactgggcatacatagtggtgctggaatcttaagactatcgccttttcataacgtaccaggggcatacaatttcatgcaccagaggattaactcctgaaccgtgcatctagaagagactattattcgggggcacacatacactcagnagactgaggctggtgttgactagatgtgctggcagacacttaactactcgaaactgtggnaagtctgtttgtgcaagatgagactctcttggtgctcatgcgctggatcaattacgaggacagcagctctttagtggcacctggnntagagtcgccacacgagtggaacctttagcctaaccaagctaggcttagttgagctatgcaacctccagcgacagagatagcggcgcaatgctacactcgtttccaaaatagttatgttgctagcatacctaaggctattagagagcccaaacaagaggcgatttagatagccacataatcgccatagcgataacaatgggttcaccgccatggggcagcctctttaggtagtaagtttgtggggatcttaattgcgccgacattttggcgccgataccctatgggtattgaattttccccccaaactttaacaggaacttttttaaaacaaatggtttatccattgttaaaacaattagtgtcctgggatatctttttctcaattaaattatgggccttacctttattatttatttggatggttaggtataattcctaagaaaaccaaaagaaatatagatatacaattttttcaaaggaaaaaaacaattggggggcacagttttgggccaggaaaacatttggaaacttgggcaggtcagccaaagagcaagttaacacttttcatttgggttgggccaaccttttatatatatccgggctaaatttattaaagggtttacgaggactttatttgtccttcctttaacaattttccccttggtaagaccaaaattttttcatataagccgattataatactctaagtggtaaacttaaggaaacaaaattggccgagggcccagcttgggtttttgtttgccaccccaaaaagaagctttaaccatggttcacccagttgcaacttttgtgaaacattaccccctctcaacactttgagaggggggccagatggccaatgga

SEQ ID NO: 725800 - DNA, 170 bp, Homo sapiens
aaaaaaaaaaaaaaaaaaaaaaaaaaaaaaaaaaaaaaaaaaaaaaaaaaaaaaaaaaaaaaacttatcgttaccggggaccttcgaccttgatgatgatgatgatgatgatgatgatgtatacccgggatttccgaaccgggacctgcagccgtcccagttttcctttt

SEQ ID NO: 725801 - DNA, 231 bp, Homo sapiens
cgccattagtgtcaagtatttcttcaacccccagtgatgcaaccttcgtagatcagaagtcggttgtcggtctcactggactacaatcaaggtgccagcaggactgtgttcgtttctggaaattctagaagatgatctgtttccttgcctcttctagctcctagaggtcactcacatcattcttcggccgtggccccttcctccaccttcaaagcccacaacattgattct

SEQ ID NO: 725802 - DNA, 1036 bp, Homo sapiens
  misc_feature (988)..(989): n is a, c, g, or t
  misc_feature (996)..(997): n is a, c, g, or t
atattctcagaccccctcgtccctcaaatctctctctccttgtttaccacttacctcccgctcatacgcccatttccgtgcccttttctgacaccccctggggtccgccacaatttcccagcctttaccctccggatactatccttcctctgaaacctgccaccgtaaaaggcctcaccgctccccactcatccaggaaatatcaacacatgtgtgtacatctgtttcagccagtttctcagatcaaataaggagccttgtttacccgatccccagcacttctattccgacaaccatttgaagcctccagagaagaagtaaggatggaacgggaatatatgttctgcgatattaccgaaaccgtatcgatcctcaggtacatcttcacgtgccgcatcaagccctttctggttccacagctgcctcaagtatcttcatattacagatctccgtacaggcagcgcagcccggtcagggcctccgccagcgggccttcttgacaccgcgtggcgagctcccggaccagcgtctcaaaggcctccgccggcataaaaatccgcagccgtctatcccgaagaagccctccggcgtgacgtttccgggcggggagaacatcactcgctccccctggtgaccgtgcgtcagggcttccggatgccgggcatacagcgtgaacaggcccagcagttcggataacgcttcccaccgtacggcaccacgaagtcctggccggtgatcagcaggtgcagacgggtgtggtgtaccaggcccccgggcgttctccgggtgctggccgtcaacgcggatctccaggcgcagcgtgccggcctcaatggtttccgtgacggcagaaataaccgggcgcagctcctgtgccagcgttcttgcctgttctgtgttccagtccagccgcgcagcatcaacgggaaaacagctttcagccgcggcagggtgaagatttctgccagcaccgcgtccggcacctccnncagccannacagtcgctctcgagataatcgtcggtcgaaaagtatat

SEQ ID NO: 725803 - DNA, 382 bp, Homo sapiens
gttgcactggtgctgactcaaagaaggtcatgcatgttcttctctgcgtacgcgcggcctgctcctgtcgggatctgcctgcttgacgtgccatgtgcagcctggtttccaaccaagatcctgggggactcctgtgtgcatgctcatctgatctccgttgatccacgtggtctgatgcctgtcaacaggaccagctgtgtttgatgatgtcatcacaccaagaggcatccccgtgagctgccccttggagtagtgcacttgaatcatggttgcagcacctgtgcctgtgcctgaatgtgtcccaagcatgctccatgggttcactgcgcgcgggctggtccagccagggattggttggttggtcttgtagtcgatccctgtt

SEQ ID NO: 725804 - DNA, 454 bp, Homo sapiens
cccggagggagaagcgcaggaaaggcagcaggggcacccgacgcttccagctgcccaggcccggaggggcgccccccataggggccccatggggccagggatccgcgccgccgccgggatgctgctgcttcttcttcatcgcctgctccgctgcctcccacagcctgcccgtgccaggaaaaggtcacccatccgccgcgaggaggagagcccggctgaccggctgcacatggggagggccgcgcggagggcagccgggtgggggcggggaggggccgaagttgccgggctcaggagactttcttcggcatggtccccgccgccgcggcccgagcggccgaggtgtccggccccggttcggggcgctgcccgtgacggggcgccgcgcccgtcccgcgcccgctagcgtccccacgccccgcgccccgccgcgcctcgggctcgcttgcggccg

SEQ ID NO: 725805 - DNA, 414 bp, Homo sapiens
  misc_feature (399)..(399): n is a, c, g, or t
ttaaatacatgtggaatttcccttataaaagtccccctttaatacctacattgaccctaactgctgttaaattgttttgtttccataagctgaagtccttactttaattattcaagatacagaggccgggccgtggtggctcatgccctgtaatgcccagcactttgggaggcccgagacgggcggatcacttgaggtcaggagtttgatatcaaccctggcgaacatggtgaaactccatctctgctaaaaacacaaaaatcagcccaggtgtagtggtgcatgcccgtaatcccagctacttcggaggctgagacaggacaattgctttgaacccgggagacagaggctgcagtgagctgagattgtgccactgcactccagcctgtgtgacagagngagacatcgtctcgg

SEQ ID NO: 725806 - DNA, 167 bp, Homo sapiens
tttttttttttatatttatttatattatatgctatattcttataataaagcaagctaaagaaaatagtaggaaaatcataaggaaaagaaaatatatttactactcattaagtagaagtggatcatcataagtgtttcatctcggccctccccttcccatctttcct

SEQ ID NO: 725807 - DNA, 203 bp, Homo sapiens
gtgttgagatccggcacacccgtaggactggtgtcccgctccggatgtcacatattgatgccgaacttagtgctggacaccgatcggcatagcgcactacagcccagaactcctgggctcaagcgatcctcccacctcagcctcccgagtagctgggactacaggcacgcgccaccgcgcccgggcctgtagcggggttgttg

SEQ ID NO: 725808 - DNA, 324 bp, Homo sapiens
aatacagacaagttaggtgcgccagcatctctgatgacagaagtccaatgaagaatgggacatggtcccaaggggagtttgcccaaggaaagagagcatcaacatacaatgggaaacaaccatctgacagaaattcactttattgtagcgcactctcagaatcacgaggatccattgtgatgagatgtaccctgaatataaggggctcagaaacagcggggatccgacttcccccgcgtgttttcagcagagtggaaacagctgtcatacgacccaacatctgcatcctcaccagcacccagcccttatcactggagctcagga

SEQ ID NO: 725809 - DNA, 357 bp, Homo sapiens
gacttacatttgctctttgttgttctgtctcttccattgtatttgggttctggttttgttttatgatttcttacctagaagaaatcgtagatagccattagtttttaaccttatggctctgtgtgtgctcccgttggttatgtgtctgttccctttcgtgccttctctccctcacaccccagctcatttaagacaattgctcagcctctcaggacatctgcagccctgctttttaagaatacattgagttttgaactcaaattactaacctccagccttgcaccaggatagatttaatgagcaaagttttgttatgtaaaaagtaaatctacagtgtatctaacatatggtcgacgc

SEQ ID NO: 725810 - DNA, 913 bp, Homo sapiens
caccacgctcgactaattttgtatttttagtagagacggggtatcactatattggtcaggctggtcttgaactcctgacctcaggcgatctacccgcctcggctcccaaagtgctgggaatataggcgtgggccactgcacccggttttatgtatattttgtagttttttattctttttttttaaaccttttagcttgagtgatctctgggttaatccattgaattaacgggagaaacttggttgaaagtcacacacacaacaatttggtttgggacaacccaaggccaaaacaaaagaacccttgcctctctcctcttttatattctttattattattttaatcagggaagggggaagacctcaactttggtgtcgcccacgtgtgtgataaattgtatgcgggggcacagcatcatcaaagttcaacaggtaagaagcccccaaccttttctgatttgtcacggcaatttctctgtggccttaccgcctcatggatatttgggggaccacacggtgtgccaccacacacaggcgtgtgtattttttctgtgggatttcacgagcaaaacggggggttccacagcgatatctgcggaagatggccctgacatccggcaagtgtgaatcccaccgcatgactcccaaagtcctggattcagggggtaacacttccccgggaaaaccggttctctatataagggccgcgcatacttggagtagcgtggtttcccgtacacctgtaatgcctttttaaaccccgtattccatgggcggaacgtatttagtactgcaacagtcgttaaccctgagcccggattattacgatggcgcggcacggagcaaggcaccctgtggggtgccttatgaccttccagaacattgcacctcgccgcgctacctgttcacttgtt

SEQ ID NO: 725811 - DNA, 175 bp, Homo sapiens
atcagaggatccgccggtaattttttggtattagtagagatggggttcactgtgttagccaggatggtctcgatctccggacctggttgatccgcccgcctcggcctcccaaagggctgggattacaagcatgacccatagcaccgggccagtattttcttttatatccgtattc

SEQ ID NO: 725812 - DNA, 165 bp, Homo sapiens
gtgacggtaaacttcccctcatactcagcctcacaagccccaccgccagctgagcaggctgcctgcccacccctgtgccccacagccagctggctgtgccagagcagagccatgccacatctgtatatagatggggattttccaatacagctggttcgtgataaa

SEQ ID NO: 725813 - DNA, 503 bp, Homo sapiens
cgtgagaagatctgagtcaagcacttctcctgcctcagcctccgagtagctgggactacaagcgtgcacctccatgtccagctaatttttgcattaaaggagacggggttacgcccaagtaggacaggatggcctcaatctcttgagctcgtgatccaccccctttggcctcccaaagtgctgggcgtgagctgctgcgcccagcttatatttatttttggagatgcagtctcagtctgttgctcaggctggaaggcaccatctcggctcactgcaacctctgcctcccaggttcaagcagtgctcctgcctcaggctcccgagtagctgggactacagctgtgcgccaccatgcctggcttagtttttgtattactagagatggggttcaccatgttggccagggctggtctcaaactcctcacctcaagtgatccaccttccttggcctcctaacgtgctaggattataggtgtgagccactgcacccagcctagaacagg

SEQ ID NO: 725814 - DNA, 307 bp, Homo sapiens
  misc_feature (25)..(25): n is a, c, g, or t
  misc_feature (36)..(36): n is a, c, g, or t
  misc_feature (78)..(78): n is a, c, g, or t
  misc_feature (120)..(120): n is a, c, g, or t
  misc_feature (155)..(155): n is a, c, g, or t
  misc_feature (186)..(186): n is a, c, g, or t
  misc_feature (188)..(188): n is a, c, g, or t
  misc_feature (202)..(202): n is a, c, g, or t
  misc_feature (268)..(268): n is a, c, g, or t
tcataaaagtcttccggtttgcggncagcaacgtgnctttgcccggcccattgcccgtaggtataagggcgctataantcctggtaaattccactgccaggtgctgctggtagttttctnggcgcgcttccggcagtatcccctcgcacggtttntggcacaacaaggccacttttgcaacttgcncncgcactcacgtctnccatgctatcccctaacgcggcatatttgcttctacccacagtgtggcattagatattccagtccngtccgtccgccacttaccccctctttattaaaaaaaaaa

SEQ ID NO: 725815 - DNA, 316 bp, Homo sapiens
  misc_feature (58)..(58): n is a, c, g, or t
  misc_feature (110)..(110): n is a, c, g, or t
  misc_feature (131)..(131): n is a, c, g, or t
  misc_feature (191)..(191): n is a, c, g, or t
  misc_feature (226)..(226): n is a, c, g, or t
  misc_feature (249)..(249): n is a, c, g, or t
  misc_feature (272)..(272): n is a, c, g, or t
  misc_feature (295)..(295): n is a, c, g, or t
  misc_feature (307)..(307): n is a, c, g, or t
  misc_feature (311)..(311): n is a, c, g, or t
cagatgaaaatggacttctttctctccccaactaaaggatattaaagttaggggaaanaaaagatccttgaaagtcatgataatttctgtccccctgggtctcattatanagttttcagcccttgggcctnttttaaaggatggtataaaatgactttcaacccctttgtgaatacatatgggtatataanaggttattgataaacttttgaggcagacatttgtntcgctttttttcatttttgttgngttttataaactgactgtttttntttgcttggatactgtgattccnaaataaatttcntccnagcca

SEQ ID NO: 725816 - DNA, 123 bp, Homo sapiens
acacacatgaatcatcctccccctcttttttatttcctcagtgtaccgggaattattagattaaggagtatggatactttgcatggcttagtaagtgtgtctgtgaatctagccatattctca

SEQ ID NO: 725817 - DNA, 394 bp, Homo sapiens
cattgtgacaatggcacatcgggacttggaccatggaacaccgactctatgggcccttggtaatccgtcactgcataatatggagagtgtatacatcgccaaagattcttctgatctgacattttgaaattgtgagagaaactagatcactgtaaacttggtcacaggcctagttcttgcaattctttgcggactttttactagcattatgccagataaacatgcagtctcagtgtgctctcgcatgtctaaatatctagtcctttctgtggttctcagccaagacataaaaactaggactcagagcacattcgaaaccagttatgtttcggaaagagggaaaagagtccccaagcccggatcttgtgctgcttttctcactttcgggaaaggg

SEQ ID NO: 725818 - DNA, 125 bp, Homo sapiens
ttttaaaagtgggggaaagcagggtggcagctttccagtcaggaggcaaagttttttttgaacaatcaaagcccttggacttttgctttttttactttgaaaaaaaaaatttgttgcccagctga

SEQ ID NO: 725819 - DNA, 750 bp, Homo sapiens
ggctggcgctgagcgtgtgctggtgatgtgctgtgggtgccctgcgggttcgtgtggcaacctgagtgcctgggtcgctggtgatccggcctgccatcgccgctgccgctgcactggagagcccgcgggtgatggagcgggaggcgttgccggtggtggcctcgagccccaggatgtgcagagttctgacgaaatgaggagccccgaagtggtacctcagaggcaacatgagtgagactgacggaagaggaaatttctcagcaagaacggcatgtgggggactatgaagtcgaagacgataccatttgggcttgaaccccagagccctgggtttgagccacaaaagcccagagttttgaaaccccaaagccccagattttgagcctgaaagcccggggtttgagtcccgaagccctgggcttgtgcccccaaagccctgagtttgcacaccagaagccctgaatcagattctcagagcgccatgagtattgaatcacagagacctaggtatgaaccccaaagccctggctatgaacctcggagccccggggtatgaaccccggagacctggctatgaatctgagagctctagatatgaatcccagaacatgagctcagaacccaaagccagaatttgagctcaaagttacaaattccagggaaggtgcggagatgttctgaacccgacgaaaagagtccttgaatatctcgggaaggagtaaccatggatacttcagccaggagtaagag

SEQ ID NO: 725820 - DNA, 152 bp, Homo sapiens
tcctggaccacggctagagttcccagtttggccttaaagggcattcatcccatctacttaatttaaatctttaccttcctggtccttcctcagatgggtgagctggagctacttttcccccaccacttgtaggggactgctgctctgtgtct

SEQ ID NO: 725821 - DNA, 541 bp, Homo sapiens
ggaaggcctggccaggacgtgaaggaacatgagcgagagcacaatcgcgatatgcgctgacgccaatgatccagtacaggagagtgggcttagcttacaataccgtggacaatattccaacatggtgcgaagagtacagatcacagctctagctcattctggaccaaggccatgcacagcaacttcctcctgaggacttaatcctcagacatatttttgtagacgaactgtaagacttaagtaatccagtgaaagcagccttacatatgcttaacactaatgaggacaatattgttgcatacatctactagaaaccaagcggcacaatcctggttgagccgaagtgtcaactagatgatctagcgaatgatctgcatattgagattgatttaagtccaactttgtatgaccaataaatgggtcagttgttgtcacgtgttcattcaccatcaattttttgaactttttacagagtgagtgttaccagatgtacaccaggtatcgtgtaaataccctcaagtagcttaatttactttttttg

SEQ ID NO: 725822 - DNA, 794 bp, Homo sapiens
gcttctaagaatattattacactagattactaactgtttgcgagctaaccgcataagtgcaagcaaggtaacttacagaaaactgaacgcggaaagctacatggggatgggactctctagtagtccccagtgcgaatgtgttagtagcattgggacactgattctgtacgtactatataaacttgtcataatatgaagagatatacaataagggtgtgctgtatatgtaagcgccgttacgcgaatggagcccccatcaaaggagacatactggggcctacaaatgaggtaatgatgatggcttctccttctgtaacttaatacaatgcgagacccctacatctctgcggacccttatggagtgcatgtagcgcatgagacggtaatgtacgcatctagaagacgcaactatatgatcaagactcaatatataccgtgggtatgagcaactgaaaatttgtgctacagagaacaggcggtggtggaccttcatggagccattatgggttctccaagggagtacggaatcccctggaatccacacagactcaccagtcaagagcagcaacgaggaagagagagagcctcacatgggtggagagagtgcctgccagagcgtacagttcgctcacacaaactgaatctccgcctcctcacagttgtcatgtaaaccccttgaagaggtgaggggcctagggagccgcatcttgtcatgtagcatcaatagtgtacctgtgctcaatatgatgcaaatggggggcccgttgcggactgaaatataattttttgaaaaa

SEQ ID NO: 725823 - DNA, 245 bp, Homo sapiens
tttcctaaaacctcctaagaagtgttaattattacagcacaaccttatgcattacgggggaaaaaaagcagcagcccaggtggaacaacgtgtcatggcacagagagcctcaggtttaagttagaaagacaattcatacactctgtttgtcccaccctcgggggtaagggacagtagttgttttttcttttaaaaaatttccgggccacgcacgatggttcatgcgtgtaaccccagcatttgga

SEQ ID NO: 725824 - DNA, 502 bp, Homo sapiens
  misc_feature (339)..(339): n is a, c, g, or t
  misc_feature (502)..(502): n is a, c, g, or t
taaaaaaaattatttttttttgtaacacccttatgtgtatatatctctcccatatattgtgtgtgtttttcaaaaaattttttataaaaaacccatatataaattctataccttctctacaaatatgaggcgttttatataagaaatttttatatataagaaaaagaaagagtgtgttctctctacttatatatatctctcttatatatagaccacacacactctgctgtgtgtctcctctctctgtgatgaagaacacatctcgcatatatatatttttatatatatatctctctactacaacaaaacacaagacacaacagagagagagcggcggcnctctctctctactagtagagtagtatatctctctctctgtgtggggggcgcgcgcacaagatgtctctcgtctcgcgcgtcgtctctcgcccgtgtgtcttgtgtgtgtagtgacaagagagaagagagcgcgtctctcctcatagtgtgtagagagcgtcgn

SEQ ID NO: 725825 - DNA, 130 bp, Homo sapiens
  misc_feature (5)..(5): n is a, c, g, or t
gccgnacctgtggtgtttactgtggaaaaaggttcgcttaacacatggacccgggggagacccccgcgatactacccatcagaagggttcccctattcggtgttcccaaattaggaaccacttagtgtga

SEQ ID NO: 725826 - DNA, 766 bp, Homo sapiens
  misc_feature (385)..(385): n is a, c, g, or t
agcggcatgagacataatctcctggtgtgccatttgctaagactgttggaaaagcacagtattagggtgggagtgtctcgattttccaggtaccctctgtcatggcttcccttggctaggaaagggaattccccaaccccttgtgcttccggcgtgaggtgatgccccaccgtgctctgtgggctgcacccaccgtctgacaagccccagtgaggtgaacccggtacctcagttggaaatgcagaatcacccatcttctgtgtcgctcacactgggagctgtagactggagctcttcctattcggccatcttggaacctccccctgttcagtgttttttgctgttgttgtttttttttttctttttttgggcacggggctcctcnacgtggtgtttaaggcgtggaagtgtgcaagtggtgggtgactcgcgagcctcacttacttctcttggaacctttccgaggcctcaactcgatccttccccacctctcaaaactccgtggagttagcctgtgagaacttaagggccacgtgtgcttaccgagtgttttggggcatattctcttttcttatctctttctctttttaaaattctgtgggggaagaagaattaacttttgtgggccgagtgttgtgcccgagggcgtggctctctcaaacttctcgagggcctcaaagtgtggactcccatctgcggccttgggccttccacaagaggtgggtggggtatattacccggggtggtgaagcccatgtggaattcc

SEQ ID NO: 725827 - DNA, 479 bp, Homo sapiens
agtctctcttgatatttcactagcctctggtatactcaactgtctctgcgggtgatacgacgatctccgggaataatagacaacgagcagtactatcactactgaccacggccgatcgaccagcgaagacatcgaacgtatggtccatgacgctgcagtaagtcacaccgctgcagatgagaagcaaagggacaaggtgtcatccaagagttcacttgagtcctatgccttcaagcagtgaaagcgactgtggacgatcagaaacttcaaggcaaaattaacgatcaggacacacagaagattctggccaagtgtaatgaaatcactcacctgggttgataagaatcagagtgctgagagaggaccaatttgcacatcaacagactagagctgaagacagtctgccaacccatcatgaccaagctgtaccagagtgcaggatgcatggcaggatgcatgcccgggggtcggacgtgggt

SEQ ID NO: 725828 - DNA, 405 bp, Homo sapiens
  misc_feature (47)..(47): n is a, c, g, or t
cgtcggtgttgtgggtagggtcactggctcacatggcattcagtggnactaggttccttccatcttgttgcccaacaacacttagagtgtggttcaatcacccaaagctggtcattggctttttcttgtgtccttgaccatggggaggagaaagagcaagtctaaggcaagcagattatttcaagtaggtgttgtagaaattgcatacgtcacttctattcatattctatatggcataacttagtcatacgggcacaccttaagctgcgggaagtctggggaaattatggtctctatctgggcagccatatgaacagttaaaattctatataaactctgtaacttacagacagagagaatgcagttatggggcaatcagtttgcagtctaaccaaaaacaccttg

SEQ ID NO: 725829 - DNA, 261 bp, Homo sapiens
ccccatctctacaaaaatgacccaggtgtggtggcacactactgtagtgccagctactcaggaggctgaggcagaaaaattacttaagcctgggaggtaagggctgcaatgagctgagattgcaccactgcaccccagcttggttgacagagtgagaccctgtctgaaaaaaaaaaataataataatccatcacatcaacaactaaagaggaaaaacagtcacatgatcatatcagtagctgcagagaaagtatttgccaa

SEQ ID NO: 725830 - DNA, 1582 bp, Homo sapiens
  misc_feature (1582)..(1582): n is a, c, g, or t
tgtgggcaaatgcaaaattttattggtaaaacggtacccattggctttaataaaaaaaaacaccgtcctcagcatcctcaagaaaggggcagctaaacgcttatataaggaggttccgggggtattctggtattggcaactgtacacaaatataaataatgttatcaatatggagggaagaatttacatatatgggcaaaatatcccactatatatgtaaaataccccacgcaaaaagacgccctgtgtgtgggcgctatatatgtgggatatggcgacatgtgagaagggtgccactctattgtggcgaaacacgtggatgtgcgatctggggacaatgtgagaacacagtgtgtgggacatataatctatttctctgtctcacatagaagaatgtggtgtgtctctcaacacacagattgtgtgtgagaccacagtgtgtgtgggcgcgcacaaacattacaactcttcccacacacaaggtctcgccacagtgtgtgtgtgcgcataaggtgtgaagaaaccacctcttgtgagagagagagctctgtgtgtacacagggcgtcttaattctctgtgggggtgcgcccttgaagaagggcgcgtgctctctcttctataaacatctatattctgtgggtcgctctatcacaactctataaaaaaccatctctcactatagtgggcgctctctgtgggacaacgactatacccgcgcttggggcagcacccctatcctcgtgggggggcaccaaagaccttcgttggggcctccaatgtgtcgtccacagagacgacaatataatccccccaccagggggggaatgtgcgctctccctctggtgtggggggaccaccaaacatgggccctatgcgctatgtgttgtgtgcgtctgtgggggggctccctatattcgcacagggttacagaaagataacctctattacaaccaagggtataatgtgtgacataacactgtggtcctcggaagagaaacatctttcaacaagaacacgacacagcaacacgaccactaagacgcaacaggggaggcgcacaaacaaaattttgttaaaaaaaatttctgggagggacaaggtcctcctccatctaaaagtgtgttggcacacaaacaattccgctttttgcaaaaataacaacctgtttcacccacccatttttccgccactaaaaaacgttttttattcacaccgcgttatccctttgtgaagacaccagaaaaacccgttggtgcgaaccttgaaagcacgcaattacactttgtggtgacagaaacaaagtcaatagaggcccccggtggaaaaaaaaaaggtgggggggagaaaaacgagggacccctcaccaatacggggaggcacgtatcagagggaaagggattccacagtatcttcgcgcccgggggagcccctcgtggttgcctctgcaagcccccggggcgcggtcgcaacccacatgccgggggaaacaactttggcgcaccaaacgaaggacacatcgggaggatcccaccccaggagaaaagacagtgagcgaacataagcagagacacaactacactn

SEQ ID NO: 725831 - DNA, 848 bp, Homo sapiens
  misc_feature (162)..(162): n is a, c, g, or t
  misc_feature (165)..(165): n is a, c, g, or t
  misc_feature (195)..(195): n is a, c, g, or t
  misc_feature (283)..(283): n is a, c, g, or t
  misc_feature (515)..(515): n is a, c, g, or t
  misc_feature (840)..(840): n is a, c, g, or t
ccttcctcaaaggtgacattgtcaggaagcttgtaacaaaaggctgcattgtgcttatagaaccggcagaggttcccgtcatcggggggcgtggccagaaggatccttctggccacgcagaacgtgcgtcagcttaggtataaatctggaatggtgctggcngtntctgccctgttgtttcactactcgtctctngtgtcgttgctgtttatctgggcatcgtggtctcgttggctgaagacaagtaatgtcttggttgtcccgtttgtagtatgtgcattgntgtttttactgagtttgaatggtgactactttctcgccaaattgctgtcttatcaggattcagagtctccaaatccgctgtcgggcctgagtaaggtcggggtattattgctgttcgtggcagcgttgttcttttcaaaacttccaaatgcggaaaaaaccaaactcatagtgttaggcgctggtttcaccatttctttttggttggtgtcagcggtgtcgtatgccggttngcgatttttggatttgatatccttcgcctttcccgttgcgattctcttgacctatagccgtctggccttgaaatttgacacaacaatcaaactcgccttcattatggcgggcgttttgagcgcggcgagtggctacaggaattttgtagccgaggagggtattgggccctctccgttcatgccttatcattttatcggctttccctatggagattagagaggcagcctcattctgcatctagtgaacagcagcagagcgtgtatctggctctcgatcattttatattcatgcggtcgtgaagggcctggagacgaagttgtgaantttagtaa

SEQ ID NO: 725832 - DNA, 163 bp, Homo sapiens
agaagagtcactaaagcagttacagaaatgaacggtagaattgtggcacaaagccattgtatgtagctttagcttcagcgcaagaagagcgccaggtcactcactaaccagtatatgcagagaatggcaagtacgagctgttcccaaccctgtaatcaatact

SEQ ID NO: 725833 - DNA, 281 bp, Homo sapiens
  misc_feature (75)..(75): n is a, c, g, or t
gatctgaaggtcctgttttccagcaatgggggcgtcgtcaaaggattcaagtctcttccagaggaccgcaagatnacactgatcccagatgggctccgtcgaggaggcggtcccaggccctcattgacctcacaaccacgacctcggggagaaccaccacctgccgggtctccttctccaagtccaccatctaagggtgcaggccccaacggccgggccccctgggcgaaacattccatcaattccaagagcaaaagcccctctaaaaaccagcttgaggt

SEQ ID NO: 725834 - DNA, 769 bp, Homo sapiens
  misc_feature (83)..(83): n is a, c, g, or t
  misc_feature (86)..(86): n is a, c, g, or t
  misc_feature (116)..(116): n is a, c, g, or t
  misc_feature (204)..(204): n is a, c, g, or t
  misc_feature (436)..(436): n is a, c, g, or t
  misc_feature (761)..(761): n is a, c, g, or t
gttggtcacacagtatgtctccctccttctgcccgcacaagcgttcgctcattctacgtatagtcctaggaatggtgctggcngtntctgccctgttgtttcactactcgtctctngtgtcgttgctgtttatctgggcatcgtggtctcgttggctgaagacaagtaatgtcttggttgtcccgtttgtagtatgtgcattgntgtttttactgagtttgaatggtgactactttctcgccaaattgctgtcttatcaggattcagagtctccaaatccgctgtcgggcctgagtaaggtcggggtattattgctgttcgtggcagcgttgttcttttcaaaacttccaaatgcggaaaaaaccaaactcatagtgttaggcgctggtttcaccatttctttttggttggtgtcagcggtgtcgtatgccggttngcgatttttggatttgatatccttcgcctttcccgttgcgattctcttgacctatagccgtctggccttgaaatttgacacaacaatcaaactcgccttcattatggcgggcgttttgagcgcggcgagtggctacaggaattttgtagccgaggagggtattgggccctctccgttcatgccttatcattttatcggctttccctatggagattagagaggcagcctcattctgcatctagtgaacagcagcagagcgtgtatctggctctcgatcattttatattcatgcggtcgtgaagggcctggagacgaagttgtgaantttagtaa

SEQ ID NO: 725835 - DNA, 112 bp, Homo sapiens
ctagaggatcccatatttctcatcgccagcaaagagcttgagttgatcaccctgacagtgggcttcggcatcctcatcttctccctcatcgtcacctactgcatcagcctga

SEQ ID NO: 725836 - DNA, 303 bp, Homo sapiens
  misc_feature (103)..(103): n is a, c, g, or t
caagttccagaagagggggtctcccggaaactttgagtctggtgataagaaatcctgccgcgagattattccccagtcaggagagcgccacttacgtagtganggatcgaggattgtaaggaggaatttaggagtgcagaaatttgacctggggatcatctgtgttgacaacaagaatattcagcacattaatagaatctacagagatagaaatgtcccaaccgatgtgctttcttctccatttcatgagcatctgaaagcaggtgaatttccccagcctgattctccagatgactacgattt

SEQ ID NO: 725837 - DNA, 106 bp, Homo sapiens
atagaatgagccggctccggtttggcactaccgcaaccgtgatttcttcggtttggggacggcctgaatctggcggtgcagtaccaggtaaaaacgatggcgacgg

SEQ ID NO: 725838 - DNA, 321 bp, Homo sapiens
  misc_feature (21)..(21): n is a, c, g, or t
  misc_feature (54)..(55): n is a, c, g, or t
  misc_feature (59)..(60): n is a, c, g, or t
  misc_feature (94)..(97): n is a, c, g, or t
  misc_feature (101)..(101): n is a, c, g, or t
  misc_feature (105)..(105): n is a, c, g, or t
  misc_feature (109)..(109): n is a, c, g, or t
  misc_feature (129)..(129): n is a, c, g, or t
  misc_feature (143)..(143): n is a, c, g, or t
  misc_feature (155)..(156): n is a, c, g, or t
  misc_feature (178)..(179): n is a, c, g, or t
  misc_feature (221)..(221): n is a, c, g, or t
  misc_feature (231)..(231): n is a, c, g, or t
  misc_feature (262)..(262): n is a, c, g, or t
  misc_feature (270)..(270): n is a, c, g, or t
  misc_feature (284)..(284): n is a, c, g, or t
  misc_feature (295)..(295): n is a, c, g, or t
  misc_feature (298)..(299): n is a, c, g, or t
  misc_feature (320)..(320): n is a, c, g, or t
caaagtagtatgtacatgacnattgcacttaaccaaaactattgtgtaaaacannattnnattcctcgagggttttaatttacactagtatttnnnnagantatntgtntaggtgatttaatggtactntaatactactaagnatattggctatnncaatgtaagctataaggtggtnnattcctaagggtatttatagttgatgataacatgaaactganataagataanatacaacgtgctaaatcttttatgtattctnactttaanagacaagtgcacanagttagactgnctnntatatgtgctcttaacttgana

SEQ ID NO: 725839 - DNA, 149 bp, Homo sapiens
attccgtctggctgatgtccatgggctcctggtaggctgaccgggaatgagtcaagtgatgcgcttctggtcgtcaccggtggccacctcggccaggtaggggtagtagtcacccttcatcttcaggtacaagacccggctctcggcgt

SEQ ID NO: 725840 - DNA, 371 bp, Homo sapiens
cttggtgcagtggataacaagcagaagccagttatgatgacaggtgatagatcctgaataagtgcacatttgttaaaattagaccattactaaaccatccgctaaagaaaatcatatatggggtcacaccatcctcacggtagtccaatagagcaaccatgccatctggattcatgttttcaccaataaagaactggtagtttttgaaattagcaaggatgtgcttgatttgttctgcagcccctgtcataaaaggttttactctttctggtctctgttcttcaagtttccctttgattgatttcatgtaatctttgatgtacttcttgtaggcttcttttgtgaaacttgtttcctgcaggtgatggttc

SEQ ID NO: 725841 - DNA, 520 bp, Homo sapiens
  misc_feature (446)..(446): n is a, c, g, or t
cacgagctcgtggtctgtacacaccgccggcgggagcgtgaacgcgcctctagagctctgagacgttcttgcgcttttagggccagaggaggatccccattaacacagggcaccaagggacccacatggctggttatataccattaacaaagaagaacacacactgtgaaacattattaaatcacaacttctaaaagacaccgcaagggctaattgctggctacaaaggcccccacacccttggagcacaagagcattattcgagtgcagaccacaccggactacaggccccaagaaggctttaccaacggcattacacgagctcataagagagctgtgcctgtttgaagaacgctcttgggtgggcatgacacagccgaaggtgagtaagggcccgctctaaggaccacacacgaggagagcgcgcgcgcccagacatgggccgncttgtggccaacccttaactgagaccgacctggtgtgccccttacactgagaccgacatgtgctgtgcataggt

SEQ ID NO: 725842 - DNA, 155 bp, Homo sapiens
cccatccccaacaccccagcccttgcaatctccaatctacttttttgttctataaatttgcctgttcttgtcatttgagtataattttaatattttatgactagctcctttgatgtagcttaatgttttcaaggtttatctgtgttgggcgataa

SEQ ID NO: 725843 - DNA, 464 bp, Homo sapiens
gctctttcacgatccttatgttggctggtggacacggcagcgttatgtgagtggatagtgaagtccctgacgcggagctccgtggccaagctcattctggtgtggctcagggccatctgtgctgttctgctggttctagtgtgtacctgctcagagtggcatgcaaggtctacaacatccacactagccctggcagacagtatggtgcgctgtgcggaccacgcgccttggaaagagaccaacatggcgcgcaaccagatcctctgaagacacctggagttgccacagggtcacgtggaccggccgcttcaagtacgtccgcgtgactgacatcgacaaaagcgccgagtatgccatcaacatgctcccgttcttcatcggcgactggatgcgctgcctttacggggagggctaccctgccgtgcagcccttggaacacctccacggccgcggaggagctctgt

SEQ ID NO: 725844 - DNA, 394 bp, Homo sapiens
gatgtgaatccacacagagttgtatccttctttcagtcagtgttgctccggccggcatatgcattccttaggccgctaggtatacgtacagcagtagatgccactcatgagaatgggtacgactgcttatagtcctttcgccctgcagtttgggtaaaccatcgttcggtgttttgtgattgtctcggccttcagggcgtgcagctctgctgtcgcagcgtggtgatcggttcatttctatatagccataggtatctcccgggcgcttaggtctaggactattactgtttgtggtttatgggtcgtctggggccgtattgccagtctttgtgtttggtttaaaagccaaaataagaaaaagcagcgtttttcaattaaaaaagaattaaaaaaa

SEQ ID NO: 725845 - DNA, 966 bp, Homo sapiens
gcgatgggcggggcaggcgcgcggggattggcgggatgcggcgcgccgagcgtgcaacctccttggacctgtggcgcacgctgtgtggacccaagccaagtccaggcagtgtggcccatgttttctgagccaggctgcccagcagggcccaacaactcatactgtccccagcatcatgccaacaatgccagcttatgcccggtgtgccagtggcaaacctacaccaactcctcacaacccttccggctaggcagagcgcagctataagccggcaagatatgcccaacattatatgccaaccggcactcatccaaatgagacccttcctggagaaccggggacccagcagacaatggaggacaagtgggcagtaggggaagtgaagcacagctggtgtagaaaaatgggaagggctatgaaagcaaaaagtggcaagaagtaggtaggggcaaatcatagaacacaggagccaattggccggaatagcaaaacacatacaaacgctggccaggggaaagaggtcaagacagacggacgaccaacaacgcctggatcccaccaccaagaccaacaattcggacaagaataaaatatagaattaaaaggcgacaagaaatggaagagaaggaataggagaacagttggggaaaggaaatggaaaacgtggaaagagaggaatattagcaaaaaattaaaaagaaggggtcaaacaccaaaacacggacccagcgctgaacccaaaacaaagagaatagggaagatataagctaggaggaggaaaatcaatatagataacacaatttggggagattatggagaaggtatcaagcggcggaagatataaccaaggattgaaatggagaaaaaaaagatgagaacagaacgagagaaaaaagagcggataagaacaaactgtagggagattagaggaaatatgtaaaaagcattaagagatatagggcgtag

SEQ ID NO: 725846 - DNA, 1196 bp, Homo sapiens
ctatgggcttttgcagagacatttttccacgggatgtctttgtaccctccctctttttatcccctctttctcctcgagaattatgtttccgtgattgtgtcccccggcttcaatgagtggaccactggtgtgttcttcaagggttcctttacacggttttttcgcggtggctccttttttgttggggccgctgtccacgtgtttctattgccccggaagaatggggcaagttctatgataatattctctggggccaacaggggcttttttggtttctcaccgtggggtctttaggtaaccgttctctgtcctttggtttatgccccccgtgatttggtggaaaaatccgattttaaggggctttgaatggtctcctcttcaaatgggggaactctgtgctctacctgtcccacttattttgggggagcccacacccacaaaaaaggggccgggcccccaacccaagtcaccccacaacccccccactgcggccacagacaattcttttgtccctcggaacacacacctgggcccttgggaggaccaccgcggggggacataactggaaatggggagacccccacgagccctcatattaccgggtttttgccccccagaatgttctggaagatatggtttgtgccgctggatgacccgcgttgtgaagaattgggaggccccactgtgccccagggagactctgtgccggggctgcaaatttcaccggggccttcaagcaattgtgaaagcttgaaacgaggcccctttctcttgaaacacccccggatctttccttcgaccacccattccaagaggccaccctcgggaccacagagacccctcggggcacggccacataaggggggaaggcgcaacacccactgggtgcacatgggaaggggccacgggcttgaagccgcgcgggttccttcctgaagcccggcaagaagggttgaagccttcacacacagccccttcttctggagggcctctttttaggggatagtttttttataaagcccagatagtttttaaaagcgaaatagtgtggtttcccctccatggtgaccgtgaggccaggacaccagtgcggttttacactccagcccagtccagtatagttcttgcatactgtaatttatattgcccttgggacacatggggccatatttagctacttaaaagcttttccacca

SEQ ID NO: 725847 - DNA, 346 bp, Homo sapiens
gaagaatgggttaaaaaagaaaaaagatggatccaaacttccaactacgggttctgggccaggaaaacttcataagagatgaaagccgccatcatcataattcattcggcaaaataatccacgcttaaacgaatgactttaatagtgcagcatgtgctatgtattcggcttccaggtggagctggtcccagccctggtgggggtttcattaacgggggtggatccaacttgaaaatgagtgggaatccgggtgacccacctgggcaggatcggcggtctgaggcggcagtgaagcccatctcacactcgcagcgatatgcaccggggacattaagactaaatgtgc

SEQ ID NO: 725848 - DNA, 389 bp, Homo sapiens
  misc_feature (215)..(215): n is a, c, g, or t
  misc_feature (304)..(304): n is a, c, g, or t
gtgtcacgtctcacaaaacagtgtctatcactaacaaaaaaaacgttaggtaaaaattttagcactctttttattttgtacatttactcgggacctgtgagaatggttgtcagaccaagtgataaatatctggtccctggtaaaataaacgattaaatagcaaacagtgtaagtagaagcagtaactcatacttaattctaaaacagaatccatngatgtgacagtattgaaatggctagaatataggatacaaggcattcctgatgctctccatcccaagggatagctgttagacacatagtnggggtaaataaagagcaaaaagcctaatggatttattattttggctcatcagaatgcttttctagtcgggtacagttgacactca

SEQ ID NO: 725849 - DNA, 999 bp, Homo sapiens
acccacgcgtacgcccacgcgtcgcggacgcgtgggtcgacccacgcgtccggtgaaaagcctagagatcgcccgtgcgcccctgggtgctgtgcacgccgccgtcttgcctgccctgaggcacgtgcctcgggatccgcgtgcacctcgtgggacccaggaggtgccccctgcctagtccctgccagccatggagctgctctcgtcgccaggacgtgtcatgatgcaactgtacgcgccggcgcagccaggccgctcgtcaacccggaaggagtccctactccctcgtggcgctcgcaagcaaaagtgacaacactgactcgtgaaggcagacaaagatgagaagaataagatggcggcgggtgggctccatagagaccaatctcctacttgcgcagtggtgcgcctcgaagcggctgttgccgcttgtgtacgctccacgctttctctccggtgtcctagacgcgttcggcgcccgcgataatagaccgagagtcaacgagatctctctatatagagagcatagcgagctgacatgagacaccagacacagtataaaacaaaaccggggcgcgaggcagcagtctgggtgtagaagaaagcatcttgcgccccaactcgcgatgggggggcgaccccccaaagggcgtgagaccacggggggagcacacactacaagggtctctctgcgtggcggtgcgtacggaccaatttagggttcggcgaacaaaacggcgcgaccctaatacccaggagaaaggactaccacaaaaggcgccccaaagggggggtagaccttgttttacacacaatcttgtcacagcgtgggtattgaacagggtgggtttacgaccaaaacgaggggggaatattcgcttgggggcctggcacttacgacagaacggttaacggacgtcgacacgggagaccaaatacagctttggactgcaaaacatttaatcataacacacacagggacacaaagggataacataaagg

SEQ ID NO: 725850 - DNA, 271 bp, Homo sapiens
  misc_feature (37)..(37): n is a, c, g, or t
  misc_feature (40)..(40): n is a, c, g, or t
tttggaaaggggcccttattaacattttaaaaggggnggnggggttttcaaggatttcctgtttttttcaggctcctaaagaaacatcagccatttttagatgggttttgttttggtcccttcccccgggcctcaagtgagccaaaaaacactgcctgccctctgtttgttttttcctaattttgcagggggaggttgctagtctagtttcctttttgaaaaactattttcatttttgtgaccctctttgtaataaaatggtacattttta

SEQ ID NO: 725851 - DNA, 987 bp, Homo sapiens
acccacgcgtacgcccacgcgtcgcggacgcgtgggtcgacccacgcgtccggacccacgcgtccgcggacgcgttgggtcgcggccgtcgtgcgcgtcgacggacagctgtgggtcgaatcagcacagtggcccgggcattgtagaacttgaaactagattgtgtaccctgcttaattaacacaatgtagagtcagtgttgacaaagtcagcatctaggccattagtctttacctagacatagcataaacttatgtaacataggtacataatataagagtaacggtacttctctagacaccagcaaagactgatagatggttgtaccactaatgaattcttacaaacacattactggcacatagctgcactaaacctaagtctatactatataactatactataggcaactttgctcgataaaaaccctcatagcctaagactcagatccctgtaccctacatctaccagtttcctaatcaattcacccatatttcactggtgcaacgacaccttcactagtccaccagttgatacaagaaactgactgtataacaccagaaactagatcttcaagggctaaaccgtattcgactatacagatacggccaagtatgaatgaccaagctaccaacactaaacaactgacatgtatacactgctttaaacgctagaggagtaaaagtcctaagacacgtacggcaagagccagcattaagagcccttggacaccaagcacaaactacctagtggcacttccacagtgcagcaaacctgcacagcacggcactaagcaagctacacctaatggtaaacagcacactccaaggaccacaactacagacctagatgttgttaccaaacacacgggcatacagtgagcatgcttcacaacacccaacaaacgtaatgaccattaacagacacattcaccgtcacgagtgagcacggtgacgtaacacagcgtctgtcaccgagaatgatccc

SEQ ID NO: 725852 - DNA, 321 bp, Homo sapiens
  misc_feature (36)..(36): n is a, c, g, or t
gtcggtaccgaaaacgatagaggcaggaggatcacnttgaactgggagtttgagatgctgcagtgtgccatgattgtgccgctgcactccagcctgggtgacagagcaagactctgtctttaaatttaaaaaaaaaagaaaagaaaaaaaatggtgtcctgtggaagagaaaaaggtacatggtagataagtcagaaggaggggggaacaactggcaaaaaagctcacctacgggttatatctgaaatatgaatgtctgacggtcttggctttctgatttattggctgcaatagagttaggaaacagctctgaataacccg

SEQ ID NO: 725853 - DNA, 299 bp, Homo sapiens
  misc_feature (110)..(110): n is a, c, g, or t
  misc_feature (139)..(139): n is a, c, g, or t
  misc_feature (149)..(149): n is a, c, g, or t
  misc_feature (189)..(189): n is a, c, g, or t
  misc_feature (251)..(251): n is a, c, g, or t
  misc_feature (263)..(263): n is a, c, g, or t
gtatgcctatatggtcaaggtacttagcacagtgcctggcatggagtaggtagcccacatctgaaaccttttttttggaggttttttgtttcagtgaaaagtctttcttntgggcccctgcctttcatccttttttccntcgtggcttngtcttcttattgacgttgtaaaccgttctttacatatccntttattttttggaccacgtgcaaagtgagcctttctttgcaatggacggagacgagactganaatgtgttctcntttatgttttcttttcttttatttttattttttttt

SEQ ID NO: 725854 - DNA, 538 bp, Homo sapiens
aacgattggtcctcatgcttcccgatagctgggaacaggaatgcaccaccatgcccaggtaagtttttggtagagggggtgtcttgtcgcatgttggccaggttggtctcaaattcctggcctcaagcaatcttccggcctctgcctcccaaagtgctgggattagaggcatgagccagtgtgcccagctgaaatgagtttactgtatcaattgcagacctatgcttctgtgactaaagttgatcgaggggtcattatgaaaggaacggggtttgctagctgactacagatataatatcatctagcaacctatgtggttgtgaacttagctgtccggtctttggctggtttgacatcgatctgagtcccacaccattgagacagaatcattcttggcttcctctccagtcaacagttcacagccatggactgcaggacactccggcttgagaacacttgaaagtggcgcattgcgcatcttgtagatggttccgtgccaccaaggtggtgaggaatccgaaaaatgtgacgagagaag

SEQ ID NO: 725855 - DNA, 531 bp, Homo sapiens
gaggtctgcagcgaattaggcacgaggctgggccttaaaagtaggttgctacattattatatcctcttcctcgtcatactgcccaatacctcatactaccctatttgtcctacgcagatgtcataatcatcacacagacacccacatgcctacctatgtcatggctgtcacgtttacattcttgacagcttcgagaaccttccactataccttcacttggccactccttatgcttctccatttaaaaccctttcacttacactcttcccaactcatgatcagccacatccctgccctaaccaccctttccctgcttcactccctctagcgaagcgtgactgtctgacttctctacacccccactactttcgggatcccaacccattacaaagtgcccaactatacctttcctacccccacctactgctcgggccagcgcagtctgccacacgaacgctggactgacaggacttgggacactggtggcttggtccaccttgcattaccattcccttcgccccttcttcttcg

SEQ ID NO: 725856 - DNA, 418 bp, Homo sapiens
tccatcgtggcttttactatctgcaccatgtctgctgccttactcaactccctctgcgtcacttgcccactatgccaatatgcatagtggcatcggccaaggatacaacacgagacagccatacagcagctactctaggcagaggtttaacaaaggtttttatctgcaaaaaccttgcggtctatgccaacactggagagaacactgtagatggtgacgtatgtaaatggaagagatctggggcccagagatatgaagattagataggagaatggacattagggtacaagttcatgtacaagtgggtcaaaagttaaaaaagaaagagtagaagcgataaggtagacaagtgtgatgctctcaagaatgaggaagaaaagacaaattatgtgtgcctacttggccttgccatatgcaa

SEQ ID NO: 725857 - DNA, 172 bp, Homo sapiens
gatatcccctgagagacactggatgacgctcatgcacggatcttccagcccaggagttagtctacgcataaagctaatgctttctgtgatgaactgttggaagaagaccctgtgtgaaacaggtcttgactgggacccacctggcgcagaccctgacaatccacctcatgcg

SEQ ID NO: 725858 - DNA, 363 bp, Homo sapiens
  misc_feature (116)..(116): n is a, c, g, or t
gagtgggcttttccgcaagaagcctagttgactcctggccgccttcctcactcgggagtctgggcaacctgcggtcattggcagttcaaggtctcatgagaggagtggattttttngtgcgaagcactgaccctaagccaggagacacactgctagggaggcaggctcgccgcctcatcttggcctccaggtacttatcttcgccaagctctttcgcgcacacgtggtccctttaattccccacaagaattttccacaacgaccctttttttcttttcttttctttctttctttcttttttcttttttaaatacggacgccttctgtcgcccaggctggagcgcaatggctcaagatcacagc

SEQ ID NO: 725859 - DNA, 342 bp, Homo sapiens
acgtcaatccagatcttctaagtcatcatctagttatcagctacagcagcctcccaagtccaggaaacctcatttgtttgtccagcctgggtcacaagagcaaaactccatctcaaaaaaaaaaaaaatttaaaattttagtggttttttggggggtgtcccatttggatccccttcatctttccttctctatttgtaagggtttttttcttaaggggtatttccagtctaagtgggctcacactcaatagtctcagcacttggggaggctgaggtgggagaatcattggaggccagcagtttaagaccagcctgggcaatatcagggtgagacctgtctct

SEQ ID NO: 725860 - DNA, 393 bp, Homo sapiens
tcctagcctcgtacagtgctctcctggccctgaaggtgccactccagtgcccaccagccttgtcctaataaaattaagttgtatcatttaaaaaaaaaaaaaaaaaaaaaaaaaaaaaaaaaaaaaaaaaaaaaaaaaaaaaaaaaaaaaaaaaaaaaaaaaaaaaaaaaaaaaaaaaaaaaaaaaaaaaaaaaaaaagaagtctgtggcagcggcccccggggaacgccagatgaaaagcaacagtagcgaaacacctaacaggggagggtggaccgagccaccccacaccggagacacacaagaagccagggaagcaaagtaggcgcacacagcgggggcacatggcaggcgaaaacgagacagggcgggcagaccacccagaagtagaag

SEQ ID NO: 725861 - DNA, 817 bp, Homo sapiens
tatgtgcagtgccgtcgtgtggggggcagctgtgctttctaggtgccgatatagcatcctgtgaccccgtcgcgccgagtgcctctcctgtgcctgaaggtgccactccagtgcccaccagccttgtcctaataaaattaagttgtatcatttaaaaaaaaaaaaaaaaaaaaaaaaaaaaaaaaaaaaaaaaaaaaaaaaaaaaaaaaaaaaaaaaaaaattttgggggggggggggcccccagaaaaaggctcataaagaaaccaatcggggagggcagggggacccataggcgagaaacaaagggggaaaaaaggtgtccaaagagaaacagcgggggcaaaaacgagggggggtgttaccaccacaaaaagacagcccgaggggaaaaacaagaggaggtacttatcgaaaaaaacaccagccaacaagggcggactactcagtaggaggaaccaccaccgagggaggcctaacatacacacgagggggcgcgcacacagagagaggaggatgcacgatatataaaaaaaaataatacagcgccccgctgcctgtggtgtggttcacagccagagagacaacgaaaaggggagacggggagaggagcgagggaccgaggaacggacagaagaggagcgacgcgaagaagaaagacaaaaaggaggagggaagggagggaggaggaggagagagcgctgacggagaagagcgcgcgcgaaaagagggggacggaagcacggaggggggaagaggaccagggggagaacgagagagaaggacgaggagagaggaaaacagagagcaagagcgcag

SEQ ID NO: 725862 - DNA, 526 bp, Homo sapiens
tcctagcctcgtacagtgctctcctggccctgaaggtgccactccagtgcccaccagccttgtcctaataaaattaagttgtatcatttaaaaaaaaaaaaaaaaaaaaaaaaaaaaaaaaaaaaaaaaaaaaaaaaaaaaaaaaaaaaaaaaaaaaaaaaaaaaaaaaaaaaaaaaaaaaaaaaaaaaaacaaaaaaacaaaaaaaaaaaaaaaaaaaaaaaaaaaaaaaaaaagagggagagcgcggcgcggcgagcgcgcgcgcgccgaaaaaaaaacgaaaacacacaacgacacgacggcgggggggggcggcgcacagcagagcagggggaggaggagcgagcggctgcgcgactggaaaaaacagcgagagcgagagaagcagagcagagcaggggagagagaataccaacaaaaaaagacaccgacgcggggaagcgggagagaagaggaaagaacgaacacaaacacacaaggcacgaggggggcgaagcagagagagggggtggacaagcgaagcg

SEQ ID NO: 725863 - DNA, 127 bp, Homo sapiens
  misc_feature (82)..(82): n is a, c, g, or t
aggtccgtttcagtgcccactttagatgtatctgattctcctgactgattcttcccacgggacgtgtggagagtcttgcgcncatgattccctgttcctaccaataacgtacaataaaaacataacc

SEQ ID NO: 725864 - DNA, 590 bp, Homo sapiens
tatgtgcagtgccgtcgtgtggggggcagctgtgctttctaggtgccgatatagcatcctgtgaccccgtcgcgccgagtgcctctcctgtgcctgaaggtgccactccagtgcccaccagccttgtcctaataaaattaagttgtatcatttaaaaaaaaaaaaaaaaaaaaaaaaaaaaaaaaaaaaaaaaaaaaaaaaaaaaaaaaaaaaaaaaaaaaaaaaaaaaaaaaaaaaaaaaaaaaaaaaaaaaaacaaaaaaacaaaaaaaaaaaaaaaaaaaaaaaaaaaaaaaaaaagagggagagcgcggcgcggcgagcgcgcgcgcgccgaaaaaaaaacgaaaacacacaacgacacgacggcgggggggggcggcgcacagcagagcagggggaggaggagcgagcggctgcgcgactggaaaaaacagcgagagcgagagaagcagagcagagcaggggagagagaataccaacaaaaaaagacaccgacgcggggaagcgggagagaagaggaaagaacgaacacaaacacacaaggcacgaggggggcgaagcagagagagggggtggacaagcgaagcg

SEQ ID NO: 725865 - DNA, 105 bp, Homo sapiens
aactagaggatccgtgcttacttgaggcaggagggtgtttcttctaccaactcactctgttctcctcccaggatgacattattgacgatgtggagagttttgttg

SEQ ID NO: 725866 - DNA, 410 bp, Homo sapiens
gactcgtgatccacccactcggctcccaaagttctggggcttacaggcatgagccaccacaccgggcttgggattattttctttctttcttgggtttggttttggtttgggagacagagtctcactctcacccaggctggagtgcactggagcgatctagtcttacggcaacctctgcctcttgggtacagatgctcctcatgcctcagcctcccaaggaggttggattacgtggggtggtgcacgacggggggataattgtggtattattatgtggtgtggtggtggtggtggttgtctgcggcgtcagagtctcattatgtcaccgaggctgtggtggggtggtgccatgtcggatcatattaacttctgcctggtgggttcaagcaatgctgcctcagcctcccaag

SEQ ID NO: 725867 - DNA, 182 bp, Homo sapiens
atgtattaggccctagtcactaagcctaattagtactattaaaagaacagtcttgattatttgattcttggttagagagacactgattggcagcacttatatatgcaatcaaaggccacctgaggtgtatactacttggggattccgtgcacgttaacgattactaggactatgcagaaacc

SEQ ID NO: 725868 - DNA, 144 bp, Homo sapiens
gctggttgaaagtacaggtctttttcaaaatggagtctcttatgtcttccctttctatgtagacacagtaacagtctgatctctctttcttttccctacatatcccccttttcgttttggcaaaaccaccaccatcatcatggc

SEQ ID NO: 725869 - DNA, 122 bp, Homo sapiens
  misc_feature (76)..(76): n is a, c, g, or t
  misc_feature (90)..(90): n is a, c, g, or t
atcagctgcctcgagtgtagccgctgcttccggcagagggggtctctggttatcccacaggtgtagacacacaggngaaaagtcccaccngtgctctagttgtggaggttgcttcgactccc

SEQ ID NO: 725870 - DNA, 699 bp, Homo sapiens
  misc_feature (73)..(73): n is a, c, g, or t
  misc_feature (108)..(108): n is a, c, g, or t
  misc_feature (162)..(162): n is a, c, g, or t
  misc_feature (202)..(202): n is a, c, g, or t
  misc_feature (551)..(551): n is a, c, g, or t
  misc_feature (560)..(560): n is a, c, g, or t
  misc_feature (569)..(569): n is a, c, g, or t
  misc_feature (573)..(573): n is a, c, g, or t
  misc_feature (599)..(599): n is a, c, g, or t
  misc_feature (604)..(605): n is a, c, g, or t
  misc_feature (630)..(630): n is a, c, g, or t
  misc_feature (637)..(637): n is a, c, g, or t
  misc_feature (641)..(641): n is a, c, g, or t
  misc_feature (644)..(644): n is a, c, g, or t
gtatcatttccgcaaggacccttggaaggcggggtgggcagagcttcagactatggaataaaactgcaatccntgcgtcccaacctgaggaccagatcttgtatcaanctgaccggtacaatgagagacccttggctaacgaggtgcccatcaaagaggagngggactacgtgctggtcttgaaatttgcagaggtctactntgcacagtcccagcaaaaggtatttgatgtacgattgaatggccacgtcgtggtgagggacttggatatctttgatcgtgttgggcatagcacagctcacgatgaaattatacctatgagcatcagaaaggggaagctgagtgtccagggggaggtgtccaccttcacagggaaactctacattgagtttgtcaaggggtactatgacaatcccaaggtctgtgcactctacatcatggctgggacagtggatgatgtaccaaagcttcagcctcatccgggattggagaagaaagaagaggaagaagaagaagaagaatatgatgaagggtctaatctcaaaaaacgnaccattaanaacgggtgncgtncgggccccggcacacccaacctctgnccgcnnacacgacgatcctgattttccctantggtggncttnggngtttttcttccaaccctcttctgcctctgccggttgtgagaacaaatgactatct

SEQ ID NO: 725871 - DNA, 179 bp, Homo sapiens
  misc_feature (29)..(29): n is a, c, g, or t
  misc_feature (151)..(151): n is a, c, g, or t
  misc_feature (167)..(167): n is a, c, g, or t
gacctacttgggaggctgaggcgggacanttgcttgaacccaggaagcagaagttgtagtgagccaagaccgcaccattgcgttccggcctgggcaataagagcaaaactcccgtttcaaaaaaaaaaaattgggccaaaatatgggtggncgtgcatctgtaagtncccagcctaatt

SEQ ID NO: 725872 - DNA, 966 bp, Homo sapiens
  misc_feature (966)..(966): n is a, c, g, or t
tacgggcatatagtcgacccacgcctcgcccacgcgtcgggcacgcgtcgagaaagtgtccaccccgtagtgactacactctgtctttgcctcaagcggcagcagcaaaggcctctgaactactgaggacttcggacctgttgtggggacccaggctccgccttagttccccaaattctgacccctggttctggcccgcaagcgccaaatgggggacagtgcctcagcgtatatccaaaagcccttagggtccccggtccccgcagtacaagccgatgtacaacgcaaggaatatatccaaggttgaaaaccaagggctatttagccccaaagcgtgtatacacaaattagggagcacaatattaccccagaaaatgccaaccagggcaccacagtgacaacacctgacaaacttaggctccaaaaattacacaactatataaagggccccgagaacccttataaaaaacccgagattgccctccacgaggaaaaccagtgtgtaccaagagagagcaatagacacagatataacaaagaggagacgaaacacaaaagttagaacaagacaaaaagaagaggaaaaacaataaaacaccacagaaagatgagaagtaagagaaaagagaaaataaagaacaagaggaacaaaaaaagaagcaatatgtaaagaagccaaatatgtgagatatataaaaagcaaaacagagactgataaatattaaaattatatcattacgatcacacctcctacaaacaccctcccacagcaccacaaaataaaaaaaagaaaaaaaaaatctcacataccacacacacagatacaaaaacttccaatcaatctcttacatcctctaacataacaatatacatcacattgactgtcacacacaatactaagtataaaacctccactcataacacatagaatacacaatcaaaagcaatcgcacctcccatcttccn

SEQ ID NO: 725873 - DNA, 1048 bp, Homo sapiens
aaggagaattcccgctgatccaagcctgtatcagatttattacatacttttctcctgaaagcagttaagatccatactttgaactgacatatttatttccattcgtgtgctaaggataatggtatccaccctcgatgcaatccgatccttgtgttagcttagggtggaatgtgatgttcagcagaaaactagcagcagactgaccatacggttgatacttggtaacatggccacatgtgatgacagttgagagaatatgctattgcatgagagtaaagttcctaatgtatgttgaatattgtcgagacttggatatggctagtcacgaatgattgctatgtgaaggtaagtgatcaaagatgtatattgatggtgtagattgggagtcaacagatgttgcgatgtattatctatgtagacagatttaatattccatgcactgccgaaatccttcctctacgcatactccagaagggggccatttgatgatggcattgcatgaacctcgtgggggaatatggatctttaaatgcctgagacagggatataggaaaatctggtaggagtctggcaagtgagctggagacgaggtaggattgatgtgtattgggaatgaaagtctgtgaagaagaaggtttatagagagatctatagttcgtggccggcgaagacaagaatcaaaaaaaaaaaaaaaaaaaacgattgtgcaagacgcgccaagtcgcacatctcgaaacagatacgactagaaacaactcggtctagacagacgaaggcacaccacagagaaagcacacagcggcgcgtacggcagcctccccacaagagaaacactgtggatagaaaccaaatgtggtgaggagcgcgcgcccaaagaatacacgcacgagggcagacacgaggtgcagtaaagcaaacacggagagagaaaggacggaggtggggccacaaaaaagaggacgccgaggggacgcaagatttaatacacgcgagggggggtacggcgaaacggacataaaggggggcgggacgataagggggggggggc

SEQ ID NO: 725874 - DNA, 417 bp, Homo sapiens
ggtcgacaaagtgctgagattataggcgtgacacgcatgcctggcaatcacacttaatttttaacctttgctgattttgttacagtaggtagctagtcagacatgaacagggcaggagagggcccacctccccaacccagaaatatcagatgaccatcaggtgatagtcaggcagttgctaattttctctctaaaataataattgatcacagccagcgccagggaagggccgtctcccagtagatggaaaacacatgaaactggtgatcagcagcttctcgataagatctcaggaagttgggtgagttggctcaagcatgcacattaagagacaaaatgacggggtttaactggtgtatgaccttcctctaggaacattctactagtaagggaagaaagccaaaagggactatgtgt

SEQ ID NO: 725875 - DNA, 736 bp, Homo sapiens
  misc_feature (47)..(47): n is a, c, g, or t
  misc_feature (51)..(51): n is a, c, g, or t
  misc_feature (117)..(117): n is a, c, g, or t
  misc_feature (157)..(157): n is a, c, g, or t
  misc_feature (163)..(163): n is a, c, g, or t
  misc_feature (180)..(180): n is a, c, g, or t
  misc_feature (224)..(225): n is a, c, g, or t
  misc_feature (266)..(267): n is a, c, g, or t
  misc_feature (272)..(272): n is a, c, g, or t
  misc_feature (335)..(335): n is a, c, g, or t
  misc_feature (344)..(345): n is a, c, g, or t
  misc_feature (349)..(350): n is a, c, g, or t
  misc_feature (379)..(379): n is a, c, g, or t
  misc_feature (386)..(386): n is a, c, g, or t
  misc_feature (388)..(388): n is a, c, g, or t
  misc_feature (392)..(393): n is a, c, g, or t
  misc_feature (409)..(409): n is a, c, g, or t
  misc_feature (411)..(411): n is a, c, g, or t
  misc_feature (417)..(417): n is a, c, g, or t
  misc_feature (425)..(425): n is a, c, g, or t
  misc_feature (427)..(428): n is a, c, g, or t
  misc_feature (440)..(440): n is a, c, g, or t
  misc_feature (442)..(442): n is a, c, g, or t
  misc_feature (450)..(450): n is a, c, g, or t
ggtgctgaaaatccgaagtgccgcggaaagtggaggtgagggccgcncgcnctagaggtgcccgtccgagaggcagagctgacaaggaaggtttcgagcgttgctggcaaagggatntcttacaacctccaggcatgcgtctttctgccctgctggncttggnatccaaggtcactctgnccccccattaccgctatgggatgagccccccaggctctgttgcnnacaagaggaagaaccccccatggatcaggcggcgcccaggnntgtgnaacccatctctgatgaagactggtatctgtctgtggggacacggtggagatcctagaaggcanggatgcggnnaagnnagggcaaagtggttcaagttatccggagngaaactngngtgnncgtgggagggctgaananaattancgtaattngnnagaccatggatnancggggaancatgatcctagtgaagcccccttgatcaacgcaaggttccacacttgtggatcctatggacaggaaaccatgagatcgagtggagatttactgaagacaggagagcgggtacgagtctccaaggatcaggagaattattcctaaaacggaatttccagagtgatggatgtcatgaaagtgattgatggcccaagaaatcagtgggaaatgttagaaggaactatgtggctgttaaagacttgaggaggagttgagaaggcatgggaatagggacggaataaagagg

SEQ ID NO: 725876 - DNA, 542 bp, Homo sapiens
cttgatgtcctgcaattgcaaagcctactaagcctgccttgccccctacaatcttacccccctcatacttcatttctctgtgttgacctgtgtctttttgttcctttcatgaagtacggaacattggtttccgtcactgagactctgatgcttacaagtacattgccccatctgtctgtctgtatatgtcattcatttttatgtctcttggttactttaatagtatctctccttttccccaggtactctttcattacctgatcaaaatacagaaatgaaggccgggtgcactagctcatgcctgtaatcccaacactttgggaggcagaggcgggaggatcgcctgaggtcgggagttcgagagcagcctgaccaacatgaagaaaccccatctctactaaaaatacaaaaattagccaggcatggtggcacatgcctataatcccagctactcgggagcctgaggcaggagaatcacttgaaactgggaggcggaggttgcaatgagcctcgtgccattgcactccagcctgagcaacaag

SEQ ID NO: 725877 - DNA, 394 bp, Homo sapiens
ggtcccacatacaggggtgcaagatctctgctctgcattgactcactgtgtgtctgtgggcaagtcagggcacctctgagcttcagattactcatctgttaaacagggcgaataatatgctcagcttattatgttctttccaggctgaaatctgacaactcctgagaaccacttaatacacagcaagagctcagagaatgattgagttgctcaatctttggtcgctacaatgatcactgtatctgatctcgtctccagtccaaggggtggagagcgtgcagccctgtggccaccagcactatttcttcttgcagactttcaaccctgggtttccgacaggctatttcctgttccaggaatctgggcggtgtgcctcactctccccacaggagtc

SEQ ID NO: 725878 - DNA, 805 bp, Homo sapiens
  misc_feature (499)..(499): n is a, c, g, or t
agcggggggttgcttatccccccactgggaacccaccactccaagctgcctgcagagcacctatactttctaatactattacctaatactagagagccagagacaccgtaaataaccttgttatcttatatttatgtatttaaaagatggttcataaatgtgtttagtgcttaccatgaaagacaatttttacccccatctccaaaaagaagtagaactgattcagctcacagaaggctgttaaaggcgccagagaaatatgtgatgcagtggcttaaagagactgccaggaagagtggggaaagttgctgcactcaagtcaatttgggaaatttcatgcagaacagccacccaatagcaaggcctctaggtaagtagggagaacgcctctggtcatgttcaggtgtttcgtctgtcaaggtgcttctcccggacagctatttctgcacagttcaacacgacttgagttggccatctcaaaacagctatagcctcagtngctgtgagggcacctcatggatgacagaggcaagaaaggcttgagggagagggggtgaggcagggggagcttggagccgtcattctctaaccctaagagctgtggacacaaagccgagcccaacctggctgctgcccgggcgggcaaggagagggcaccgaatgcactctccccagagcctcgcacttgcaccagttgaggcctgcgcccctctcttccccgcacaccatagcctcttttcttgagtgctctaccaaactactggctcacccctaggaaacaaacatttggtaacatcttcgaaag

SEQ ID NO: 725879 - DNA, 423 bp, Homo sapiens
  misc_feature (23)..(23): n is a, c, g, or t
  misc_feature (26)..(26): n is a, c, g, or t
  misc_feature (107)..(107): n is a, c, g, or t
  misc_feature (132)..(132): n is a, c, g, or t
  misc_feature (175)..(175): n is a, c, g, or t
cggcacgaggcttgaaaaaagancangataacagcaatgttcagggaacaagagagataaccttaaactctgaccaccggtgagctgggcagaacagagccatattnctcttctttcaaaagcaaatggganaatattgctgaattctttttctcagcaaggaacatcccgtganaaagagaatgcgtccctgagggtaggcctctaaaatggctgcttcggggggcggccatccttttatggtcgaagctgtagggatgaaataagccccagtctcccatagcgctcccaggcttattaggacgaggaaattccccgccgaataaattttggtcagaccagttgtctgctctcaaaccctcgtctcctgataagatgttatcaatgacaatgtggtgcctgaaaacttccttagcaattttt

SEQ ID NO: 725880 - DNA, 252 bp, Homo sapiens
gaagcccccatcgcatggtgtcaataggtactgtgctgcagaacttcttaataactaggcggctatcgtataactacgcctcacactcagttctgaaccccctaacaataagcaacatagcctaccccttccttgtattatccctatctggctgattgacagcgtatgtctgagcgattacatggtctgtgtgtcgtaccgtcgtgacttgcgcaaaagaatgtcttctctgtggcctacataaatatctta

SEQ ID NO: 725881 - DNA, 367 bp, Homo sapiens
cagcagaatggcattcaggaacagagaaatgtcttcctgctcagtatggactcttcctaggcacctcattaggaagcgtgctgagcactggagaaacccaacttctgagtgtacgggtatggaccatttgtgtttttcatctggtaatggttcatgaagcccagagtctccagggcatcgctcttgggttcccactccagcactccagaggagctgcgctcacttttgcctgagaatactttcacagaagatggccgcttcactcccagctcatcgcagatctcaaagaagttctcctcggtcacctccagcggggcgttgaagaagtgcagcacgttgctggggtgctgatatgccattcttgctg

SEQ ID NO: 725882 - DNA, 179 bp, Homo sapiens
  misc_feature (4)..(4): n is a, c, g, or t
  misc_feature (111)..(111): n is a, c, g, or t
aagnaagtactcttaggatcattatgatcctaagccagtcgagcccatcgtggtcatagtattgcgagactctaaataggggtatggtaaatacgctcacatcattctcancccctgacaaaacaataggctaaccctttcttgtactatccctattaggcataattataacaagctcg

SEQ ID NO: 725883 - DNA, 392 bp, Homo sapiens
tctttaagagacaatagatcactgccatccaggctagaatgcagtggcgtgatcacagctcactgtaaccttgaactcccaggctcaagcagtcctcccacttagcttcccatagcgctgagattacaagcatgagccactgcacctggccttctcttctactcttatcccaactcaattttatgtatactaatggattctgtcccaacttctttttatatagcttcatagagattctgggggtccacagtaaacacttggtagttgcttggaattaaagaaaacataattaccaaaaaagaaaaaaagattttttaacaacaaactagctaccaagtggtcattctacataataatcatcattaaacctcagtgtaataaagaaattgttt

SEQ ID NO: 725884 - DNA, 126 bp, Homo sapiens
cctctctcacgatgacccctatacgcaaaataaaccccctaaataaataaattaacacatcattcatcgacctccccaccccatccaacatctccggatgatagaaggcttcgcgctcactccatt

SEQ ID NO: 725885 - DNA, 410 bp, Homo sapiens
gaacacgaagactatatacaatgcaggtcaagaagagatgggagaaggaatgtcacaaaatttttggtaatacatatattttatagagaagtaatccatgaacctggcacacggataggtttatccaagcagctttacaaattactattaatataagttacatgcttgcccatctaaagtaactaaacccatagactgtaaaactatgtgtcaaggtaacgtgagcactttaatcactttacttatattttctaaagggcagtagtatcctctccttttcccgctatcatattagatgaagagacaagttccttcaacacaaattctgatatcggctattgtgagaatcccttgttgcagtcagctagaagccccctgcaccaagtctagtgccaaccaaaatgaccaga

SEQ ID NO: 725886 - DNA, 158 bp, Homo sapiens
tagattcctagagaacgatcacctaccgtacctaagcgacactactactgatctacattataagaaagataagagacaatatcagaacatgagcatacactcattcttgagagggtagaagctgagcctcatttctacatctgcattagctatatcat

SEQ ID NO: 725887 - DNA, 401 bp, Homo sapiens
tcatgttctcagaggaagatagcgctttcgcctgacaagcatataccaagcgccctctctcctcctcggctaacggcctaatggcactacacatctaaactacacctctcgggcaagccccatggccaccacagcgcgccaacgacaattgcgcgctgggacccacaagggcagacacctgggaaacacgggcttcccagcccaccaggcaacaaacacaaacttcctgcgggcaccaggcgggacacccaaaaccgggcctcttagattctcgaacgaccccattgccaccttggagtaacccgtgggaggaacaacgcaaacaggaaacccaaaccttcctcaacaagcggcaaaaaccgggaaaaccttggggggaacaggccttggggggatcgggt

SEQ ID NO: 725888 - DNA, 211 bp, Homo sapiens
tctagtaggatcgccatgggaaaccttcggtggtgtcagagtttttcacaagacttggtcctgcatttatcagatcctggctagatcagtccacaccctacacggctgtgcgactgcgtcgtgactctgagcctgcgcgtggtctacatgattcgagtttacctgctgcagggttggtacattgtgacctatgccttggcggatccttaga

SEQ ID NO: 725889 - DNA, 81 bp, Homo sapiens
ctagaagattcagcaaagtacttttgtgctcttggggaaagaaaccctactgggggatacgcgtacaccgataaactcact

SEQ ID NO: 725890 - DNA, 161 bp, Homo sapiens
tgaaacgttgtctggctctgttgccaggttggagtgcagtcgcgccatcttggctaactgcatcctccacctcccaggttcatgcgattcttttgcctaatccccctgagtagctgggactacgggcgcacatcaccatgcccggctaatttttatggggt

SEQ ID NO: 725891 - DNA, 640 bp, Homo sapiens
  misc_feature (17)..(17): n is a, c, g, or t
caatttcatcacacgantgtgacgaggaaaccccctgccataacccaataccaaacgcccctcttcgtctgatccgtcctaatcacagcagtcctacttcccctatctctcccaggcctagctgctggcatcactgtactactaacagaccgcatcctcaacatttttggtgggggaccccgccggaggaggagaccccattatataccaacacctattctgatttttcgggcaccctgaagattatattcttatcctaccaggcttcggaataatctcccatattgcaacttactactccggaaaaaaaagaaccatttggatacatagggatggtctgcgctatgatatcaattggcttcctagggtttatcgtgtgagcacaccatatatttacagcgggaatagtcgttgacacacgagcatatttaacccccgcttccataataatggctatcgccaccggcgtcaaagcattcagctgcctccgcccactccacggtagcactatgaaatgaccttgctgaagtgctctgagtccctggttttaatctctccttccacctcccgtggcctggcttgccatggtgttagctatcgttattcttggtcttcgtctgcaccgccctttccacgagga

SEQ ID NO: 725892 - DNA, 786 bp, Homo sapiens
ctgtgcgctctcgatcgggagtcccagccatgtccgacgagagagcaggtagccgaggcagtcgaccggggaagactgcctcttcgccgcctccgaaaaccgaggcagtcgatggcgacccccagcatcccgcggactccgaaggggccgacgccgtgcgccgcctctcctgccactcgcttgctgctgccatagtgctctacgcggcttttggggaggctcccgaccctacggtggaacgctcgcagagccgtgcccggttagtgcccccgagccctgtgcccggtccagcttgacgctgcgtctgcgggcctgcggtgctcggactgtctctgacctcatggctaggcaggggcttgttcgacccgtctcccgcggctctgcgctgtcactccggggcatggcacggcgcgcgcggtgtttgtgatcggcagtggccccgagggatgttcatgcgacccgcccatggcacggacacccgggggtgaatggttgttgcccccggtgtcccggggctttgttggacagggccacgaacgggctgaccttggtgcgccctcgggtcccgagcaaccctttcccttgaatttcccgtgatggccccagtggagccttttggccatttggcacaggctttgcgctggcccttttgggctccggtccgagcttttcccgtggtccacgtgccttattgccatgggtcccctctcttttggacggttcgcgtgcaaatcgtataacatgcgcccttgggcccccaaagtcgcctcttgggggccacccttg

SEQ ID NO: 725893 - DNA, 106 bp, Homo sapiens
aatgcacaggaggaagctgaggcgacattctggggcatcctagatgccttacctttaaggacgagggactttttcctggctgggggaaccaagccaccattggccg

SEQ ID NO: 725894 - DNA, 1379 bp, Homo sapiens
gcacgcgccctcatcgcggggtccgtcttcttcctgctgctgccagggacattctgcggccgcatgcagacagcacagcaaggggcccacaagtcaaccgtccaaggtgtcattattgacctcacgcaatttgtgagcatgacagcatgtcaggcctgggtgcatctattggtctcgttcggcaaagcactgtatccacacacaacagatggcatacattcttggtggccattagcatcaccggagcagcaccaggcattttggcctacgaacacaacgagcacacattcccatcagttgtaatcgaaggcactatccatgcatcacaggcgcggcagcacattccaccaagggggcagcatggccaccaggcaggcacaagcagcacatcatcacgtgtgcagagcgcctatcccacagaacagcagaaaacttcgacacacctgacacgcacgtacggggacctggacatgcggcctgacgccatgcgccacaacgacaggccaaaagaacaacacaaacggacagtccacacggagtcatatccatacgacgacacagtcacagcacagaccctgggccaaaagcacctgcggcacacgccactcggtcggatgatcacggccaacaacgctaccataagaacgcggacagtaggcaaggcgagcggcatgcgagagacacgcagaaggcgacgcacgccagcacaccaggaacaggagcacagccccgcgcgtcataacaaaacaccccgctggaaacgcggaactggtgccaccatcaactacaggccacgaaaccatgacgtgcacaaacgtaaatccggcaagcgacatggggaacgcacaaggccaccacacacgaggacaccaactccagcaccgacaaaggagtaagaatcacgaggaggccgcgccacgcgcggcaacaccaacactcgtgaccatcagcaagcaaagatcctcgaccacgcgccaacgggtgcaacaagcgagccaccacgtgggtaaagccatccccagggaccacacaagaacagggggggacgaacaccatgagcaacacccaggcaaccatgggcgcaccccccgaagcatgcaagtgggcaaccacacacagggccatggacgacgcagcggaggcacgcgacaggtccacgcacagtcatggcaagttgtccgcagccaaggaagcacccaagggagagcaacgcccacacacacgtggctacacacaagagcgacgctatatcaacgagacatgggagccaagaaacaaaacacaaaacagtgtaggaaggaagaaaagaccacagaccagcacaaccgcaaaaacaaaaaaacaaaacacacaaaaaactgcaccacacaacacaagaa

SEQ ID NO: 725895 - DNA, 104 bp, Homo sapiens
tcttacgtgccctgctcagttccaccatctttctgggtcctcaccatgtgcgctctgtgctccacctcccctggtgctgtgtctgcacatgggcctggtggtgt

SEQ ID NO: 725896 - DNA, 418 bp, Homo sapiens
  misc_feature (90)..(90): n is a, c, g, or t
  misc_feature (216)..(216): n is a, c, g, or t
  misc_feature (223)..(223): n is a, c, g, or t
  misc_feature (347)..(347): n is a, c, g, or t
gatcccgttcgtcgaccgctcgcgtcgcatttggccgcctccctaccgctccatgcccatccctcagcctatgcatgcccccttgatcangccattggcctcctcgtggccatcttccacaagtctccggcagggagggtgacaagcacaccctgagcaatgaaggagctgaaggagcttatccagaaggagctcaccattggctcgaagctgcangatgctnaaattgcaaggctgattggaagacttggaccggaacaaggaccaggagtgtgaacttccaggagtatgtcaccttcctgggggccttggctttgatctacaatgaagccctctagggctgaaantaaatagggaagatcgagacaccctctgggggtcctctctgagtctaatccagcggtcgacggacggggta

SEQ ID NO: 725897 - DNA, 454 bp, Homo sapiens
ccacctctgactccttctgctgactgggatccagctccaaagccatgcctgggaagagactcctgcctctcccaggatgactccgtcccgccacgcctctgctctcagcgcccacagggactcaccaagctggactttcatctaaaactagacacacgtgacgccagcggaccacagacccagtgcaaggggagctgtgtgggttgtgctgaaggtatgttaaaattcatacaggacacccaaaacaatcaatcttattgcatgataattttaaaataataaaaaagacttgtggcaagctgaaaaaatttttgataactttactaccaatggctaatgtgcaaactcctacaaattgagaaaaacaggcaaaaaatataaacaacagtttataggaaaagaaatacacagtttttaaacctatgaaggacagctttactcattagttaaaaaa

SEQ ID NO: 725898 - DNA, 803 bp, Homo sapiens
ttatttactacttttttcccgaataattttgataaatctctctgtttacaacacacttatgttatacattttgggggagagggtgatgttttcggggagattcacacacacacaaggggaagagagaggggaagagagcaggagaggaagagggagagggaagaagagagagagaaagagagagagaacgagagacagagagagacagagagagagagacagagacagagagagacagagagagacagcgattgtagggtagggtctcactgtatttctggttgacctgaaactcactatgtagaccaggctggcctcaaatttacagagctcagcctgactctgcctcctgagtgctgggattaaaggtgtgcactgtaacatctggctttactttgataactactattgacgttttaccttatacaagtcctagctctagtttctggggagagaggggacaactagaaagctcaacactgagtgagaaacagaataataagcaccacactggccaatccagctgagcgatgctctaaagggacaatgtgctgcggttgccgggcattttcctgttgtgcagcacaggctttttaacaaaagcgtgtgcccatgtagattgtttcttaatgcataggaaggcttcaccatgaaagaaatttccaattgtgtcttttataataccaagtagatatttgctgatacctactggtgtgaagtaacattggggatctttgtcaaaagttgaggactccctgaatgtattcccgggggtgtcagaacgggtttactggggagactat

SEQ ID NO: 725899 - DNA, 648 bp, Homo sapiens
ggtatataagtgcagtatgtcgccgtgaacgttctttttcagcagacgggtttgtcgcctagaacacaggtgtcgttgaaaatctacccctaataagccaaaatgtggaaaggaaaagactcatatcaacattgtcgtcattggacacgtagattcgggcaagtccaccatctactggtccatctgatctataaatgcgtgttggcactcgacaaaagtaaccattgatacataatttgtagaaggaggctgactgcagaatgggaatagggtctctcttcagagtatagccgtggcgtcttgtgaataatactgcaaaagctgagtcgtgacacgtggtatcaaccattgatatctaccttgttgggacatatctagcagaccatgtcaaagtactatgtgactatcattgatgcccctcatggacaccaggagactttatcaaaatagcatgattacagggacatctcaggctgattgtgctgtcctgatggttgctggctgggtgttccggtgaatttgccacgctgtgtgatctctcaatgcaatgggctagacccgagagcatgcccttctggtttacacactgggtgtgaacaaaactaatctgtcggtgtcaacaaaatggattccattgagtccatccta

SEQ ID NO: 725900 - DNA, 185 bp, Homo sapiens
ctgtccacataccagtggcggtgatctgggaactaacagtggtctctgagggcccctgtgcgccccaccaggtctggtattgaggctgcattcctgagtgcaggagggagtgtccctgtgagatttttgagctgggctctggctatgatcttgcttgcttctcagtacaccccgccgcccaacgt

SEQ ID NO: 725901 - DNA, 297 bp, Homo sapiens
  misc_feature (249)..(249): n is a, c, g, or t
tggagaggaggaacctcatgagacagttgggtgggggcagtgtaagaagaagggtgctgggtgcggtggctcatgcctgtaatcccactgctttgggaggccaagttgggaggatggcttggggtcaggagttcgagaccagcctggacctcataacaagaccgcatctctacaaaaaaggttaagagttagccaagtgtggttgcatgccctgcaatatcagctactcgggaggctgaggtgggaggntcgcttgggcccaggaattggaggctgtaatgagttgtgattgcacca

SEQ ID NO: 725902 - DNA, 474 bp, Homo sapiens
  misc_feature (52)..(52): n is a, c, g, or t
  misc_feature (361)..(361): n is a, c, g, or t
  misc_feature (429)..(429): n is a, c, g, or t
  misc_feature (453)..(453): n is a, c, g, or t
  misc_feature (470)..(470): n is a, c, g, or t
taaagagacggggtctttcttttttgcccaggctggagtgcagtggccaatnatagctcactacagcctccaactcctggtctcaagtgatcctcctgtcacagcctcccgagtagctaggattacaggtgagtgtcatcccaggcacctaatttttatttttttagtttgttttgtagagacgaggtctcactatgttgcccaggctggtctcgaattcctggcctcaagtgattctcctgcctttggcctcccaaagttgctgggatcacagacgtgagccaccacgctggcaaaactctttaataactctctctttctaattgtgggcaaaattcacacaacattaaactttaccatnctttaaccatttttaaagtgcacaggttagtaggttaagtggtcatgtggttgtacaaggcttcagcntcatcatttggcaaaatttgttcnttttcccaaacggcggncgtt

SEQ ID NO: 725903 - DNA, 320 bp, Homo sapiens
gtggccctctactgcaggggtgacagaaacctcatcgttacaggccatggtactgtggcgctccgtgatcttacgacgatttcagaagtccactgaacttctgattcgcgaaacttcccttccagcgtctggtgcgagaaattactcaggactttaaaacagatctgcgcttccagagcgcagctatcggtgctttgcaggaggcaagtgaggcctatctggttggcctttttgaagacacctacctgtgtgctatccatgccaaacgtgtaacaattatgccaaaagacatccagctagcacgccgcatacgtggagaa

SEQ ID NO: 725904 - DNA, 356 bp, Homo sapiens
agccccttcagccccttttcccctccccgggtgggcagggcagggccaccccactttacctccttagctttccctgtgccactttgactcaaaggctgggagcatagcaaaggggccaggcccaggcaaagcttacgggaggccccagctttgaggggagggggtccgtggtaaaggcctggggccggtaaaggctccccagggctcccttatgtcccccacttcaggggatgggtgtggatgtaattagctttggggggcagttgggtaaatgggtgggggctcctggtggccttttgctgcccaggccccacccccctttgggttccattttgttaataaaccctggctttgga

SEQ ID NO: 725905 - DNA, 949 bp, Homo sapiens
gagcccgcaccggaaccgcgatcaggtggccaggcaatccaacctaggcgtaaggggggaagaaggcctctgtcgcatgcgggcgcagacaagggggccccatcgcagcggtccagccgggacaacaacccggtggagctctcgacacgggctctcaccctccagaggaacgagaaggacgtagcctgctgccaaggtaaagggtgagacccggcgagagaagacccgggaggccaggcaccgggagaggccgcgaaggagaagcgtaaggcggagggcagggagtgaggagcagacccgatgatgagctggcccgagaccctggaggcgctggtcagcaaggcagaggaggagttcttcgacatcatcttcacagagctgaagaagaagggacggcagacgccacaaagcggacgccagggcctgccctctcctgtaccagcggagagacgaagaaaagacatcgcctgtcgtggggcacctccgtcaggccccacagataagacgcccatacgatatgaaagagccaaagagcagcgctggaagggaaaagaaacagcggcagcaaccaagtccagaagaagaccaggtggtcgaggagggagaggaagcagcgggggaagaaggggaggaagaagtggaagaagacttagctagaagtcagcattcgatgcggcgctatccctgtgtgccttcctttcccacgtgcttgaccgtcaaccagacttgcatggccatggcagggcctcgggaagaccttcaggagtggggaaaggtttctcctccatgatcgaccctcctcgtccacctacaaatcaggacagaaagtctctccactatgaaaatacatttccaggcagcttcctgaccatttgacacactgccaacgacaggagcctccaagtatgtgggagggacggcggacgagtaggcctggggctgcacatga

SEQ ID NO: 725906 - DNA, 1226 bp, Homo sapiens
tcagcattcacgaactgctggctttaggtgaactttcgaacttcgtgacctgaatgatgaacattaacaacgctgctaacgggcagaacaggacactgggaggtccgtgataacagcgacgctggcgaggctcctgcattactggcaaaacgttggccctaacaactgctggcatcatgaacggaaaagcaagctcccaggcaaaccgacggttacaacgctactcttggacgcagcaacatacgactttgcctggctgcttcagcagcacgcctgtattgcacaacacacgcaaccctccggaccgcagcgcacaggccagccccagcgcagcaacacgggcagccggcgaccgaccagccccatgtccagcacacggttcactttgcctcaaactgctacaccctgcttttcccccctacgcccagcccaacgcagcactttgcagcgagcgcaaccatggcctgcccgcacaagcgcacacgcacacaaattggcacaccttccttacccaggacagctactagccacacgcccgaaggcaaccacctatgtcacgggctccccccacacgcttggacaccgcacacgcccccagcatacgggacattcccatgggggagcttacttttaggcggaaccccctaagccctgcgctgggcccctccatacccctatgggcaagccttcctactcccacctccccccctccatgcctgggcttactccctttccagtgtgtatcccctcaatgcggccccttggtccacgtacctaccgcgtcgtccttggggcttggtctttgtgcccccgtcgggggccttcccgctggtcccccccgacttttccttccagtgtactcctttctcgcccttattctccctctatactttgccccgttttgggctttctttcaaagttggtttctggccacccccgggcaccgggggcgtcctacacgctgtcggggcatccatgcgctccccccactgggcgcctctcgcctagtacccctatggtggcttcacccggctttctgcggctactcctccagcttaagttaccttccgcggctttaaccctacggcccgctttgcgccctctccccacctctctcactcttcctctcgacctctctcgctccgcacccgccgcttacctcccgcacttcacctcgcgcattcgccccgcccacctttggcccgctgttcccttgcccgctcccc

SEQ ID NO: 725907 - DNA, 433 bp, Homo sapiens
ccagcgtcgcccacgcgtccggggacacgtggtacggaaccggtggccgtggcttgctgcgtggttaagcagggccgttgcctaggtgggccttccttcccaggtcgcccctctagtcatccacatagagacaggacgtgaccgagttgcgtcttccttccaagaagcttcgagaatctgcggtctggggtctgggttgacagatggcggcccctcacgtagccctgttgtaacgtccagtagatgaaaaatcaggagtcgcgtacacttcaagacaactcgcacagaatgcggtggctactccagacggtgtgatctgcggtggccggacgaacgacgacggcgaaactcagggacggactgactggacatgttgctggctgcatgactgcttaacggccgctatggggaggctctgcgggagactggctgg

SEQ ID NO: 725908 - DNA, 168 bp, Homo sapiens
gggagtagtccaatgatggtaaagggttacttactggttgtcctccgattcaggttagaatgagtgaggtctgcggctagtgagtcaactaaatgtgattgtgcttagatgtggtgaaatattatgctttgtatgtaatggatatattggaggatggggattattgct

SEQ ID NO: 725909 - DNA, 324 bp, Homo sapiens
tcgagccggtacccgatgtcagggataggctccacgttgaggtctgatgatcattccagctggtggtgttggagtgtcagtgatgattttattgagagaagtagccgatcaagaagagctcatgagagaggttgacaccttggtacagaatctgtaaccaataccatgatgttcaggctgtgatctgggctccctgactttctgaagctagaaaaatgttgtgtctcccaaccacctttccatccccagcccctctcatccctggagcactctgccgctcaagagctggtttgttaattattgttagactttccgtatggatgc

SEQ ID NO: 725910 - DNA, 597 bp, Homo sapiens
  misc_feature (42)..(42): n is a, c, g, or t
  misc_feature (65)..(65): n is a, c, g, or t
  misc_feature (68)..(68): n is a, c, g, or t
  misc_feature (70)..(70): n is a, c, g, or t
  misc_feature (81)..(83): n is a, c, g, or t
  misc_feature (85)..(85): n is a, c, g, or t
  misc_feature (95)..(95): n is a, c, g, or t
  misc_feature (180)..(180): n is a, c, g, or t
  misc_feature (185)..(185): n is a, c, g, or t
  misc_feature (187)..(187): n is a, c, g, or t
  misc_feature (191)..(191): n is a, c, g, or t
  misc_feature (221)..(221): n is a, c, g, or t
  misc_feature (234)..(234): n is a, c, g, or t
  misc_feature (269)..(269): n is a, c, g, or t
  misc_feature (324)..(324): n is a, c, g, or t
  misc_feature (334)..(334): n is a, c, g, or t
  misc_feature (340)..(340): n is a, c, g, or t
  misc_feature (351)..(351): n is a, c, g, or t
  misc_feature (419)..(419): n is a, c, g, or t
  misc_feature (421)..(421): n is a, c, g, or t
  misc_feature (428)..(428): n is a, c, g, or t
  misc_feature (436)..(436): n is a, c, g, or t
  misc_feature (483)..(483): n is a, c, g, or t
  misc_feature (488)..(488): n is a, c, g, or t
  misc_feature (494)..(494): n is a, c, g, or t
  misc_feature (497)..(497): n is a, c, g, or t
  misc_feature (525)..(525): n is a, c, g, or t
  misc_feature (527)..(528): n is a, c, g, or t
  misc_feature (534)..(534): n is a, c, g, or t
  misc_feature (557)..(557): n is a, c, g, or t
tgaattccggaagatccccacatcgatgaaagcaaagcaaancaccaagccatcatcatgtccangtngntaagagtaagnnnanaaagaaaggnagaaaaaggacaaaaactaatgatgacgaacaaatcaatcgcccaaaaagagggcaaaaaaaacataaactagaatgcctccccngaggntntaangagcctcaaaacaatcaactccactctcanaacagaagggggnaaagtcagaaaccgctgcccccccttaaacacgcnaagcagcctaatgtgcaacaacatcccaataaactaaacaggggaaacgggagcntaagcacccnagtggnaagaaaacggnaagctttctcaacccccgctctgaaccaacggagaaaacaagctcaaaggaaaacaaaaacgcccgtncncacaggngataacancaacatggggcagcagttaaggaaatcaggtgaggagcgaacctagnaacancagccnttnccaaaccctagcctaacccaaaacctancnnatcaanccggaaaaactagaaaaaaaagngaatcaaagctgcagcggaaactccacataatagcaggga

SEQ ID NO: 725911 - DNA, 249 bp, Homo sapiens
  misc_feature (145)..(145): n is a, c, g, or t
  misc_feature (202)..(202): n is a, c, g, or t
ccagtgtaagcgtcaggctgtgtactgctggaaggctggtgccactgtggcctcgccaggcccgtgacgctccctacagtgtattcatgcggaaattgtggtcacatatctcaggaaggatgtgatgcagacaccatactccatntacaccaggtaccgggcaggctggcctggtgggcactggggcccacccccatcttcnccacaccctgttcttgaggcttgtagaaagccaagcaggcccagggc

SEQ ID NO: 725912 - DNA, 289 bp, Homo sapiens
gagatcccgctgatcgcttagattttgggagaatattggccgaggacgattgtattttgccatgtgagaatatgagatttgagatgctggggccgaatgataccgtttgcctgtggtctcctctaaaactcatgttgaattataatccccactgtttgttggaggtaggacctggtgggagataactggatccttggagccgatttctcatccatgttttagtgccctccacttggtgctgtccttgtgatagtgagttctcaccatatctaaatgctacacttaaggc

SEQ ID NO: 725913 - DNA, 764 bp, Homo sapiens
taaggctttaaagtgaatcgttttaatttaaaacggggatccatcagagggggggaactatcagggtcaaggtcctaaagcagggcccagatgaaaggtaatactcaccagcacctcacaggggactcagggacaatgtcagcaacacaccagggaggggagaacaaacccgaggtaaagggcgacctagcgggggaggaagctgggggtggttgcactggcctctctagcaggttggctttaggtcgcacgggggctaagtctgggatagaataatatggggaagggaataactcggaagcgaggtctcctatgcaggcagtaaccctactccggatagggtggtatactcgccatggtgggtaaggagggtctgtaccagggacgactggagtgtgaccacaagggggaagtacaaccagcctctctcccttctttctggctctagaaaggagaagggggaccccttcccccagtatcaatctacatgcacgcggttcctagaagggctggtaaagaggcatccgacactctaacaagaacagaatagccccggtgacccaaataagaagacacgaacacagggcgtctctggagactgaaaaatccatcgtcaaatggggaaaaggggtacgcattctcatgacaacaacctgcacactacagaagccggggtttgacccaactcccaataaaaccccgggggggtaactgcccccgctctgaacagaacactgttaacggtcgcatccaaggagacccgg

SEQ ID NO: 725914 - DNA, 154 bp, Homo sapiens
gcccgcccccccccccccccccccccccccccccccccccccccccccccccccctgatatgcggcagtgcacgctgtcactttcctgcaggccgacctctagcaggactccccgccggcttactgtcggctggcggctaccgacgccctcgaa

SEQ ID NO: 725915 - DNA, 383 bp, Homo sapiens
atgccatatgagtctgaagagaagagccttgttgtgaactcagaaacatcaggcaactcatggatggaattcaacatattcattgactgctccatttcccgtctcacgtcaggatcacttgtgttgaccactttaggcagaagcacatatatcaataaaggaagaaccatcatcataaccattggcttcattagaaagtctgcccagccccactattcccttttaataaagtaagaaggtcgacctgaagatttcatttgcagaggatagtgcagcctgacaacctctgatgatttgatcgaattcacatatctcgctctcatttctcctttcgaagggatatccactctaacgggatcaaaaatgacagctgtagatacaac

SEQ ID NO: 725916 - DNA, 253 bp, Homo sapiens
ctgtgcgagagtgcttcagtactcaatttccacaaataattttcacccctctaagcatgtacatctacaaagatggatcctatcatagaaattaaaaaatcaattatgagctcatttcgacatacagaacaagatatggcacacgctggaagtcctgccacgtatcctttaatgatgctcgactcattgtatcacacaggaccacgcatgaacgtttcttcactcagaacttatacacggcattttcctgtaa

SEQ ID NO: 725917 - DNA, 169 bp, Homo sapiens
cgggtgccgctccatgcttagtggtccatctatgaatacaagagtcatcatcttactggaatcgatggacacactacagccgggtaaaagtccaacgcacaccacctcatgtccacttactaacaatctccttgtgaaggtcggggtcgcgcttccactacgactccgg

SEQ ID NO: 725918 - DNA, 2043 bp, Homo sapiens
ccacgcgtccgcggacgcgtgggctccttcaaggcagtaggaagatactaagcttattatctatggctgaagacaaacacaacaaaaacccacttaagatgttggaatctttgggcaaagaactcatttctggccttttggatgactttgtggaaaaaaatgtcctgaaattggaggaagaggagaagaaaaaaatttatgatgccaaacttcaagacaaagcccgggtcttggttgattctatacgacagaaaaaccaagaggcaggtcaagtctttgttcaaactttcctaaacatagacaaaaattccaccagtataaaagctcctgaggaaactgtggctggaccagatgagtcagtgggatctgcagctaccctcaagctttgccctcatgaagaattcctgaaactgtgtaaagaaagggctggagagatctatccaataaaggagagaaaggaccgcactcgtctggctctcatcatatgcaacacagagtttgatcatatgcctcccaggaatggggctgcccttgacatccttggaatgaagcagctgcttgagggtcttggctacactgtggaagtggaagagaaactcacagccagggacatggaatcagtgctgtggaaatttgctgcacgtgaagagcacaaatcctcagacagtacattcttggtgttcatgtctcatggcatcctggatgggatctgtgggactatgcacagtgaggaagaaccagatgtgttaccttatgataccatcttccggacattcaacaaccgtaattgcctcagtctaaaggacaaacctaaagtcatcattgtccaggcctgcagaggtgcaaatcgtggggaattgtgggtcagtgactctccaccagccttggcagacagcttttcacagtcatccgagaacctggaagaggatgctgtttacaagacccatgtagagaaggacttcattgctttctgttcctcaactccacataatgtgtcctggagagacataaaaaaaggttctctcttcattacacgactcatcacatgcttccaaaaatatgcttggtgctgtcatcttgaggaagtatttaggaaggtacaacaatcatttgaaaaaccaaatgttaaagcccagatgcccactgttgaacgactctctatgacaagatatttctacctctttcctggcaactgaaaataaaaatcacaggaaattcaaccatttatcagcttcaagaagcatttttatcagcacagcatccatgtttaaccttttgtctttcattaaagtgaaaacatatgaactgttctttggggtcctctaagaaagaatagaatttcaattaaaacaatggatggatggaaataaagtagaagaagaaaactggattttcttgttatattgcatataatgcctgcactttactgagtgaagagaactagtcatgacttgccctcagcagcagggtgaaaggagatggtgcacatctggagacaaggaccaaaaactgggtcacctgctcctttgatcactcatcaaaccttgcaactagaattatttggaagaatatttctaatttattatttaaccaacatcataggtcaagttcaattttttttcagaaagttgttatggtacctatgcatctttcttcttatccataaattaatttgctttcttgttgatgatttttcattccagatttccaagcttcaggaaaattttgttatttagcaaacacttggtaattgtctaaaataaattgggcctttgatttaagatggtataattgggtgtgcttgtatagaaagacagacattattagatacagaacatccaagagtgtgggaaatgtcagcaatgggaaagaaaatgttaaattttctggaaagtgaatgtcagtagaggaattttagcaacatggccatctgagccactgactaaggagatgtaccacttcaattacatacatgcagaatgctgaatagatatatcaggacatgctgaactgtattacaaataaaatgattctctagatatc

SEQ ID NO: 725919 - DNA, 262 bp, Homo sapiens
cgtataactctcgcatactctcactttcccactgggtatctcatgctgacgggctggctggggacaaccccagtgtgcctagtgttcttccctgccaggccctgatgccctgtcacaagtgactggcccagccatcattgcaactccaagccaagatgggctgttattgaatggaaggcaggcctggggcagaagcatcctagtctggtcttgatgacccagcaaggtgctcctggattttttggcggcgatatccaggacc

SEQ ID NO: 725920 - DNA, 115 bp, Homo sapiens
cgagatacatacagcgaacagctcaggtctgactatgcgtgctctagtagtgtctgcagttatagataatgaaatggaaactcaaaactttaagtgtagctcttttattttggtg

SEQ ID NO: 725921 - DNA, 540 bp, Homo sapiens
aacagtttattttaattgatcgcaagccatgagtggcaaggagactaaggacctttccacttgtgagagatgtggctggtgtttccccgactacaactatatgcatgggggctaacgtaggagcgcttatttttaatgctcacaaactgttaaggggagaggctgtacacgtttctttttaaggataaggcttttgccaagtgcgaaattatgagctttacccttctaggcaagggaggagttccaaatgtcggacttgacaccaagaggtacataggctggtaaatgctaaatggcaactcttttttgtgctttagcaggcttgtagaagggaaacactatcctaacgagggcgatgagcttcttgattatgccattctctctgagacgggtgcatgacgttgccacgtacgcttaggtgggtgcagggaaccaattgggttcggatgacccttccgagtacgtacgtgacaagccaaggttgttgctaatgctggagccggagtactgcttgccgggagatgcactaactctagagcg

SEQ ID NO: 725922 - DNA, 422 bp, Homo sapiens
  misc_feature (2)..(2): n is a, c, g, or t
  misc_feature (33)..(33): n is a, c, g, or t
gnttcccctagacaatccctacccaaccccctngcccccacaacacccccctctggtgcccccataataaagggaaaccaccttgtaaaaattaaaatgtgaagtgaaaatccaaaaaaggtttcccctgccaaggttgttttccctgaagaccttgggaaaataataaaattcctgtacctggaaattccacaaaggaaagggccctatttttcctaaaactgttcctaacagctgacagcaattttaagccacagcaggttggtcccagttccctgtataatatcatgagagattcatactcctatgcgaaaacctagcaatggtactaaatcatttattttgcatgaaacatcttgaattttcagaatatgaactttcaaagacggccatttatcaaaatgctaaatgtcacttttttg

SEQ ID NO: 725923 - DNA, 1251 bp, Homo sapiens
  misc_feature (1121)..(1121): n is a, c, g, or t
ggtgacgctgtgggtcgacccacgtcgtcgcagagtacgcgtgggtctcgagactgcatgggatggacccgacgcttccggaccctcatgtcggcgaccggctgggcacgcgatctagataaacgatgtgaaactcagcttccgaacctacgaactggggtccagagtgagacgctcagcacacaagggaacgagcgcgatgtaggccgattagaacccagtggattgtaagttacactccgtgacaatcgatcatgactttaagcattgaagcgatacggcacagttgcacgtgcaggccactttaagtacccacgataaggaaaacagagagattaattagacaatatcttgctcggaccagattccactatcaaatgtcgtgcataggcatggttccatgaagtttggcagtcgtgccatagatcccgcagaacttgcagggtaacacaaaccatgtgagtgttgcacaccctagatcccagcaaactgttgatcgtgactactttgcatattggaggaggatgcgcacagtcactgtcagcggatggggccaacgttgctattacatgtcaggggccctcccagtaagattgacaggtgcaactaggaaggtttcggtcaatcaattattttaaaaattccacggggtcttagaccaggcacgaataaaagcatgtggctttgaactatctatgtggcattttccacaaacacgtttcctctaattcaccgtatagaggaccacagacgttagaggagggcattacctacgttacacagagaggagggcatatttttgtcccagtaaccttggcacgatttgccgggaaggtgtggaatggcacgttccgcgaattcttattacgggagaacgaatacccacaccgccggaaacacagggcccacgctttgtgtggcacgacggctcctcgcggaccaacgcggggacttttttttggaaccgagaccacatgggggtttccagacatgtgtacacaccacgctggccattgcaaatcttaccaaagcgggtcgcaatgggcgaagtggacaaattatacggggccacacgacaagtttgagaggaaaacagccacagagaatgcaaaggtcatttnctatttgaacacccccgttggggcttattaacactagatgcccacgttacctttgaggtgcccagcgggtggcgtagagagtaaatgtataagagacgcaacggggccgatccggcaagaactgcaacta

SEQ ID NO: 725924 - DNA, 1100 bp, Homo sapiens
agcggctttttctctgtgcatcctcagtgacgcggggcacaggtctgcccgggggctaccatgagcccgatctggagcccacacgtgggtcatgccctggtgcggaggaggccgctgtaggcgcggcagttcacagtcggcaccaaaagtttggcagatctcagtgaggcgtagttgcatatccttgtgacggggtcttcaggaactgatatttgtgccagccagtttcctgtaataagtcatctcagaacaatgttaactccctgagctgcggacctcccaaggctcagctttggaggacaccaacaatgaggacacgcaaaaatgagcactcctgttgcagccctgaggacccgaacatggaggccgcagcagccagacccctaacactgaggcacaccgttctacacaaaccccgggactggacccaagacctcagtggcccacaggccaggtcctgaaggacaaccagcagcatatgctgtgagccacgttcctgcacaggatgcgcgggcagggatcagcgacaataagctgctggagcactccaaccctgagaaagcccaaatacttcccagaagcacaagagggccacgggcacaggtccccaagactgtgccagaagcgccgaaaaacacaaaggagccaatgaactaagagatcaagacctctgggcagaaaggagaaaacaagaaaaagggaccctgcacaatagacatcccaaaaggactggaaaaacacaaaggaagagggacaacgaagaacaaacagaggaacaaacaacaaccggcggcagagcaacaggcaccacgagacgggaaaagacagatagcgagaaagaaaacaatagaacacaaccatcacacacaacacacgaacaaacgagacagaaacaagcaaacaaaaggaaagacacacaagaagaagtaacacaataaaaaaggaagtgagcagaagaagaacagcgatacgaaaaacacacagacaagaggggaaagaggcgacagagaaagacaggacaaaacagaaaaggcaaaaacacaaagagagaaacaacaaaagacaagaagcagcaacacgacaaatcagcagaagccagc

SEQ ID NO: 725925 - DNA, 828 bp, Homo sapiens
  misc_feature (34)..(34): n is a, c, g, or t
  misc_feature (153)..(153): n is a, c, g, or t
  misc_feature (164)..(164): n is a, c, g, or t
  misc_feature (168)..(168): n is a, c, g, or t
  misc_feature (190)..(190): n is a, c, g, or t
  misc_feature (198)..(198): n is a, c, g, or t
  misc_feature (201)..(201): n is a, c, g, or t
  misc_feature (254)..(254): n is a, c, g, or t
  misc_feature (302)..(302): n is a, c, g, or t
  misc_feature (326)..(326): n is a, c, g, or t
  misc_feature (331)..(331): n is a, c, g, or t
  misc_feature (378)..(378): n is a, c, g, or t
  misc_feature (395)..(395): n is a, c, g, or t
  misc_feature (431)..(431): n is a, c, g, or t
  misc_feature (470)..(470): n is a, c, g, or t
  misc_feature (486)..(486): n is a, c, g, or t
  misc_feature (582)..(582): n is a, c, g, or t
  misc_feature (747)..(747): n is a, c, g, or t
  misc_feature (768)..(768): n is a, c, g, or t
  misc_feature (827)..(827): n is a, c, g, or t
agcaattttagatagagtaaattaactgattgtnttaaaatgttctttctaaatgggtccactctgctgcgctaactgttggagtattctaaagagtctaaatagtgatatttaaaagtacgaaattaagaacatataagttagataaaagtnattagtttaanaggncaatttaacaatgtgtgagttnagaatggngtnatgaaatattgataaaaggccaaaaattaagtttccataaagatattaaaggngtgtgagaatactttgatgcgtataaaagtagctgagtgtgaattggngccatggattagatggttaaatgnaaaanagtggaagtgagaaggaataactgaagatgcgtgtggaaaaccagtnatgtagaggtgtgagcntagggtggaggagaacagggattagggaattaagcncgctggaagagagcttcaagtactttgttggagttagcnccatttagaatttaanagatgcaaaatatactcactatagataagattaatgtttcttaagaaagtaaggcaaaaataattcagcatgagctaatggactgctaacagaganaccaccaggtacaagtgcacacacatgcttggtgcctggccagccttccacctagtcggggaggagctgtttctcttcctggccgccagggggcagttagctcatggctgagaagtctctcaagggttcagttaaacaagcttccaaatcaaactcatcctccanttgactgtgcatgtgtctcancttggtgggtgtgccagagtacacatcaaagtcatcctgagagctggtctggggctcgna

SEQ ID NO: 725926 - DNA, 382 bp, Homo sapiens
tagaagaaccccctagagtggctaagcatgtttttttcgtcattcatactgtaaagggaaatgacggggtttttgattcggcagttgtttctcgctctctcgtgagagtgctcactctctccccctctctcccttgattaaatagttcccaggctgtaggcccgaccatacagatagaactgatatccttaagccaacagagcaacactaaactaagccgatgctattgctctaatttaccagaagcttctttaagaaataaatgtaaagcagggactgaagtataatcctaccatctcatcagcaattggcactgcaatacattatcctggaaacaactggtaaacacagtaagcccatttctgggcttttagaaaaacat

SEQ ID NO: 725927 - DNA, 278 bp, Homo sapiens
ataggtggatattagaaaatgctataggaggagtcacactaatactatcaactatcagtcttcccacagcttcaatcactgtcattattctaatcctactcctcacttcacaattttaagttctgcaggtttatgtcaaaagcaacatttccaccaaatgtacttttcaaggcataataagggttaaaattctaggcagtatcaacacacccccataatgcaagtacataggtactctaacagatgtggactttatttgctcatatgggaattacctt

SEQ ID NO: 725928 - DNA, 139 bp, Homo sapiens
tgggtcgtctagaggaccccggacatttgcccaaaagttagaactcaccacacaccatagaatcatacaggagagcgaccctatagtgtaccgaattggtgccaaaaaccttcttgtaagaagtcaaaccttatcatac

SEQ ID NO: 725929 - DNA, 662 bp, Homo sapiens
  misc_feature (238)..(238): n is a, c, g, or t
acaggaacacccttttcccaaaaattatttcctccggttcagcgccggaagtggttgaaggggccccgccccactatccggccctggagcactttgtggacaacagcgtttttcacggccccgcaacctgggagaattgtgccagcgccttgtacgcaacgtgaagaacaccagagcaaatatgtgtttgtgttcctgggcctcatcctgtaatgtgtgggaacgtcccctatgttgntggtggctttggctgtttttttgggggcctgttacattttttatttgggccccttggagtccaagcttgtgctttttggccaaaaggtgagcccagggcatcagtatgttttgggtggaggaatttccttcccctttttttgggtgggtggggggggctcgccctttttttgggtgttgggaacccccctggtggttttgggttcccccacttcctttcccccaaattgaggttgtggacggggaggagctgcaaatggaacccgtgtgaggttttttttgggacctgccggcctcccgggccagttgccccccccctgcccatgcctttcttgcagggtttttttgtttgggcccccaggcccgtcccattccaagcccggggagggatccccccttttaaaataaaatttttatgggggtca

SEQ ID NO: 725930 - DNA, 756 bp, Homo sapiens
gtggctctggtgagggcacgagggatcaccaccagctcgcctgctggcacccgcgaacatgctggcatggttctcactcttgctgcgtctgtgcaaaccagcacggactgcttcggaaatatggtctaaatataccccgacagtgttcacgtcagtgcgcgaagaataacggttaatcaagctgcactaaatgctcttccttgagaggattatgccaaggcatctactgaatgaaataccatgatgactctttgtgtataacacaaacctttgaaaagagctcccgcacatccatgcctttgcactgtagaccctgtccccacaccagagtgtacattagcgacagatatgacgtactgggatatgcacagccatttaggcatatatccccttcagggagtcgaattacaattcactgccccgtcgtttaacaacttggcccatgggaatctagtgtcgtgcccgattttaattgcgttcgaaattatagctcttttgccaaatgcggtatatagaaagaggccttacactatactgctcgccaaatacaaccaccctgatgggaaatcgctagtcgtacccatcttattcggtaaaatacatgtcaatttctccaaatgcagttaatttataaacgcatgggccgatatcggtaaaaactttttaactaaagaatggccacgggatatggtaggcgtttttcctgttgaacaaggtccactttgaacggggcttcacttacgggctcgtataggc

SEQ ID NO: 725931 - DNA, 930 bp, Homo sapiens
  misc_feature (94)..(95): n is a, c, g, or t
  misc_feature (101)..(101): n is a, c, g, or t
  misc_feature (107)..(107): n is a, c, g, or t
  misc_feature (111)..(111): n is a, c, g, or t
  misc_feature (119)..(119): n is a, c, g, or t
  misc_feature (131)..(131): n is a, c, g, or t
  misc_feature (154)..(155): n is a, c, g, or t
  misc_feature (166)..(166): n is a, c, g, or t
  misc_feature (175)..(175): n is a, c, g, or t
  misc_feature (180)..(180): n is a, c, g, or t
  misc_feature (212)..(212): n is a, c, g, or t
  misc_feature (215)..(215): n is a, c, g, or t
  misc_feature (273)..(273): n is a, c, g, or t
  misc_feature (277)..(277): n is a, c, g, or t
  misc_feature (280)..(282): n is a, c, g, or t
  misc_feature (296)..(296): n is a, c, g, or t
  misc_feature (327)..(327): n is a, c, g, or t
  misc_feature (355)..(355): n is a, c, g, or t
  misc_feature (569)..(569): n is a, c, g, or t
  misc_feature (573)..(573): n is a, c, g, or t
  misc_feature (583)..(583): n is a, c, g, or t
  misc_feature (593)..(593): n is a, c, g, or t
  misc_feature (930)..(930): n is a, c, g, or t
gctggagtctcatttagacgaatgatcagcaatacgttttagaacatatgaactgagatgaaatggacatttttgctctaattcacggtataanntccagnatgatnatanatagagtnctgatgcattantaaaagcagccaaatagggccanngagaaaaatancaggactcngtacnggacctaactgtatcattagtaaggtaatatntcnctcatttcgttactgctgccattttcctcaccagtattccagagatggtcatagctcnttantannncacaagaacctaanaggaattagaatacagcagaatcggcctcangtgaagagcttaaaattgttctcctcgntagaactggactattgatcattaccacgtgacgttggcatctattactttctgttcccaatgtccttctagtggttcgagaatgttaaaacatccctaaaatctaaatcatataatcagaattctatagtgtcccactctatctgtaaagatcattggaagactttagactctattaattttaaaaggaatatttattagcatatgcagaattnctantgatgatatngtacagcttntaattcactttcagatcaggtttgaaatggccatatcaggtcggattaagtccaaacgtactgaactaccaaaaatgtaccttccagacgcacgttaaacggaccgggagacagtcaactcaacatgctaatgactcccccatgcggaccatacacaacacgcacgacagcccccctcactaacactatcaaaggactgcaatcgcggaccccagcacccaggcgggcgccaagggtgacagcggcaggcacgggcaacggcgagcccacaaaaagacggcagaagccacaggcaaacaaacgacggacgcaagcaacaaggcgcaacgcaaaactn

SEQ ID NO: 725932 - DNA, 834 bp, Homo sapiens
ggctcagctataggggacgctctcagctctcggtcgcatggcccagtttccttcaaaatgtctactgtacacgaaatcctgtgcaagcttcagcttggagggtgatcactctagaaccccaagatgcagtatgggtctgtcgaagctgtatactagatcttgtatgctgagcgggatgcttatgatcgattggaacagccatcaagagcaacaggtgtgggtgtgagggtccaccaatgttcatcattctgacccaatccgtaggaatgcacagagacagggattggttgcctatcggcgtaccagagaaggatgcaacaataggaacttgctatcgaggcacatgaagtcggcactttagtctggcacactgtggaggacggtgattttgggcgctattgaaggacatcggtggtacagatatgacgcattctggagactaagaagcttccgtgaaggggtcatgggagaccgatgaaggtagtctctgcattgatggatcatctgggtccagaaaccaagcgaggagactgtgaggagattaacagagtctacagggaaatgtgcaagagtgatctggagaaggacattatttcggataaatctggtgacttacgaaagctgatggttgccgtggcgaaaggggtagaagagcagaggatgggtctgtcattgattatgagatgatggaacaagatgctcggggaatgttgatgaatgctggttgtgaagagggaaaggagggttgttcccagggtggataaggagtaatgacgagcggagggtgcccatgtccagaaagtatttgaaaagtacaagaagttaagagtttga

SEQ ID NO: 725933 - DNA, 1226 bp, Homo sapiens
  misc_feature (534)..(534): n is a, c, g, or t
  misc_feature (633)..(633): n is a, c, g, or t
  misc_feature (771)..(771): n is a, c, g, or t
  misc_feature (845)..(845): n is a, c, g, or t
gaccaaggagccttttgtgggtgaattcaccgccgggggtgttttccccgcgggaagaatatttttgtcccccccggcgggggatatatatattttccgttttccgtaagaacctcctccacaacggcgcgctttttctcgccgggggcctcttctataaagagatggtgttgcgcacaacgtctcgtcttataatgggggagcatgggggaaaaaaatgcgcaagctcggttgttcttggcgcgtcccccctcgtggtgttttctgttggtagaggagaaaaaatttgcttatagggcgaacatttgtagtaccagaagaccacatgtgttgtagagagaagacagcacacaggtggagaaaaaacacataatagaacacacatataaaggcccttatatatagaaataaaagagatatgtgtgtgcgcacaaaatatttgagagaggcgcccgtgtttgtaaagatatttgtttataagtgtgtatgacgacacatatactcgtaacacacacacacgcagcattagagggnggtgtataacaaattttcgacaccacagggcgcttcttatacttcatagtgtgtccttctgtgggggtgtgtcccacaggtgatatttgttttcacaanatgtgggtgtggtcgtctctgctctcgcggcgcgtcgtcacatggtgatatgatatatgtgatatgttgatgagctcatatgctaagtgagactcagtatgatagtattgtggcgaacacactaagagtggtttatancttgtggcccttctctcacaactatatagagagatgttctctagaaataagtgtgctctgtgtgttctctgtgnggtgattccgtgatatttctctctatagatatatagatactagatagatgttaagatatgttgttagagagacacacacgcggttggcacgagtttctataaatgatgtgttgtctggtgtctctgtgtgtgtttttggtgcgtggggtggtggtataataaaagagcacagagttttttctcttttctaatgggttatatttaaaaacaattaagcggtgcgcctgtaaaataaattctcttggttaataaatgcgtcttggagaatggtgttgtaagagaagttgtaattaggagattaaggttttaaaaccttggtttgaaagccacattgttttggttatttttattaaaattagaaaaattgaaaaaggttttcca

SEQ ID NO: 725934 - DNA, 741 bp, Homo sapiens
  misc_feature (138)..(138): n is a, c, g, or t
  misc_feature (166)..(166): n is a, c, g, or t
  misc_feature (380)..(380): n is a, c, g, or t
  misc_feature (384)..(384): n is a, c, g, or t
  misc_feature (394)..(394): n is a, c, g, or t
  misc_feature (404)..(404): n is a, c, g, or t
  misc_feature (741)..(741): n is a, c, g, or t
aataaaggtaatatagactgcgttatttaaagaagcgaaattgtctaaacaggatttaagaaagatgatgaaagctcagtaactctaacgagaaagagaggtagaaagaagataggatacgacgagaatcggcctcangtgaagagcttaaaattgttctcctcgntagaactggactattgatcattaccacgtgacgttggcatctattactttctgttcccaatgtccttctagtggttcgagaatgttaaaacatccctaaaatctaaatcatataatcagaattctatagtgtcccactctatctgtaaagatcattggaagactttagactctattaattttaaaaggaatatttattagcatatgcagaattnctantgatgatatngtacagcttntaattcactttcagatcaggtttgaaatggccatatcaggtcggattaagtccaaacgtactgaactaccaaaaatgtaccttccagacgcacgttaaacggaccgggagacagtcaactcaacatgctaatgactcccccatgcggaccatacacaacacgcacgacagcccccctcactaacactatcaaaggactgcaatcgcggaccccagcacccaggcgggcgccaagggtgacagcggcaggcacgggcaacggcgagcccacaaaaagacggcagaagccacaggcaaacaaacgacggacgcaagcaacaaggcgcaacgcaaaactn

SEQ ID NO: 725935 - DNA, 217 bp, Homo sapiens
cctttcctttaaaagactgaattgattgaattatgctagatcgtgctataacaacaaactccaaaactggaggtgatgacatttattttcttctttctctctccactcctcagattcatcacctctccccatttagaacggatcctcccgtggtctgtgcctcctctaatctgactcaatttcccacccctccatgacttcctaacaccttgcacta

SEQ ID NO: 725936 - DNA, 489 bp, Homo sapiens
taaagatgggtcagatagaccatactgaagggtaaagggacagcagacagtaagctcaataggttagagcatggcactaatagagggtagagggaacgagtgagcaagaggatcaccctaagccgtgtgtagtaggcgcatactactgtgcagctgtatagagtactcatgggtacagggccctttgcattctaatgagacggaccgactcccccggtgtagtagcgttctactgcacgattagccagggccttgtctcctgcctttgaactgagtcagtggagctctactagaatactactacatggactagagagccgctggaaagatatccgtgcccggataatttctcatcgccagcaaagagcttgagttgatcaacctgacagtgggctatacggcatcctcatcttctccctcatcgtcacctaatgcatcaatagcaaagctgatgtccttctcatagcttcccccgggagccaggaactg

SEQ ID NO: 725937 - DNA, 303 bp, Homo sapiens
tataaaatagctttcgactatccacagctctgtaaatgcacctttctcatgtccaaataatactgaatcgatagtaccttcaggatagcaccgcagtcaccgcaatacaaggattatgcttgcccgatgataagagaatggatgatctgtgaaaacacttctttaccaacaccactttctcctacaatcaaaacggttagatcagtagctgctacttgtaccagccgtattgagtgcatgattcagcgatggggaattgccgataatgccaaacctgttttttatactttgaagatccataga

SEQ ID NO: 725938 - DNA, 235 bp, Homo sapiens
gggacacactcattgaaaggatattcctactcctttatattacttttttttttttgggggcggggtttaattcctataccccggcctagagggcgggggggggatcacggttaattgcagcctaaatttccagggctaaggggattttcccccacttaagttttaagagtggcgggaactaccagaacatgctaccaccccgggttaattttggaattttaagaaaagaggaggt

SEQ ID NO: 725939 - DNA, 411 bp, Homo sapiens
  misc_feature (1)..(1): n is a, c, g, or t
  misc_feature (5)..(5): n is a, c, g, or t
  misc_feature (228)..(228): n is a, c, g, or t
  misc_feature (263)..(263): n is a, c, g, or t
  misc_feature (306)..(306): n is a, c, g, or t
  misc_feature (349)..(349): n is a, c, g, or t
  misc_feature (361)..(361): n is a, c, g, or t
  misc_feature (372)..(372): n is a, c, g, or t
  misc_feature (374)..(374): n is a, c, g, or t
ntgcntaatcctggggtattcggcgatgaaatattgatggcgatatatcccgcgcggcaatgctgcaaaccggtgaagcgcagtttgctttccccattccttacgagcaggccacactgctggagaaaaacaaaaatatcgagttgatggccagtccgtcaattatgcagcgttatatcagtatgaacgtgacgcaaaagccgttcgattaacccgaagtccgtgagncgctgaattacgccattaaccgtcccgggcgctgngtgaaagttgccttttgcgggcttatgcaaacggcagctactnggtgtgggtacccgccaagtatcggcttacggggcaaaagttnataaaacccgtnggccttaccgntnccagtggaaagccgcgcggaatttaccttgaaaagag

SEQ ID NO: 725940 - DNA, 442 bp, Homo sapiens
ctcggctccacgtgggttgctgcctccaagggatcccaaagttcatctgtctctgtgatatatctagaggcgtcacctgtggggttctatgaggctcttggggctcatctctcccagttgtctcctgtctgtagaagaggaggcagttcaattgagacttgagataaagcttatgctccagaccccgtggattctggatcctgtgtatcctcaagactctgtcccatccacgaggaggtctagtagtaggcttggaagggtggcactggaacccacgcgacactagtcgtggccagctcggttcagagagcccagtaaacgcccttggcggaaggtcagtttctgccagctgaccttgagtgtgtcccacatttgcactgagttgcctcccggagtgagcgtcatggctgtaaatgggtactgtccataggtggtctctagg

SEQ ID NO: 725941 - DNA, 751 bp, Homo sapiens
  misc_feature (267)..(267): n is a, c, g, or t
  misc_feature (313)..(313): n is a, c, g, or t
  misc_feature (468)..(468): n is a, c, g, or t
tgggctctagagggggtaaagggggtgctatagggtacatacggaccctatttcaaaaatttaaggggaataaattctaggacagtggggcttagaaactggtggtttggctccacaggttttcaagagcatttgacctgtatgtatacccccgggtctgtgtagcgggtagaaatgtgtgttgggttataagactgtccgggagaattgctctctggttttataacgctctataggtggggagacacgtctcatagatgtcgcaanagacgtgtctttgtgagatgtgtacatttatttatcacacgaatgnggggcgcttacaactccggggatgtcactaacttcagatttgtgctcaacctgctcaaggagatgctccgcatgtgttccgccttgggtctcatagagaattacatgtgcgggagacatgtaatgtgtacgagatgttgagacaagattaatgtncccgcgcgtaaatccgggtgtgtaacctccgtaagtgtatccacatgtacacctattgtggtgtgcggccaattgagatcttgcgatgcgtcgtaacgggagagggagacttctgtatgagaccttcgagtcatgggtaatttgttaaacggagaatcgcagattaggagattggagatgtggccagatagaatggacctaaggattagaatgtgcggggcaggagaaatatgttccacgaacgggtgttcataatttccttgaagctgtcttgaaaactgta

SEQ ID NO: 725942 - DNA, 181 bp, Homo sapiens
tcataaccaatgatgtggaagtaacattgcaatgttattagctagcagaaaagagatgaactcaatattaaatcggcataaagggacacatcactggcagtatacacataaatatgattaacgggatgcatgaaaatcttatgcgaacagtaggtagcctggcagatgagtctagatgcag

SEQ ID NO: 725943 - DNA, 417 bp, Homo sapiens
ggggggtgcccaaatttatgcctttatatgtattagcaaaataggccctgcaagaaatcgaatctttaatgtggtataagatttgatgcataccagtaacgcgtctaaataggtctgctcaccagtcactaaacaccaaaaacagtcaagtgtaccatagacattgactcccagagttaattacaggttaacacgaaaagggtcaacctcattctatacccccaactcctgtgaaatgccataacacgtattgtcaaacaccttagtctctatgatcttgcgtggaggttcaccataaacagccagaatatcagtggttctttcatcaatagtcaatgcctctctgtgacagcattagaagtcagaagaaatccccctgagacttcaaaaatgcattcattccaagaaaagcttccc

SEQ ID NO: 725944 - DNA, 229 bp, Homo sapiens
gccacccgggggcttttttttttttcccccatttaaagggaaggggccccccccctctaaccccccccccccatttttgaatggccttttttccttgggaaagaccaggggtgggagggggggacaatggttggggtttccggggggggtcggttcttgtcccaaagggatttggggggggggggggccttcctttttgggaaaaaggttttttaatcccttttcccca

SEQ ID NO: 725945 - DNA, 1214 bp, Homo sapiens
gccttaggcttcctcaaggagcaggttcagcgggatggagcagctgctgtcctcgccccaagggggtctgatcctctgagtatgccctctttacgttctatccagtccttacgaatcgtgagtctgagcccctttagccttatcggcaaatgtggtagcggggcgtcatccatgcgcaggggccctccagctgctccagagaccttgcagggctcctaggcacagggttgaagtcgtcgtctgagcctgcgctccttcgtccccgctgcaacccggggcaggctgcccacaggtgcggagactctagcatgacccattgtatcacggcgtactggaggatggactgccaggatcaagccagggtccgagggaggcagcgctgtggtgaaggggacagtctgtcacgaagtcctggtgtcttgtcagacatatgcaataccgactagaggatggagtcctgcagtgcccgtctactattgcaggcagttcctactaatggcagcagtgctccatggactgaacctgaagtcggcatgtgatgggacacgccgtgcagagtgatgacgagtggagaaaagcacccacttgatgaaggtggcgcatgagtggcgccagggtgctcaagagatcctagtagcctagaggtctcagccccaagtggatagcgttgtgcgtgacttgctccaagagcgtgtcaagttcacctgcaggatccaacgtccagtgcgaatggcggcctaacaagagtgtcctgactggatggcattcgaggaaaacttgttggtggatgatgcgccgggtttcgcctctcaagtaactcttcaggctgtgctcctttaactaggggggcgtcccacaggcattttggcgccacaggggcaataccggtgacgccttaaagtgccatgcccaagtggaaagtcgcccatcagatggaccacaccttggatcaaggggttgccaaaaaggggaagtcaacgggaacgcctgtgacggccgggagaacccgaggctagccccaggcactggatgccagacaagagatcgctggggaatcccaggcggtgcagaccaggccgcgccctgtgaggggaccttcacggggccacactggggacgcccccaagtggggcgccctactgagacctaaagcgggcggagcccaagacggcgcaaaatatgagaggggtaggcatgggactcggcctcaacga

SEQ ID NO: 725946 - DNA, 126 bp, Homo sapiens
  misc_feature (110)..(110): n is a, c, g, or t
  misc_feature (123)..(123): n is a, c, g, or t
aagaaccgtccagagctgatgacgctggggatccgggatcaaattggcgggggctggctgtgcctcaattccgcaccataaagcttcaaactccctaaaaaaaagggaanaaaggggcgccgntcg

SEQ ID NO: 725947 - DNA, 124 bp, Homo sapiens
agaggatccccgcgtagcaacaagtctcgctaacatttgcagcaataaggagcctgttcaagagggtatgtgctactgtgaattccagttgctattattgcccgacgatctctgtctgctaccc

SEQ ID NO: 725948 - DNA, 103 bp, Homo sapiens
cggcagacgacggggcgccccgcccgcaaccccggaaacagacccgcagggcccgggccgaccggcgcggcaaccgggacaggccaacccaaggccggaaccg

SEQ ID NO: 725949 - DNA, 278 bp, Homo sapiens
ccagagtcaccaaggaggcatgatgctggcacagaaaacccttgtcagaaattcctattccttaattttatgctctttctttcattcttttctcacttcattgtcatacaggcaagtgaaaaagagtggaaagagaagaggcggtgtcaaaggaaaagagaaaaaatacacctgactcctgttgtttatgattgtcttgtcagttaacacctgggcaatcatcaaccatgtactttccttgagccaggtccttaaagaacccaagatgaaggaagtag

SEQ ID NO: 725950 - DNA, 545 bp, Homo sapiens
tcaccttctccaccgcgcatgtccccaacacgtgggaagtggaagctgagaagggaaggcagatgggagaaaccaataggaacttctcagtccttttttcctctttggggaataaaataggaatccattatgagtgctttgctgactgagaatgtagttgaaattattcttaaacatcttttattattactctcagtagcaaaatatcacactgaattcttccatacacaggcgtatttctagtcagtgtggagcaaagacagtcccgtttgctgctcctgtgagaggtcagtggtgacaggacagggaactgacctcttaagccagtgggagtgtttcataggcgagggtacaaggccccttagaaggttctgggagaggccttcctccagcctggaaactccagcaggaaatgcccttcactctgtaggtgctcgagccccaatagaggatgcagtgtggggtagtgctgctggcctagaccagcagaatggctgctgtacgatttcaaattcatgtggtggattcctacactttacagtagc

SEQ ID NO: 725951 - DNA, 537 bp, Homo sapiens
ggaggccctgattctgggggctgaggtccctgaccctgagccactgccagctctgcccccgcaagccccgctgtccctgcccacccagccaccgtccccattccatcacctgtgacttcagccacagcctgagctttgggggcagggaggacgagggtcccccgaggactaccccgaatccccatggcgcctgtggggcagtgctccccattccccagacctgtccaagaaggatctgggacgctcatgctcctggacgactcactgactacacgctggcctctgatccacgttctgtccagccaatgtcccaccgaggacactccaaaggccgagcaggaccgccgcgactcccaggcctttcacggcaatgcgaagggagggcagagtagtcgctgatgaacccgtaggacttgcacaccctggtgcacagcggaaaccagggcgccggcacttgagagagcttggagatgagccaaagggcaaacatcacatcaccagccgcgttcaaaggagcgcaatgagtgtaaaagaaga

SEQ ID NO: 725952 - DNA, 117 bp, Homo sapiens
gggtccatgtctccaggcggggcggtccccatgcactgcctgctccatcctccccactcctgtcttgctgtgctggaaactcaactccacccctttctatcttagtggccttagtta

SEQ ID NO: 725953 - DNA, 168 bp, Homo sapiens
gcttgaatactgccactgcccacaacatgagccgcgtggacatgggccatacccaactgctcattggctatcagtaaacacagccttgagctctgtaatacgtgtgctgctcacataccctgcatgactcgctatcacccgaagaaggaaagtgccagctactccacc

SEQ ID NO: 725954 - DNA, 254 bp, Homo sapiens
  misc_feature (124)..(124): n is a, c, g, or t
atatcggaggtcaattcatttctcaaaacagcagtaaaattaaaaattttcatgatttgagaagccttggcttgaaaggaaaaagtcctaatagtagaagaacccctccaaaacctggagtgantatatggatgcccccccccccccacacacatttgaagaacccgtatacataaaatttagacaaaaaaggaaggaatcgaaccccccaaaggtggtttcaagccaaccccatggcctccatgactttttca

SEQ ID NO: 725955 - DNA, 446 bp, Homo sapiens
atccgggcagtacggatgtgttttgttttgttttgtttttttaataatgtggcaaatgttttatttctcttgtatgcaagtaactgactctcaagtatttttaaaaacacatcattacacttaagtaagaatgttataacctacaacattcttacatatttaatattattgacatatttgaatattgtttattgcttctgccattatacacagaatagttttttactttcctgcttcttagacttttctctgacagcttagactttttacaaaatgagccatcccaccagttcctgtggaattcattgtttctcagtgtttgcaaagttacagaacattgtagtgcttcagcacatctccaaagggctccttcctctgccttcctgccatctttcctgctgttgtttttctcactgtgcctatctggcagagcaagattgtggtga

SEQ ID NO: 725956 - DNA, 1058 bp, Homo sapiens
  misc_feature (142)..(142): n is a, c, g, or t
acctcttaaacggcactcactatctacatgagtacacacatcaccctcctggtcatacacctattcgcctagtgcttcctccgtattccgtcagaacgccagacattaaataactcagaggtgtgttcacttgcgtaataanatataaagaccatacaaaacatacaatatacatacaaaaacacacaccatgaacaaaaacaacaataaacacataccaccattcgcgttgtactatcgcctatgaggacagtaacttatacacacagctccatcgtgccatacgcacaaacaggagccgtaagaagtcgctcagttgcagtagcgtcgtgtcaagtcaggccacataggccctcgtagtaacagccattctcatccaaaccccctgaagcttcaccgggcgcagtcattctcataatcgcccacgggcttacatcctcattactattctgcctagcaaactcaagagcgtacgaacgcactcacagtcgcatcataatcctctctcaaggacgttcaaagctctactgcccactaatagcttttggatgacttctagcaagcctcgctaacctcgccttaccccccactattaacctacggggagaactctctgtgctagtaaccacgttctcctgatcaaatatcactctcctacttacaggactcaacatactagtcacagccctatactccctctacatatttaccacaacacaatggggctcactcaccagcacattaacaacataaaacctcattcacacgagaaaacaccctcatgttcataaactatccccattctctctatcctcaaccgaaatcagttaccggcgtatcctctttaaagagagatacacacaaaaaaagagggagcggaacacaaacaacaaaaccaaagcgaggccaggcacagcgccccgaaacccaaagagaaccacgatgagccacgtgcaccaggcccctcaaccaaaagcgcgccccgcgcgagaacaacaagcgtagaaccaacgatggaacaaagccacacatcaaaaaaaagggagcacgcggggaac

SEQ ID NO: 725957 - DNA, 210 bp, Homo sapiens
  misc_feature (89)..(89): n is a, c, g, or t
aattgcaccacccgtaccgccaatcacggcacctttaatcgccccttcgaggccattgcgtcagaacgccagtagcagcaccaacggcnggcacccacttttgcaccttttgactcgagcattttttgcaccgtctcgacttggaacctttttctgttactgcaccaacaccagctgaccaacagctgctgccatttcagtcactgatta

SEQ ID NO: 725958 - DNA, 141 bp, Homo sapiens
tagctgttattagaagtgggctagggcatttttaatcttagagcgaaagctataatcactgcgcccgcttcataaggggatggccatggctaggtttatacgcatagttgggtggttcggtgtcaatagagtacaggcagg

SEQ ID NO: 725959 - DNA, 265 bp, Homo sapiens
tgtcttgggacagaacaccgtggactgtatacttgcattgagttggaagcggtttgcatttacgcctgtaaatgtattcattcttaattatatgtaaggtttcgttttgtacacaattctcgattctgtgacgagatgacaacaaattaaggtttgctactgttatgtgagaacattaggccccagcaacacgtcattgtgtaaggaaaaatagaagtactgccaaagacttcgtcctctactggcccccggtccgtatttacca

SEQ ID NO: 725960 - DNA, 326 bp, Homo sapiens
ggtcccttcagcttttgattttcaacacaaaataaggtttgctttctgtttttaacaataaagctgacttatctttgtatttgattctaccaagctataagccctgacacactgctatatttctggaacttacaatggtgttcggaatgtaggtaaaaactgagcaaatacttgtggaattaatgaaggtataaagaaataaacaacaaaccaaggaattctcacattgaatgtcactgttcctatcttttttttttttttaatattttatggaaagaggagctcccccaagggcccaggggggggggaacaggggtaacctgggg

SEQ ID NO: 725961 - DNA, 795 bp, Homo sapiens
caataacccctcggagcaggagctggagatgtgagcctcgcagctgttccctgctagagcagctgggcctggcctggggcagaccttgcggcccccggggtacagcagcagctggagctggagcgggatgcgtgctgcggctgggaaatccgcaaggatgctgaagctgaaggagggtgctgagaacctgcggcgggccaccactgacctgggcgcagcctgggccccgtagagctgctgctgcggggctcctcgcgccgcctcgatctgctgctccatgcagctgcagtgagctgcacgcccgacgtggtgcttcccgacccggctggacacccgacgatggcccccagtcccctggtgcgggtggacgccacctgctcggccagccaaccatgagccgacagtggcgggcctggagaagcagttggccatttgatgctgaaggtgaatgcaggggggcttggagaacattgatccaggagctacatgcaatggcgagcaccaaggaccggaagctgcgtgcgtgacagcctcagcagatgttgcagggaccagtaagaccaagattgagcatcatccgaatgcaactccgggcgggcgcttgcaaggccgtgccagctggagaaccagggaagccccggatgacaaccaaggggagtcctgaccctggggcgctgtggagcttgcgcatcgacagcttgcgggcaaccaatttccggagtggaagcacggcggtgggccgaagggtgccaacgaaggctactgagccgtgcacagccgctgcaaaggccccga

SEQ ID NO: 725962 - DNA, 331 bp, Homo sapiens
aaccctatcggccttgtcactggccttggtccctttgtatttttgttttggttggaaaaaccatcagccttccttggtcggcccaggtttgtttcaggcattttagtcggcgttttcccaagggccgggccaaaaacgggggttggccgcttgtttccacgctccttctgccccagccctttggtgtccccccctgcccccaaaaaatgttaacccagtggggtttgccccccccgggccccaaagttaccaaactccagcccccctgtttcctcctgcctggggtggcccttgggatggaaaggggtggaattaaacctgtcccccttta

SEQ ID NO: 725963 - DNA, 322 bp, Homo sapiens
acgaggattccggtcatggtgagtctccttgtcatcaacgccttgtgctgtgcggcagaagaccgcgcggaatcaggccgccgtagaacagcacatgggccacactggccagccctgcgacagcacaccaggtggctgccgtggtgaccgtggtgaccaggcgcgccgcgtcggccgtcttgtcagcatcgggacgggtcccggaccccagtaaggggcggaactccacccggttgccgtagtagacgttacgtccgccgagttgaacaccgagggccgctgcccaggccgactcgcaccagccaccgttgggactgggatg

SEQ ID NO: 725964 - DNA, 845 bp, Homo sapiens
  misc_feature (104)..(104): n is a, c, g, or t
  misc_feature (144)..(144): n is a, c, g, or t
  misc_feature (148)..(150): n is a, c, g, or t
  misc_feature (156)..(156): n is a, c, g, or t
  misc_feature (160)..(160): n is a, c, g, or t
  misc_feature (251)..(251): n is a, c, g, or t
  misc_feature (253)..(253): n is a, c, g, or t
  misc_feature (255)..(255): n is a, c, g, or t
  misc_feature (284)..(284): n is a, c, g, or t
  misc_feature (305)..(305): n is a, c, g, or t
  misc_feature (307)..(307): n is a, c, g, or t
  misc_feature (309)..(309): n is a, c, g, or t
  misc_feature (311)..(311): n is a, c, g, or t
  misc_feature (313)..(313): n is a, c, g, or t
  misc_feature (322)..(322): n is a, c, g, or t
  misc_feature (341)..(342): n is a, c, g, or t
  misc_feature (347)..(347): n is a, c, g, or t
  misc_feature (363)..(363): n is a, c, g, or t
  misc_feature (380)..(380): n is a, c, g, or t
  misc_feature (382)..(382): n is a, c, g, or t
  misc_feature (384)..(384): n is a, c, g, or t
  misc_feature (399)..(399): n is a, c, g, or t
  misc_feature (401)..(401): n is a, c, g, or t
  misc_feature (404)..(404): n is a, c, g, or t
  misc_feature (413)..(413): n is a, c, g, or t
  misc_feature (433)..(433): n is a, c, g, or t
  misc_feature (435)..(435): n is a, c, g, or t
  misc_feature (444)..(445): n is a, c, g, or t
  misc_feature (461)..(461): n is a, c, g, or t
  misc_feature (465)..(466): n is a, c, g, or t
  misc_feature (472)..(472): n is a, c, g, or t
taaagttttaaaacttttaattggcatattaaaaaaatggtgcattccaattaatttaaaactcatttgaacaaaaaaaaaaagggcactcgtgatttaaacgngcatttacagccgtgcaggacaccttggggccagcttggntttnnnctctanattncacgtgtcgtcccaccccacttttttccacccaactttctttcctttcaccaacatgtgcaaggtatcttttcctttccctgtgccagcananantaggattaaacagagattggagaaagggnagggggcgggcctttcgtggncnanangntctcttggnagtggtgaaaggggccacnnaaagntcaatttaaccttggnatccaaccttcttgtgncntnttttacaaaagtttnanacnagcttaaanagaaagttaaaataagaaangncaaggcttnnggtggaagtgttccangggnnaatatntgggggcggggccgcaaccgccctctccatattacagaaaatacgggccgtgtgaatgggccgtttctctcacagggttctacaaactcgggtatctctatttggggaaaggggcacggggcggaatattacccatcaataggcgggtcactcaggaggctatccttccagggttctcgagacccttatttcagaaaattttcgtcggactcctcagggccaatatttcgggggtttgggtccgagaccattgggtttcgggaggcggggaaaaaggccgaaaacagaaggggggacaacgaatttacaaagacaaaaagtcccgggtcatgggcgccaacggggcgactaaggttcaaagaatcccgacaag

SEQ ID NO: 725965 - DNA, 425 bp, Homo sapiens
  misc_feature (29)..(29): n is a, c, g, or t
  misc_feature (47)..(47): n is a, c, g, or t
  misc_feature (249)..(249): n is a, c, g, or t
  misc_feature (281)..(281): n is a, c, g, or t
  misc_feature (347)..(347): n is a, c, g, or t
  misc_feature (363)..(363): n is a, c, g, or t
ctgtcccctccactaggccaggagcagantgacccaagcgcctctgncgttccactagacccttcccctggagcaacagtggcagggtggcttttgggcatcatcttacagatccttaaagatgtgagccagccattctttatcgtgggctccatcagggcagaaactgtcttatctgtaataccaactcatacttaaatgagggggggttccaatttgatctactttgtctcttcaagattggtagcntttctttggggtcattggttttatatgtttcnataagtgttgaatgtccacagccatagagtatggtcttgtttagaacaaacactcattgcataggnttgaatcattgggtanagagggtccatcctggtacttctcttaggcgtaacttttgcccctcagagtccacctcttgc

SEQ ID NO: 725966 - DNA, 553 bp, Homo sapiens
  misc_feature (8)..(9): n is a, c, g, or t
  misc_feature (20)..(20): n is a, c, g, or t
  misc_feature (25)..(25): n is a, c, g, or t
  misc_feature (49)..(50): n is a, c, g, or t
  misc_feature (58)..(58): n is a, c, g, or t
  misc_feature (67)..(67): n is a, c, g, or t
  misc_feature (69)..(70): n is a, c, g, or t
  misc_feature (77)..(79): n is a, c, g, or t
  misc_feature (93)..(93): n is a, c, g, or t
  misc_feature (105)..(106): n is a, c, g, or t
  misc_feature (114)..(114): n is a, c, g, or t
  misc_feature (119)..(119): n is a, c, g, or t
  misc_feature (122)..(122): n is a, c, g, or t
  misc_feature (125)..(125): n is a, c, g, or t
  misc_feature (127)..(127): n is a, c, g, or t
  misc_feature (137)..(137): n is a, c, g, or t
  misc_feature (142)..(142): n is a, c, g, or t
  misc_feature (165)..(165): n is a, c, g, or t
  misc_feature (189)..(189): n is a, c, g, or t
  misc_feature (198)..(199): n is a, c, g, or t
  misc_feature (203)..(203): n is a, c, g, or t
  misc_feature (208)..(208): n is a, c, g, or t
  misc_feature (210)..(210): n is a, c, g, or t
  misc_feature (212)..(212): n is a, c, g, or t
  misc_feature (215)..(215): n is a, c, g, or t
  misc_feature (218)..(218): n is a, c, g, or t
  misc_feature (221)..(221): n is a, c, g, or t
  misc_feature (226)..(226): n is a, c, g, or t
  misc_feature (243)..(243): n is a, c, g, or t
  misc_feature (245)..(245): n is a, c, g, or t
  misc_feature (250)..(251): n is a, c, g, or t
  misc_feature (255)..(255): n is a, c, g, or t
  misc_feature (264)..(264): n is a, c, g, or t
  misc_feature (283)..(283): n is a, c, g, or t
  misc_feature (289)..(289): n is a, c, g, or t
  misc_feature (323)..(323): n is a, c, g, or t
  misc_feature (339)..(339): n is a, c, g, or t
  misc_feature (345)..(345): n is a, c, g, or t
  misc_feature (351)..(351): n is a, c, g, or t
  misc_feature (354)..(354): n is a, c, g, or t
  misc_feature (364)..(364): n is a, c, g, or t
  misc_feature (373)..(374): n is a, c, g, or t
  misc_feature (392)..(392): n is a, c, g, or t
  misc_feature (408)..(408): n is a, c, g, or t
  misc_feature (411)..(411): n is a, c, g, or t
  misc_feature (415)..(415): n is a, c, g, or t
  misc_feature (419)..(419): n is a, c, g, or t
  misc_feature (427)..(427): n is a, c, g, or t
  misc_feature (504)..(504): n is a, c, g, or t
tgaaaaannaaagcagtaantttantcttaaggtggcactttaaaaaannaaaagggngaaggcctngnnggggggnnngggggggggggtgngggggggggggnngggaaagnggggnagnggnanacccagaaangaagncccccccaaccccaccccggggnccaagcagagacaaggcctcaggntagcccagnngggnttccngngnccnggntgnacagngctaggccaaaagaccncnggggnngggncacggcccnctagagactgccgccattngggggncagccacaggccaatgtttcctgggcccaaagangggagggggccccccncccccncccctnggncagaaaatcngcctggggnnggggggggggctacccanccagcagcttcagggngcnctcncgcnccttcagngtcttccaggcctggtccttttctttcttggggggggtccgcttcttctgccgggcagccatgatcttgcgaaaggngtccatgacctcgttgtcagccatgcgcccccgctgcctcagctcctgc

SEQ ID NO: 725967 - DNA, 302 bp, Homo sapiens
tagacatatacaatcgagctcgtgtacccaggtatactaaccaaaccaaacaaccaaagcaaaccaaagcaaaccaaaccaaaccaaaccaaaccaaaccaaaccaaaccaaaccaagaaagccatttttgatttctctggtgttcgcgtgattaacatgggctgtgaaatggttttctgcagttcacattgtgcgcaatgatacctgtgtgcatctgtggatcatatgtatatactgtaagtgcttccctccccctcacattatattatagagtttccattctgaggttaggtctacctgg

SEQ ID NO: 725968 - DNA, 146 bp, Homo sapiens
gctagctccccagacaccactaacgcgtaaatgtgcctcctacctacctacctatacacacctcgctcaaactcatgacgaagacagggcagaggtacaggtccagtctctagtaggggactcaagaaaggtgaaaaagatccaat

SEQ ID NO: 725969 - DNA, 604 bp, Homo sapiens
  misc_feature (207)..(207): n is a, c, g, or t
  misc_feature (277)..(277): n is a, c, g, or t
cccagattccccacttataacatgacgtacttgtaaaggaatgtatttatctaggtgcttcttggaaaatgcagacaatgccttcaacaagaacgcggtcatgacccaagtctctgagtgtagtgcagctcacatgatattgctgtcccatatttgactccccacaattcttctcctcctctgatgaacgactttattggaggtcanggattgaactgggaaactgacagagagatgcatggcgtggacagaacgacggtgactccgtccacccggngctcagctgtgcttgcctttcacgttcgctggacattctgcttccctggtttttatttttttccaagagtctgactcttattaactttgtaactcgaaaaaatcttatttctggacgggatccagacgttagaagtagaagctcgcagagaggaaagtcggcgtctctccgcaattggtccctggcgcttctccttagcctccttaattctctgggccaaaagtttagcatattcgggagcctcttcttaatttttctgggaacgcggcttcttcagagcaatacgccgccgttggtgctgcaggacacgtggagtaacaagacgct

SEQ ID NO: 725970 - DNA, 459 bp, Homo sapiens
atggaatccctttcccgatgttgttttgacattgaacattgtttctgtttacattgattatatctgtaaatggccagtctctggaaaatgctccatttgaccaccagctccatgtaaaacctcttatccaccgagtagcatcagcttcttcctcctctagagaagggtcagtgatcagaggcagaggagcttattgtgcaggaacctactagaccccagtgagctcacagtggctactttagaaaatgccaccacaggcctcgattatatcacagaccagggaaaccctccccatgatacagagatttttgttgccagcatagtttgaggcagtcggcaagaacatcgctggtccatgccggaaaccctagtgtacaattctgggccctggcctctgatagcctcactgtgcagctgagcaatgccttgatctgcttaaggaccaaagaggcagagccc

SEQ ID NO: 725971 - DNA, 920 bp, Homo sapiens
  misc_feature (916)..(916): n is a, c, g, or t
ggtaactcctcagaaagatatcaaatctcagaaagaatgtcaaatcgaagatgagagttatagttaggattctaactactgtaaaagattttggcttccctcttgtggtaaacaaaacttatattctcacacatttcttatgttgctctacagacggactaatctgtagaggaagagcatttgaaagcgagatttactcagtgaggtacatggatacaatcaagttcattttgcggagaacaaataactggaaataaaaaaatcagtgttaatccttgtatcatagtcttaatactgaaaggtatgtctgatagatacatttatctcacaagtcaagaagtgacagattgtgcagcactgaagagtctatgacagctccaaatttgaatgtccctaaataatctacgctgaaatctaagatatactataacaagccggttttgatgggtgaaagacatattaagagcgatgggctctcaaaatgatcaaagtattgcttctctctgttgatattaagagacgagaattgttgcatgagttcacttaattactgagatattcagagcatttttggacctctctctgcgtgttattaccaggaccattgtattttaagactggcatcatcaaagtctgtccgtgctcaattccatatgagcaatacccttcctaaagactgaaatttggagaggttaccctagtaaaaatgggcagtggttaccgggggacctatgagatgttgggttacttaacgggcatcgggcaaggacaatggtaactcagtcaggcaaacggaggctgaggcgaaattattacaaggggtcgagcgcacaagagaggggatcgacacggcacacggggcaaagagagataacgcgcgacctctttttctatataaatattcctacaacaaggnggcg

SEQ ID NO: 725972 - DNA, 417 bp, Homo sapiens
agactccactgctgatcttgactgctcccaccctcttttgtagtttcagcaaaacaactgaccaggattccttcctggtaagagaccagtgatcacagagtggttctggccagtctacatgggactcatgaaggggtatgaagttccactgcacatgcacgtttctcttttcacaaatactcatgactcctcttatagcatattaaatacgtacattggccaccccacccagcataaattcctatttcctttttcccctcctttgaagtgtctgtttctggcttctggctagaggcgatgcttcccagactgtcagaatggccaccttgcaggctgcaaccctgtatgaaatataaagctctcctttccaaatttatgtacctcatcattcaaaagttaacaccaggttgggcagcc

SEQ ID NO: 725973 - DNA, 507 bp, Homo sapiens
ggaagaaagaacgtgccactgcctatcagaaaataacaaaacatgggaaatacaaccaccaaattccgcaatgcactcatcaatggtgatgaaaatttggcctgccaaatatatgaaaataatcctcagctaaaagaatcccttgatcccaatatttcttatggagaaccctatcagcacaacacaccgttacactatgctgctagacatggaatgaatagaatattagggacttttctttttggtagagatggaaacccaaataaacggaatgtgcacaatgaaacatctatgcatttgttgtgtatgggacctcaaatcatgatatctgaaggaacccttcatcctcgcttagcacggcctgtggaagatgatttcagaagggcagattgtctgcagatgatcttacagtggaaaggagcaaaacttgaccaaggcgaatatgagagagcggctattgatgccgttgataacaaaaagaacacaccccttcactatgctgcagcc

SEQ ID NO: 725974 - DNA, 199 bp, Homo sapiens
ccgcgtgcagcttgattgctgcaggtgactctacagtgatctccacaagccccgttatcaagaatggtgtggcatctcctaatgaagtatatttactataggatatgagagcccgttctgacaatagcagtgtctatgtttctgcaatggtatgaaaaggcacttgctgctgtaggagtagggtccattgttcgtgttc

SEQ ID NO: 725975 - DNA, 686 bp, Homo sapiens
ctccaaggctcccctatgcctgggaaggtctgatttcttgcaaagccaggagtcccatgagccagtccctcatgagtgaagtactggccatgtgctgccccctgcaggcctgcctttctcatcacctttctcatcaaacaggcaaagaaaaagcccatgtaattgaatacaatcacaaaggcagtatttagcagcattcatcccccattttatctcattctgccatgtccttccctgtctatagatgaatatgaaactaccactgaaagcaaatcattccaggaataaggaaaatatgaggcaagaaactcctagggaaagttcaccacctacacacacacacacacgagtcagaactgagtccaaggccagtcttgaggggaaaagagagaagagttgcattcattgcacacctgctatgagccgtgcattagatcctccattatctcattaccatcataatctctcaggacaggtatcaccaacacccattttacagatgatgaaactgaggccccaagtagtgaactcacaaagaattcataagtatatggtctgtttgagtctaaaggcttccctcttcacagatgattttccatcttttttaagtagaaattgcattctcaaatgaaatctcaggtcccgtgtataagagaaacaataaaagcacagctctctgatggaaa

SEQ ID NO: 725976 - DNA, 181 bp, Homo sapiens
atgctggcgttctccttcatctgttctgctcacgctgtacagtgggcgctgccataagatgagggcgctgtgatgttcggtttagtgctattacagggaggcctgtcctcaaggccagtcactgctcactgctgcttgcactcggctgggttttgatccttctttgggtcatagtctgggt

SEQ ID NO: 725977 - DNA, 827 bp, Homo sapiens
  misc_feature (1)..(1): n is a, c, g, or t
  misc_feature (100)..(100): n is a, c, g, or t
  misc_feature (154)..(154): n is a, c, g, or t
  misc_feature (157)..(157): n is a, c, g, or t
  misc_feature (162)..(162): n is a, c, g, or t
  misc_feature (168)..(170): n is a, c, g, or t
  misc_feature (178)..(181): n is a, c, g, or t
  misc_feature (204)..(205): n is a, c, g, or t
  misc_feature (213)..(214): n is a, c, g, or t
  misc_feature (220)..(220): n is a, c, g, or t
  misc_feature (225)..(226): n is a, c, g, or t
  misc_feature (236)..(236): n is a, c, g, or t
  misc_feature (260)..(260): n is a, c, g, or t
  misc_feature (266)..(266): n is a, c, g, or t
  misc_feature (279)..(279): n is a, c, g, or t
  misc_feature (292)..(292): n is a, c, g, or t
  misc_feature (295)..(295): n is a, c, g, or t
  misc_feature (307)..(307): n is a, c, g, or t
  misc_feature (311)..(313): n is a, c, g, or t
  misc_feature (316)..(316): n is a, c, g, or t
  misc_feature (320)..(320): n is a, c, g, or t
  misc_feature (323)..(323): n is a, c, g, or t
  misc_feature (326)..(326): n is a, c, g, or t
  misc_feature (333)..(333): n is a, c, g, or t
  misc_feature (336)..(336): n is a, c, g, or t
  misc_feature (342)..(342): n is a, c, g, or t
  misc_feature (371)..(371): n is a, c, g, or t
  misc_feature (390)..(390): n is a, c, g, or t
  misc_feature (425)..(425): n is a, c, g, or t
  misc_feature (440)..(440): n is a, c, g, or t
  misc_feature (450)..(450): n is a, c, g, or t
  misc_feature (506)..(506): n is a, c, g, or t
  misc_feature (588)..(588): n is a, c, g, or t
  misc_feature (625)..(626): n is a, c, g, or t
  misc_feature (628)..(628): n is a, c, g, or t
  misc_feature (643)..(643): n is a, c, g, or t
  misc_feature (653)..(653): n is a, c, g, or t
  misc_feature (823)..(823): n is a, c, g, or t
nttatatgtcttctgaaatacaaaagatagaataaatcatagcataaaagggaataagatatgataacatcatgatggccaattaatacacataaatcgnctttttctggacagacaccaaattacttaagaggattaagagataacttcagangcngcacnacccgnnngattattnnnnatttaaatactgatttccaaagnnctagatgnngaggtngaagnnagggtttggnggggcaggggcatggatctcagcngggacngaggggggggganggggactggggcnggngggggggggtgngccnnntcnagcngcncancgggganggncttggncaaaatctctagagggggggcttggggtngggggggggggggataggngggggcggttgggcatctgggggggggatcctatnggggctgggtggggngggggattgngtttcttacatgcagaacatggggtttttctatttgggtccatcaactcccaagcntttcaggcccacggaggtgagagttccttcaatgctgacaggtttgctatttctaacctatcatcgacagccttcaaggggncccgtcgaggcatcaaaactgctgtctgtgtctaaannancgtctgctcagtggncatgggtganatgtcattgatcgatgaagactgagaaggagtggcgttgctacttactgctgcatctgaaggctgatcttttacaacaccattcttgcttctttcttcccaatccatgacttctttgtaaattagctctttccattcttcaattgcatgttctctttcttccaactgggnatca

SEQ ID NO: 725978 - DNA, 202 bp, Homo sapiens
gatgcctgagaagtacatcctgcagggtgtcttctcagcttagaaggcaactaatgaccacattaaaaagggagcatttcataatatatataccttaaattggcctgggtaccctaaggtgttcgcgttgatcgaaaattgacaccccaaactaagtgtcctacttagcttctacaatagttaattcctaagaccctcagat

SEQ ID NO: 725979 - DNA, 892 bp, Homo sapiens
ggacgcgtgggtctgaccacgcgtcgattctctacatagagcccgacaaagacattggaatcggactataccctattattctggcgcatgagctggagtcctaggcatcaggtctaagcctccttattgcgatgccgagctgggccagcctagggcatactcttactaggtaagcgagcctacatctagcaatcgttatcgtcaatccagccctatgctatttagttaaatgaatcttcattctatagttatagtaccctatcatgaatcggcaggctgttggcgaactgaccttaggttcccctaataatcggtgcccccgatatggcgtgtcctcctgcataaacaacataagcattcttgacatcattaccgtcccttcttcttcactacgtcgcgtgcgtcgcaatctgcttataatgtggagagccagtgagcaggaagcaggttgaacagttctaccgctcccttagcatgggaactagctcctcacccctggagccttccgtagactctaaccatcttgctctcttacaacctagtcaggtgtctcctctatcttaggggccatcaatttcatgcgcaataattatcaatataataaacccctgacatgacccaataccaaagcccctcttggttctgatgcgtctctagatcacagtcaggtccttacttctccttatgctctccgcagttcctatggctgctggcgatcactagtactactaacagagcgaatgttaacaccagcttctttgaccccgcggggacgagaccccattcgatacaagacctattctgatttcgggcacctgaagttatattcttattctaccagggttcggaatattccttttggtattctattcgggaaaaagacctttggtct

SEQ ID NO: 725980 - DNA, 427 bp, Homo sapiens
catgagcaccacgcccagcctcttgacaagttgagtttgagagccctgataattcaattcttagtatgtacctaggagtggaactgcatggcgagatggttattctgttatgacattttgagcggactgccaaactttatccatagcggcggcattttatattccttgcagcaatgtatgagagctcacatatttctctgtcctttcagctgggattttatgagatgctgagtctttctggttctttactttctataaagttagagatgaattttcactcttgtcgcccaggctgcagtgcaatggaaccatctcggttcactgcaaaatccacctcccaggttcaaacgtttctcctgcctctgcctcctgatatactgggattacaggaacctgccaccatgcctagcctatttatctgctttca

SEQ ID NO: 725981 - DNA, 372 bp, Homo sapiens
gtaaggctaatatcgtaaagtgacgcgagtagcggtcataaccattgcggatgtatgaagctggttttattgcagagatttgaatacgtctgcgtgcactcagggtagtggactgacttagctcagatactgtagtagaggcatacatagatcacgaggagaccttgaacggcgttgctgattgtgcccaaactggtgatggctatgagtcagctgcaaatcgtgtgagcgtgattcggactctagctgtcggctcatcgtccactgctgcaacactatgcgtgcattatggcgaacagggtgactgcagatcaatagcacgtacctgagccaagctaatgtgttttggggacagctgacagccgacctcct

SEQ ID NO: 725982 - DNA, 192 bp, Homo sapiens
cccctttgaataaaaaggatgttaatgagtgataattattacagagaacttcccaaatgtagagaaagatatcaatattcaagtacaagaagattatagaacatctagcacatttgattcaaagaagactacctcaaggcatttaataattaaactctgaaaggtcaaagataaagaaaggatcctaaaagg

SEQ ID NO: 725983 - DNA, 135 bp, Homo sapiens
ggataggaagtacccggggcgtatgtggggacggggtacttacacggggttggctacgggtactacttgtctgggtcgcctacgacggtctggtgacgaactacgtgttaactgtccttaacggacgacgaccgg

SEQ ID NO: 725984 - DNA, 1374 bp, Homo sapiens
gctatcatcatagtgttggtgcctttctagcaacaggtatttctctcaccgccaaagttttatgaggaaaaagggtgcgcctcgttccacggaaacggcttcttgtaggttcctcttcgggaacggggtagtaaccacacccgttgttttctgttgactagccctgtgggtctcgcctcactaaattttttcccccctaatgatcaccctactcgtggggtgggccccttctgatgacgccttcgaatagctgagtcatttgtggagagacctgaaaatttttttgtccccccacatggggggattggggggaagctccccccatatcctccactgttggggcgactcaacattgtattgatgatcgcgcttggcgctataatacacctctggctgtgggcgcttgtttgtctcccccactggggggagaccttcctctggttcccaaagttggccgccctggtcaaggtgctcttcctactcctcacgctccaactgtgggaggctccttttggggaagacttttttgtgggcgaaacaattggggggggatatggtagaggtccccgccttccatcatggtccacgcaacaccctggcttgtctcgtctcgtggaaagttgtgggaaactccccacacatgcatatgcccacaatgcgtaggctcttaatgtgtaatcccctcctcccaccgtgtctgcttggctccccgctcacagggaggtcactcacattgcacagagtgtgccccctctttcactgttcacataggccacactgtgggagttgcggccgggtctctgatagtgaacaccgcggcgcaacaggccaacagtgtgcacactggtctgcacagtgtcaccggtgtccacacgcggggggggaacgaggcccctgcgggtgtttctcggctctgagagtaagtgtgtggagagcctccacttgggcgtcttgtctctcccacacagcttttggaaaactctgttgttttgagaaagattacacaccacagaagggagaaaggggaagagagccaccctcggtgaacttttgtgccacaccctgcctcactctctctcgtgttctgagaatgtccacttccccctctcacagctttaaggggaatagcaccctctggtgtccctcttcctttctcacacttttgcacatgtttttactcgagtcacttcgaataatgctaaccgctttctcacgctcctcgaggccctctggaagaaggaagggactgtaaacgccttcacagtcacgcttcttctggggatgaaaactcttaaaatgctttgtatattttttccattagatctcttcttcagaagtgtctatagaacccctctgaaatcttttaacttctga

SEQ ID NO: 725985 - DNA, 187 bp, Homo sapiens
  misc_feature (138)..(138): n is a, c, g, or t
aagtggtgcacgcatcagtggtacagcttactcttcacagtcagcaagctttccagggatgtcattttttgtattcctgtgtgttttatctagaaagattcaagaagaatattacagagtgttcaaaatgtccccggnttgtttggggatgtttacaggtaaacatagacgaactggtggataatta

SEQ ID NO: 725986 - DNA, 298 bp, Homo sapiens
gcgggattcttcgctcacatcctgtgtcttccccacgcggcttctgtgttcctccctctgctttcctctggcctccttgtcctcttgctgacttccttcttcctctaaccccgccacgactcaaccctggggtcggggcacagtggggaaggggcctatccacctgctcttcctagtccttggcacagctggcctaaggtgggcagaactaataaggaagggaactggttaaggaagtctgcacttgctttgaacttccctctccttggttaataaaccaccaaagcttgtttttcca

SEQ ID NO: 725987 - DNA, 733 bp, Homo sapiens
  misc_feature (271)..(272): n is a, c, g, or t
  misc_feature (274)..(274): n is a, c, g, or t
  misc_feature (276)..(277): n is a, c, g, or t
  misc_feature (280)..(281): n is a, c, g, or t
  misc_feature (692)..(692): n is a, c, g, or t
acaaaaagcaaagaccccttctccatctctggattttaaaaactggaaaaggatgctgagaggattgagccaaagagccagtcctgggacagtcactgtggccagctagtggtgtgctttgtctggccacgctgggtcctgctgctcgctccaaaggggcaacatacttgatttgcagccctggcagaatcatatgattaaagtgtgggagggcggtggtgagggaagtatctccccaaaggaaagaaggggtatggaacaggtaaaattnncngnngtnnacaaaattgtcttaattattttccccaaaatgcatagccagttttcccaatcctagtttttctctatttacttaaaatgccatctttattatatatcatatagtaaattatctgtcttttcatttgccagtgccacagtgtcttcatttttttaaagctttaaattaaaaaggaaaaatcagagcttattcaactatctggtcaatggaaatttaacagtgatgcagtagttttagaatgtatacaaatttttccagcctgggcaatatggcgaaaccccatctctgcagaaaatacaaaaaattagtcaggtgtgctggtgcatgcctgtggttccagctacttggaaggctgagatgggagaatcacctgagcctgggggttgaggctgaggtgaactgagattgtgcnactgcactccaacctgagcaacagaatgagacctttctcaa

SEQ ID NO: 725988 - DNA, 675 bp, Homo sapiens
  misc_feature (271)..(272): n is a, c, g, or t
  misc_feature (274)..(274): n is a, c, g, or t
  misc_feature (276)..(277): n is a, c, g, or t
  misc_feature (280)..(281): n is a, c, g, or t
  misc_feature (634)..(634): n is a, c, g, or t
acaaaaagcaaagaccccttctccatctctggattttaaaaactggaaaaggatgctgagaggattgagccaaagagccagtcctgggacagtcactgtggccagctagtggtgtgctttgtctggccacgctgggtcctgctgctcgctccaaaggggcaacatacttgatttgcagccctggcagaatcatatgattaaagtgtgggagggcggtggtgagggaagtatctccccaaaggaaagaaggggtatggaacaggtaaaattnncngnngtnnacaaaattgtcttaattattttccccaaaatgcatagccagttttcccaatcctagtttttctctatttacttaaaatgccatctttattatatatcatatagtaaattatctgtcttttcatttgccagtgccacagtgtcttcatttttttaaagctttaaattaaaaaggaaaaatcagagcttattcaactatctggtcaatggaaatttaacagtgatgcagtagttttagaatgtatacaaatttttccagcctgggcaatatggcgaaaccccatctctgcagaaaatacaaaaggagaatcacctgagcctgggggttgaggctgaggtgaactgagattgtgcnactgcactccaacctgagcaacagaatgagacctttctcaa

SEQ ID NO: 725989 - DNA, 297 bp, Homo sapiens
ctagaggatcccctgtacatctatgcatgtcaaaactttgacatcttcttttcattttccactttcttcttaactttacttctctttttgtccccccccaccatcttacagaagttgaggccaagggagactggtcggcacctgaagaaacatggcaaactgccctgtgcttacaaaccaaagtgttccccccaaccccaaatttgtctaagcactggccagtcttgtagagggcatagtttactacaacccaattctgggttttttgcttcttactttaaaaatagatggtaccag

SEQ ID NO: 725990 - DNA, 752 bp, Homo sapiens
atgcggagattgtgtgtgcctgccccacccagcctgacaaggtgccccggggacaggacgggcatggcattgtgtggaccccgggagctagaagaggcctctccctgctgatctgagtgaagagcgtgggagtttagtccagcgggcagggctgcattttggggtactaatagcacacaaatgcctgggttagcaggttgcacagtcaggtattttacttctgtgtttgtgtctggagcaaaccctgacatctcagtttcttcattggcttggggtggtactgggtccccaaagcatctctcattttataagtatccctcttataatattagagagggcaaaaagaacataagcataagagcatccccagcagacgatgttcattcagtgcctctgaacggctggagggctgcttgttgctgggtgagactcggaggggaaccgactcagggtcacggaactgatgacatcccacggtgggtccacagtgaagaatcttaccccgctccactgtgggacgccttaacagaccttacttacacttacgctttcgcgttatctcctgacaacaatacacatggagaccacaaattccttcttcggtctagaggaatgacaccaactcatttatgcaccttgaccccgctgggactcagaagagaccaggacggtttctgcgggaagcagtaggcacactcgtgtgctttgtctcatcctctgacttgttttcccacatttttaacaacgagcaa

SEQ ID NO: 725991 - DNA, 560 bp, Homo sapiens
ggaacaaaacacagtgtgcctttgaaaatgaaggttgaggctgggcacagtgattcacgcctgtagcctgtagtcccagaacttttaagaggctgaggtggggaggatgcttgaggccaggaggtcaagaccaacctgggcaacatagcaagaccccttctccacacaaaattaaaaaaaataataataggctgggcgtggtggctcatgcttgtaatcccagtactttgagaggccgaggcaggtggatcacttgaggtcaggagttcaagaccagcctggctgagcatggtggctcacgcctgtaatcccagcactttgggaggccaagacaggcggatcatgaggtcaggagatcgagaccatcctggctaacacggtgaaaccccatctctactaaaaatacaaaaaattagccgggcgtggtggcgggcgcctgtagtcccagctacacaggaggctgaggcaggagaatggcgtgaacccgggaggtggagcttgcagtgagccgagatcgcgccactgactccagcctgggcgacagagcgagactctgtctc

SEQ ID NO: 725992 - DNA, 222 bp, Homo sapiens
  misc_feature (48)..(48): n is a, c, g, or t
  misc_feature (215)..(215): n is a, c, g, or t
tgtgctgcggtcgtctagaggatccggaaaatcacttaacaatcactnacatcacttaacaatcacttaacaatcacttaacaatcacttaacaatcacttaacaatcacttaacaatcacttaacaatcacttaacaatcacttaacaatcacttaacaatcacttaacaatcacttaacaatcacttgaatgtgaagtgatgtgttccccgcnagcgggg

SEQ ID NO: 725993 - DNA, 352 bp, Homo sapiens
  misc_feature (217)..(217): n is a, c, g, or t
aggccaggagtttgagaccagcatgaccaacatgtcgacaccccgtctctgctaaaaatacaaaaactagccaggcatggtggtgtgtgcctgtaattctagctacttgggaggctaaagcatgagagtcacttgaacccgggaggcagaggttgcagtgagccgagatggcgccattgcactccagcctgggcaacaaagtgagactctgtctcanaaaaaaaaaaaaaaaaaaaaaaaaggggttttttcccaatttccccgggggggggggacccccaaaccccccgggttttccttttggggcccttttagggccaaaattacctttgtgggggggaatggccccctg

SEQ ID NO: 725994 - DNA, 1292 bp, Homo sapiens
  misc_feature (71)..(71): n is a, c, g, or t
  misc_feature (191)..(191): n is a, c, g, or t
  misc_feature (522)..(522): n is a, c, g, or t
  misc_feature (526)..(526): n is a, c, g, or t
  misc_feature (627)..(627): n is a, c, g, or t
  misc_feature (830)..(830): n is a, c, g, or t
ggcccgcctgatgtctgtcccacgccgtgccggctctcaggcgccggaagtgagctgcgcagcgccgttgnagcggcggacgcaggaggcgctcgtggaggacacagcagcatgggacagtcaggtaggtcccggcaccagaagcgcgcccgcgcccaggcgcagctccgcaacctcgaggcctatgccgngaacccgcactcgttcgtgttcacgcgaggctgcacgggtcgcaacatccggcagctcagcctggacgtgcggcgggtcatggagccgctcactgccagccgtctgcaggttcgtaagaagaactcgctgaaggactgcgtggcagtggctgggcccctcggggtcacacactttctgatcctgagcaaaacagagaccaatgtctactttaagctgatgcgcctcccaggaggccccaccttgaccttccaggtcaagaagtactcgctggtgcgtgatgtggtctcctcactgcgccggcaccgcatgcacgagcagcagtttgcccanccanccctcctggtactcaacagctttggcccccatggtatgcatgtgaagctcatggccaccatgttccagaacctgttcccctccatcaacgtgcaccaaggntgaacctgaacaccatcaagcgctgcctcctcatcgactacaaccccgactcccaggagctggacttccgccactatagcatcaaagttgttcctgtgggcgcgagtcgcgggatgaagaagctgctcccaggagaagttccccaacatgagccgctgcaggacatcagcgagctgctggtcacgggcgcggggctgtcgganagcgaggcagagcctgacggcgaccacaacatcacagagctgcctcaaggtctgtcgctggccgtggcaaagcatgctggtgcccagtctgagttgcagtgcggctcaccgagatcggccctgcggatgacactgcagctcatcaaggtccaggagggcgtctgggcagggccccctgatgttccacagttttgtgcagcaagacggagcgaggagctgcaggcccctcctggaagtcctggagtaagaagctgcggctgaagcgcacaggcggcccgcaggcccgaaatgttcatcgcaagcaagagcagcgggatgccccgaatgaagagcctggagggctgaagaaggccggccgggtatgaaaagaggcctccgtgaccctccggcgggactgtgttgccttccgggcaagagaaaggtgccctccggggaagcgagccgggaaaatcccgcgggcct

SEQ ID NO: 725995 - DNA, 474 bp, Homo sapiens
cgttaaaatcattcagtgagtagttcacagactgaggtgatcttctgaggtgatcttctgattcatcgccgcgcattaaccacaatgtatatgcgcaaaataggtgccgcaatcgcttgcgccgtcgcacccaggccaacccaccctctttcacttgaattctgccggtggatatgaactcattggcggcgagttgcctttacacaacaacagccggaggaaaatatggacgcggaaacgaagaagcgctcggtggagctgacggttggcggcaagctgcgcagcttcgatatagacgatccggttcttcccgactgggtggaggaaaacaagctttccgccggtgattttccttacgacaaaaagatgaagcgcggggaatacgacgccgccctcgaagcgctgcaggtggagctggtcaaggtgcagttctggctgcaggcaaccggcaaacgggtgatggccgtgttcgag

SEQ ID NO: 725996 - DNA, 1312 bp, Homo sapiens
  misc_feature (71)..(71): n is a, c, g, or t
  misc_feature (191)..(191): n is a, c, g, or t
  misc_feature (647)..(647): n is a, c, g, or t
  misc_feature (850)..(850): n is a, c, g, or t
ggcccgcctgatgtctgtcccacgccgtgccggctctcaggcgccggaagtgagctgcgcagcgccgttgnagcggcggacgcaggaggcgctcgtggaggacacagcagcatgggacagtcaggtaggtcccggcaccagaagcgcgcccgcgcccaggcgcagctccgcaacctcgaggcctatgccgngaacccgcactcgttcgtgttcacgcgaggctgcacgggtcgcaacatccggcagctcagcctggacgtgcggcgggtcatggagccgctcactgccagccgtctgcaggttcgtaagaagaactcgctgaaggactgcgtggcagtggctgggcccctcggggtcacacactttctgatcctgagcaaaacagagaccaatgtctactttaagctgatgcgcctcccaggaggccccaccttgaccttccaggtcaagaagtactcgctggtgcgtgatgtggtctcctcactgcgccggcaccagaagcgcgcccgcgcccaggcgcagctccgcaacctcgaggcctatgccgcgaacccgcactcaacagctttggcccccatggtatgcatgtgaagctcatggccaccatgttccagaacctgttcccctccatcaacgtgcaccaaggntgaacctgaacaccatcaagcgctgcctcctcatcgactacaaccccgactcccaggagctggacttccgccactatagcatcaaagttgttcctgtgggcgcgagtcgcgggatgaagaagctgctcccaggagaagttccccaacatgagccgctgcaggacatcagcgagctgctggtcacgggcgcggggctgtcgganagcgaggcagagcctgacggcgaccacaacatcacagagctgcctcaaggtctgtcgctggccgtggcaaagcatgctggtgcccagtctgagttgcagtgcggctcaccgagatcggccctgcggatgacactgcagctcatcaaggtccaggagggcgtctgggcagggccccctgatgttccacagttttgtgcagcaagacggagcgaggagctgcaggcccctcctggaagtcctggagtaagaagctgcggctgaagcgcacaggcggcccgcaggcccgaaatgttcatcgcaagcaagagcagcgggatgccccgaatgaagagcctggagggctgaagaaggccggccgggtatgaaaagaggcctccgtgaccctccggcgggactgtgttgccttccgggcaagagaaaggtgccctccggggaagcgagccgggaaaatcccgcgggcct

SEQ ID NO: 725997 - DNA, 407 bp, Homo sapiens
atggaaatgtttcaacgtgcgcaagcagttgcggcggcgggcagaggcctactacagatgcacactcacccttctgcaagcaagcctctttgcacccggtgcacttcaccatttggtcttacctgggagtgaaaagcacatcttacagccatgcctaactgccttcttgcggtcagactggcggcagaggagcatcgtcgattcttcaggattgccctacgggacctagctcacagatgacactttacaaaacccaggctgggccaccagccacctcctccaaatcaaaaacattctatacttgctcactccctgagcctcaagacaccttccgagtgtgtgctctatccccttccaccctcagcggatgatactctcgagacacctcccgagtgtctgctccctcc

SEQ ID NO: 725998 - DNA, 251 bp, Homo sapiens
ccagaggcaccaaggaggcggaggatgcagtgagctgagatcgtgccattgcattccagactgagcagcaagagcaaaactccaccttaaaagaaaaaaaaaaaaaaaaaaaaccaaccaaacctccgaaattcccctggggaaccctttttttggggggccttttaaaaggagggcaaagttttcccaaaaattatagggccggaaaaccgctaagttttaattcaaggaaaaacattccaaaaaaaact

SEQ ID NO: 725999 - DNA, 263 bp, Homo sapiens
ggcaacgcccctcttatctgttagtagtatagtgatgcagcagctaggactgtgcgagataggagaatgtaggactgctgtgattaggacggaatcaagacgaaagaggggcgtatggtatttgggttatgggcagggggttttatatttgataatttgttgttgattgaaatttgatgggcccttatgatagaggggacaacctgctagtgtgtaacgggagacaggtgggttaggtctacgtgaggctccagggatgggat

SEQ ID NO: 726000 - DNA, 241 bp, Homo sapiens
gcacaacgtcagagttagttacatatgtatacatgtgccatgttggtgtgctgcacccattaactcgtcatttaacattaggtgtatctccacttcttacgggagttcttaggggaattctggcacattttgctgggagttgaggttagtacgacttttaaatgtctttacttctcataactctcacagttacttcagagcaaccacagatagtgcaacagggtatcaagtaagagaaata

SEQ ID NO: 726001 - DNA, 733 bp, Homo sapiens
  misc_feature (417)..(417): n is a, c, g, or t
tttttctgtgggcgaggggcggccggtctcttcaactaagctccatgagggcgcaaataactggccctcaagcggtcgggcgacagctgcggcttagcgctttgtcatccacaaatccactggcagcacatcgctctccgcgtcactaaaaactttttttggggggctcgattcttgcgcccacccctgaataagcgccccccaaggctgttcccgttgacgtatttcaacaattacatacggttctccgcattaagcgcctaatggcaaaagttgtgtgaaaacatcaaatctaataccccactgtacagactatccagaacgtccacggcctcggcctttagagggtgaaggaagacaacccacacacagctagacccgaaaaaagaaggcctattcgttttagggcagtttgcnaaataactattccaaacacgggaacaaggccgtatcaaccacaccgtcctgaacaaatgggaaaaaattagacccccattacttttaacgccgaattctcagaatagttgggagttaattaactccatcccccaaggcaggggtactaagtgaaatattcctcattcttttcaattatagcacgccaccacaaacctcaaaacatattaacgcctagaaattcaaagtgacccaattgctttcacttttgattaagagacccaagtgaaagaactaatggtgtttcctcttggagacaagggctttacaaatctgg

SEQ ID NO: 726002 - DNA, 814 bp, Homo sapiens
agcgggggactcagaggctgggatcagtggtatatggaaccctccttttagtcctctcggatgccctgggccctgacccagacctggtggggctcccactccttgaagtatttccacacttccgtgtcccggcccggccgtggcggagccccgcttcatctctgtgggcttacgtggacgcaacgacaaccatagttcgttgcgcttcggacattacagtacgccgactggagatccgaggatggatgacgcagggcagcacagagggatggcatccaatggagggcgtcgagaataatcgggggatcgggtagcatcactggagcgccagcggtacaccgatacaggatttctccggagtggaatcgtgcgcgcaagcttgcgcggatacttacaactccagatgcgatggccgggtcgtcatgacccttgactaggggatgcaatggatgcgtagtctggggaccgtagagggcgcgtcctccgcggtgttatgataacatgttcgaactaacgcagggtccatggagttatcatcacccctggagattgaaggacctagcggctaccggagcaccagcaggtggagcaccggcgggtcagattctctcgcagcataagatgtcacaatgatagccttctgaaggcgggaggcaccagagaaagctgacctggaaaatagacatgcgtggagtgagtcccacaaaatggcgtggcccaaggggcagggaccgccgtttcacctgggtcgccaaggaacccgtgaattaaaaaccccaatttgtgaccgagaggccccccaggtgccggccgg

SEQ ID NO: 726003 - DNA, 423 bp, Homo sapiens
tcttgtggcagacttgaatttacaaaacccttctgatttctatgctgggatagcccttgttagttctatcaggtgtgtgacgggtatattataacttaccctcccatcatgaacattatactgtgtctattcagaactcagccctgctaggagaagtaggatcatgagatttttagacacagaggacgtcctagaaatccttgatgtcagttccatctctggcttcgtggagtgtcttatacctcgcgcgcgtgtgtatggttgaatttggtcccagaagctcttacacctgctggccctctggtctgtgtagctttcccacagtagaggtttgtaccaacgtgagagaagactcacatgcctctggcacagatcctttctgatcttcgggatactgctcctgcccgaaagtctttctgaatc

SEQ ID NO: 726004 - DNA, 121 bp, Homo sapiens
agatgttagaggtgtggagggcggcagaggtttgaacagtgcatgtgagggccactgtccatcacacagagactgctttggtgtgaccgacgttgaggtcccacctgccccactgtccata

SEQ ID NO: 726005 - DNA, 233 bp, Homo sapiens
actctagaggatctgttttctgtctggcttcttgcattctgggactgccaatgtctgtgacttgcacgtactcccctgcctcaacaagatgttttgccaactgccaagacctgcctgtgcagctgtgggttgattccacacccccgcccgttagccgtgtccgcgccatgtccatctacaatcagtcacagcacatgacggacgttgtgacgggctgcgccaaccattgagcg

SEQ ID NO: 726006 - DNA, 725 bp, Homo sapiens
gctcgagcctggcgctttcgcggccaaaatgagttcaaagtgtggggagggttcctcttcccgggacgcagccttcccgggtcattggcagacggtgccccgtcttagacatgagccgctgaccaccccgtgcagcccgatcgtggcgcaggatgccgcctggtccttcgcagtactggttgcgctacttggtatggaagccactcactccggcactcgcgcgcctaacagcttgctggctctaagccggaagaccatgactaggcccgtgcgaccctcgagaccagacgacgtcagcgtggatgtgactccccacgatcgacaccccatggggccatgcgggcaccgcacctgccctgcgcgggcaatcgtacgcctataaacggtctcttgaagatacccctcagcatattccgtagccatatcgaccaatcaacgccacattcatcaaacgcgcaggagcatcgctccatggcgcccaatgttctacaacatcccggcagccgtgaaataacccagtccacaccctttcaggtaatctcaggttccttaccagccggttgcgggatactcccggcgtccgtctccaacaacgtcacccctttagaactccattaggctccacaccaacgaagagctacgcgctgaggctgccctctccagaacggtggctggtggctcttcgggtgcctccaattcaattgctcactgcccagcccgcaatg

SEQ ID NO: 726007 - DNA, 803 bp, Homo sapiens
  misc_feature (803)..(803): n is a, c, g, or t
gtgcctgagctgcaagaaccctgcgcagcccagagcagctgctggagtgggaatctgatggctgcgtgctcctggtggattctggctctgtgtgcctgcatgctgctctgctctgctgtgggatgtgtgatgctggtgccctgccctgctgtgtgtgccctgatgcccgtcctgtgatcctgccccgctcccctgtgtccctgccccctctggagactcctctgtgttttgcatcttggtgtgtgttctagcctgtgagtgcctggtgggaccgcagaagagtccatgagagctgcccaatagctgaggcagctctagcttagaccttgcgttgtcagaggtgcattgctgtgcctctgtcatgtggtcccctgttgcgccctgtagagtgcgaagttcattcgcccatagtgacgcatatcagccacgttaaaagggcacattgcggtacaagagctgatcaaccattgagggttcgagaagtgacgcgcagatagctagagcaccccatggagacccctagtgcacccaaaacccgtagcggaacgaagctgtctttgaggaactttgaccctgagactagcaggaaggggcaagaagcagacccaaaccaagcctggcgaaagcatgcagccggcgcgccgccaaagagtcagggggatcggcgaaccacccccggagccggcggagaagaccggccagcacgaagagaccccagggcgggacccctgggcacgaaacagagcgaccctagagcgggcaaggaaaatatcggcgcagacagcaccatgcagccggtacan

SEQ ID NO: 726008 - DNA, 1117 bp, Homo sapiens
tcagatttacaaatttatttttaaaaaccaaaacaagggttaaaaaagtccttcatttccaaccctgccggggggtgtgggtggggaataaaataagctcaaaaaggtgcctaacctctttcctgcaaaggacacggcaggtcagaggctaggcccttgccctttctgccctgcctcctcctcaggtagctcaaatggctgctaggaagtatttataggcaaagaagtgtggccagtgggaggccaagagctgccttcttcacatcaacagaaactccagctgtactttccccttaaggaagttctctgagcctcaccatctgggactcccagggtggcgcggacaggcatggccaggaggctcagccctcgggggctatgtggctacagaccaccgaagtttcctaaaggctcttggtgacccaggagggcggtcagggggaactctcacagtgcgggaaggggtgtctgggacaaggaactctctgaaagccgccgtctactttcctagaccttgcttctagcgctgaggttagccatatctgggatattccccaatcctgaggctcgactgagagtcccaggacaaacgccctaaggtggctgttggctacaaacacaccttggaagatgccacaaaagatacgcccttggccatatctgttacggccaggttcccaacaaagtcacagcagtcatacaccaccagcgttaagggccttcttggtccccagcgggccacgcccccgttttgggcccccagtttcttattctctcacccctgtcagaagcgtgataggggggaacacacaccctggtttggcctgcacacacaggtctaatgggcgaagagcgctgacaacggaagaatttttaccagcggctggaaaacacacgctgacggcacagcaacggcagggagctataagggccccacaccagggcgtatggaattgcccgtgaaagaaccccaagtacggtgggcagcgcagagagaattaaccccggtaaaatgtggagccacacagcacgacaagcgaggggcaaaatattggccctagataagaccacgcccgccaattcagaaaaccccgcgtggtgaccacgacctcggccc

SEQ ID NO: 726009 - DNA, 881 bp, Homo sapiens
  misc_feature (26)..(26): n is a, c, g, or t
  misc_feature (90)..(90): n is a, c, g, or t
  misc_feature (110)..(110): n is a, c, g, or t
  misc_feature (193)..(193): n is a, c, g, or t
  misc_feature (256)..(256): n is a, c, g, or t
  misc_feature (289)..(289): n is a, c, g, or t
  misc_feature (320)..(320): n is a, c, g, or t
  misc_feature (325)..(325): n is a, c, g, or t
  misc_feature (447)..(447): n is a, c, g, or t
  misc_feature (451)..(451): n is a, c, g, or t
  misc_feature (510)..(510): n is a, c, g, or t
  misc_feature (569)..(569): n is a, c, g, or t
  misc_feature (598)..(598): n is a, c, g, or t
  misc_feature (614)..(614): n is a, c, g, or t
  misc_feature (625)..(625): n is a, c, g, or t
  misc_feature (723)..(723): n is a, c, g, or t
  misc_feature (729)..(729): n is a, c, g, or t
  misc_feature (738)..(738): n is a, c, g, or t
  misc_feature (740)..(740): n is a, c, g, or t
  misc_feature (744)..(744): n is a, c, g, or t
  misc_feature (751)..(751): n is a, c, g, or t
  misc_feature (764)..(764): n is a, c, g, or t
  misc_feature (801)..(801): n is a, c, g, or t
  misc_feature (845)..(845): n is a, c, g, or t
ccacctccttcttttttttttttganaaggagttttgctcttgtggctcaggatggagtccaatgacgtgatcccagcccactgcaaccnctgcctcctgggttcaagtnattttcctgcctaagcctcctgagtagctgggactataggcgtgtgcaaacatgcctggctaatttttgtatttttagtaganacgaggttcctccatgttggtcaggctggtctaaaactcctgacctcaggtgaaccgcctgcnttaaaaaaaaagtggtgggattacaggcatganccaccacgcccggcaggagacccagcctctnaagcntaaaactcaaatccgaagtactgtgggttgaagtaatggataaggacgtaaccatctccgccgccgctgccgttgcccttgccaacaggatggaaggaaacaatgttgaaaggcccaaagtnaccnttgactttcccaaactcttctccaaaggccaaaaggaagaacctggcctcaaacttgcnaatcctgggggaggttgtggttacatccatggcttcctgaccaccgcccaggaccacanggtcatagttgggggagagggcagctganttgacaggacgttctnttcggaaagtnttctgatgttcaagagttgtggagttaaaaagcttggctgttttgttcttggacgcggtcacaaacatggtcatgtccctggataactggatgtcgtngaactnccgggagtncncctnaacattnaccaacacctctncagatttggcactatactggttgagccctccactctnatggccagcgatgatgcactccccaggggtcccaaacagcactngtgattttagagttattgcaagggatctcatgtggg

SEQ ID NO: 726010 - DNA, 711 bp, Homo sapiens
cgcggctagagtgatgacagatggatcacagccgagatctaccagagtcaaggaggaattggtaccattccttctgaaactattccaatcaatagaaaaagagggaatcctccctaactcattttatgaggccagcatcatcctgataccaaagccgggcagagacacaaccaaaaaagagaattttagaccaatatccttgatgaacattgatgcaaaaatcctcagtaaaatactagcaaaccgaatccagcagcacatcaaaaagcttatccaccatgatcaagtgggcttcgtccctgggatgcaaggctgattcaatatacgcaaatcaataaatgtaatccagcatataaacagaaccaaagacaaaaaccacatgattatctcaatagatgcagaaaaggcctttgacagaattcaacaacccttcatgctaaaaactctcaataaattaggtattgatgggacgtatctcaaaataataagagctatctatgacaaaccgacagccaatatcatactgaatgggcaaaaactggaagcattccctttgaaaactggcataagatagggatgccctctctcatcactcctattcaacatagtgttggaagttcttgccaaggcaattagacaggagaaggaaataaagggcccaaagtttttttttaaaggtctatctaccattaatgaaaatcaccagcaata

SEQ ID NO: 726011 - DNA, 236 bp, Homo sapiens
tcagcttacactacagcccagtgggtaccaggcaggctccctttcctggggaaatgaagcacccagaccccgcgcccgctgatctttgcttcagatccttgaatcacctgtgggacttgaggactcgggatctacaggacgcctggagaagggtggtttcctgccacccttgctggccaacggaggcatcatggaggtgcggatcagccagggggaattttgacactagccattcg

SEQ ID NO: 726012 - DNA, 131 bp, Homo sapiens
gccagattccaggtactaggcgctgtggttaagggtctgtacctcgcattacatgctgttgtgaactctgcttcctccggagtactttcagctggcttaaacttcaggggtacttggtggcgctcgtgcct

SEQ ID NO: 726013 - DNA, 868 bp, Homo sapiens
ggattggcctgcgctaggctcgcactccggactgcgcctcgcagtgcgctgggtgcggtgcccctgtgcctgcagcgtcctgccggggcggcgcggcgcggagtgtggcctgacaggctccgggcctcagcagcctacagcccccggcccagcgcgcttatcctgacaggcaggcgccgcagccgaagccaccctgcccgaccaaggtctctcgcttggcgggagaacggaaaactcccagcttcctgagttctacagttcctgttgcttcagacaatggatgagcaatcacaaggcaatgcaagggccacctgttcctcagttccaaccacagacggccttacgaccggatactgggctatactacattagccaacttctcgaatacacccagaaccattggtcgcggacaatccagctgaagctcactcgacgcagccctgctctcttgcgatgcgagctacccagcatagcctacacaccacaccgcctgcaccactactgggactcccactgcgactgccacaaggcccgctgactgcacttgcattcacaccccacacctcacatcctttctttaccccccacctccaaccccattcccacactgtacctcacaccatctttactgccattcatcccacttgcacacactccatgaccctaaacacactcacctacccggacgaaaccctacggcacagcactaggccatggcgcggaacacccttattcccacgccaccctgcattccaacgcacacttctctcaccgccacaccccaacaaacgacgggccctaaggtctccctagagcacctaaacctggatctcgggcaccgctaatttccacgtaccaagcaatcatg

SEQ ID NO: 726014 - DNA, 283 bp, Homo sapiens
aataggcaaccgaatggaccaccattttatagttgagttcaggcgcacgcattgaaagaacagcagtgagaacaagagaggggtaagacgccaccgcactgcttgtgaacgtgctaagcgtaccctctcttccagcacccaggccagtattgagatcgatactctctatgaaggaagcgacttctatacctgcattacccgagcacgatttgaagaactgaatgctgacctgttccgtgacaccctggacccagtagagaaagccctacgagatgccaaacta

SEQ ID NO: 726015 - DNA, 245 bp, Homo sapiens
ccccgttcaaccctggggttagtatagcttagtttaaactattcagtctattcgctcattcgttaattcactgctgtttcccgtgggggtgtggctaggcataagcgttcttgagctgcattgctgcgtgcttaatgcttgtcccttttgatcgtggtgatttagagggtgaactcactgtaacgggtgatcttgcatgtagtattcttactaagagctaatacaaaggctaggaccaaacgggc

SEQ ID NO: 726016 - DNA, 195 bp, Homo sapiens
  misc_feature (192)..(192): n is a, c, g, or t
  misc_feature (194)..(194): n is a, c, g, or t
cccttgggtttggggggttcccctttgggttttgtccgggaaaaggccctccctaaagtttttcccccccccacccccctggcctttgccccccaaaccattttttaggttttaaaagaaaaacaaaaaaaaatgggggttttttgagaaaaagaaaatttttaaaaatttaaacaaattttttttgagaantna

SEQ ID NO: 726017 - DNA, 177 bp, Homo sapiens
cacgtcatacagggcgcgccatgtcgtgcggtatgtggattcgtcccggccaatggcagcggcgcgcttgcgatcactggcgggaaccgcaccactccccccgcacgccgttgcacagccttcagccatacgcccgctacacagagcgttcccacccgatccactgcacagacatgg

SEQ ID NO: 726018 - DNA, 289 bp, Homo sapiens
ggctgtgctcttagaggatcccttttgcggtgcttttcccaaccattccttcatgataataaccctcaaaaaactgggaatagaaggaagatacctcaatacatttaagaaccacatacaacagacccacaggtattatcatactaaatgggaaaaaaaactgaaagcttttcctctgagatctggaaaatgacaaggaggtccactttcaccaccgttattcaacatactactggaattactggctagagcaatcagacaagagaaggatataaagggcaccgcaaaa

SEQ ID NO: 726019 - DNA, 85 bp, Homo sapiens
ggggacggggggggggggaatttttttttggggtttttttaaaccctttggggtttaaagcccaaaaggggcccttttcccagga

SEQ ID NO: 726020 - DNA, 1021 bp, Homo sapiens
gggtaatgaagtatttcagtttagtgaatagatgacctgtttattacgttcctctacctctgaaattcgttatgtaatatgtagagttcggatgtgtaacttgacggcgtgcgggggcgatgtgtgttcagtgatttgattctcttcgtaggagtcgtggagggcgaaatatattgttattcagtgtcatttattccacttagagtctgtcctagaatcctacaaggcaaatgactcatggtgtgaagcagataaaactaagtagagaatgccattcatcaggataaattcagagccaccagaggttttacaagtattatagatactctagagctcagttctccaccggttggaggtactggtggaaagagatggtatcatttggagcaaatggtaggatacgtttacctccttcgtgttaccccactccatcccctgctttagatcagtaactttgtacaacaagtgctttaaaccgcccttaagatctctggtcacgttggtagtgacctttggaaagccatttcttggagggagtggctctttaaaacaggggcaagagtagacggggtcggggggatggacccaagtggtttttggtgggctaaaaagactttatgttccaacaggatagtctaagtaaggtagctaatgtgtaccaaacggtgggggtttacggaagaagtggaagttgtaacccgcttgatggccttgtttgggtatcgaaactaaggcttttctagggtaactgggggaggcttggcttttatattcctttgggaaaggaaggttattatcgcccaggttggagaaagcttgggaaaaatgctaaacaggaaaccagtggtaaggaatatggggttcactaattccaggtctaatatccagaggagaaactttccagtaagatactttgaagtaggggcacagatggttgtggcagttaaaggtttcttcccaattaactgtgtggaatatggtaaataggttctatattaaacggggagggggcacaataatg

SEQ ID NO: 726021 - DNA, 334 bp, Homo sapiens
aggggatttggcccccgggccccaaaatttgggcccagggggccttaaaaactgctccttatgggtgggatcgatggctggtcccccccggccgggggtgccctgcccccctgggcaaatttgcccaggcccccctttatgcccttttttaaacccacagctaccttaccccccccctttggaaggaggctggtttcccccagtttccccatccggggttccctggccccctcgtccaaacccccccccaagtttccgtgcaacgggctccgggtccccctgtgggttccacctaggggtttttttccaaaaaaataaagtgaatttagggtga

SEQ ID NO: 726022 - DNA, 577 bp, Homo sapiens
  misc_feature (64)..(64): n is a, c, g, or t
  misc_feature (144)..(144): n is a, c, g, or t
  misc_feature (181)..(181): n is a, c, g, or t
  misc_feature (226)..(226): n is a, c, g, or t
  misc_feature (449)..(449): n is a, c, g, or t
  misc_feature (500)..(500): n is a, c, g, or t
gatctaaggatccccacggggatttggtgcaataaatggaagccttaaaacatttcattttttntataaaagaaactcattagtttacttaataaagacagtaaaatagcagcaagtaccaagacatggtgcatttcttttatntaagacaagttacttcatttacatcagagtaagaaangtaaggactggctttcttgaatacttaaatatagctcgaatcacnggtaagatatggacatatctccccaacggtacatcagggaggagtgctttcattagttacagaaaatgcagaccctcagacagccagcatgaccacaacattgagcaataagagaaatgaagcatttactttccaagcattggccacagaaggtaagggagtcttaacatggggggtggtctctcccctccataagtgaagggtggtgcttggtggaggcatntcagagaaattattgggcatgccactagtgatactgagggtcaggggtgtnggggatgattgagtcgagctagtgaggcttgtgtaggtgaccatcccatctgtggagatgaatagtaagagttgcag

SEQ ID NO: 726023 - DNA, 360 bp, Homo sapiens
gctcgactcacttattaaatggatatagatataatgattcttctgtgaccacttccgttctatataccatattaactttagtgtgtgatgactagtaatggttagtagagtgttaactttaagcaactggatagtttaacaagtgagattcacaatctactcaaattctcaaattcacttcaatacctaaattattccagacctaaattatttatttcatttgatgtggtttaattaaagatatggaaacttgaaggaagaaaactgctgattttgactctgaggtccttattacaactcttcccaagcttggtattaagtatcaattatcagctgccaaatgtctctagatataagcac

SEQ ID NO: 726024 - DNA, 105 bp, Homo sapiens
cagcttcgaaaagtattggggattacagtagttagccatcgtgcctcgccttttaaattttagaactttagggctacctgaaagttgcagagctagatcccccta

SEQ ID NO: 726025 - DNA, 106 bp, Homo sapiens
gaaaaaaaaagtgaactagaaaatgtggtctctgatcttaactgatttataaccttaatgagatggcaaccacaagacaatgtgaacaagtgcaaagtatttcacc

SEQ ID NO: 726026 - DNA, 1111 bp, Homo sapiens
gcccgacaggccggggttactgtggcgaccacgaggagcagctttggctgctatggaggagcccggggttaccccgtcaaccgtatttggggctgctcctggaggagctacgcagggttgtggcagcactgcctgaaggttaggatgtcggctttagtgtgggacgagagaaaaagcttgctctaatgctttctggactaattgagagaaaaaagtaaactacttgaaaaattgagccttgttcaagaagagagtatgaatggctatgaagtagagtcgatctttaaaggatgccagctttgagaaggaggcaacagaagcacaagagtttggaggtagaacatcaaatggcaagctgtgaaaagctgaacaggtccaattctgaacgttgaggatgaaatactctgtctagaaaaagagttaaaagaagagaaatccaagcattctgaacaagatgaattgatggcggatatttcaacgaaaggatacagtcgtctagaagatgagtcgataatccctcagatcacaagtagctgaagccaaaatgaccttcaagatctctcacatgacctgacggaacgactggacgatagcactaacaagatgcttttgaatgacacattctcaagttcaggaaaggcagaaacagctttgcagaagctgagtatggacagaacagtgagtggccttaattaaaccaggcaacggtcacctttggacgaactccaaaggtaccatggcacgaacagcgtgctaatctgctcaagaaaggcccatcaagactcgggctggacgctggtacacgtcacaggtggggctgcaacgctgtggaacaccataacggagggtataactgactcaaaaagacacgggacaagtggacaagtggaccgaccaagaataactccaaggatgccgcgagaacgagcaagcgccgagcaagtcatccccgccgccacgcgtgagacacacaatagtcagtccaccagtatgcaaacgaacgcaaagaaaacaatacgggcgaactgcgccagaccaacgacgaacacaacaacgaggagatcaagtgaccacaagaacgatccacagcaccgtgccgaactcggtcacc

SEQ ID NO: 726027 - DNA, 145 bp, Homo sapiens
cgcacctgagagagaagacctcatctggatgccaggcccagtgaattcccataccaaccacagaggccctgttgattgagagttaccccccaggagccgcccccacgctgccacaccaagtggccacacataggggccccacaag

SEQ ID NO: 726028 - DNA, 360 bp, Homo sapiens
  misc_feature (2)..(2): n is a, c, g, or t
  misc_feature (31)..(31): n is a, c, g, or t
  misc_feature (35)..(35): n is a, c, g, or t
  misc_feature (37)..(37): n is a, c, g, or t
  misc_feature (59)..(59): n is a, c, g, or t
  misc_feature (80)..(80): n is a, c, g, or t
  misc_feature (91)..(91): n is a, c, g, or t
  misc_feature (96)..(96): n is a, c, g, or t
  misc_feature (101)..(101): n is a, c, g, or t
  misc_feature (105)..(105): n is a, c, g, or t
  misc_feature (108)..(108): n is a, c, g, or t
  misc_feature (131)..(131): n is a, c, g, or t
  misc_feature (135)..(135): n is a, c, g, or t
  misc_feature (188)..(188): n is a, c, g, or t
  misc_feature (199)..(199): n is a, c, g, or t
  misc_feature (211)..(212): n is a, c, g, or t
  misc_feature (224)..(224): n is a, c, g, or t
  misc_feature (228)..(228): n is a, c, g, or t
  misc_feature (264)..(264): n is a, c, g, or t
  misc_feature (271)..(271): n is a, c, g, or t
  misc_feature (288)..(288): n is a, c, g, or t
  misc_feature (300)..(300): n is a, c, g, or t
  misc_feature (319)..(319): n is a, c, g, or t
  misc_feature (338)..(338): n is a, c, g, or t
  misc_feature (353)..(353): n is a, c, g, or t
angctgcagaaccaacgtggtggccgaaccncctncntggataacaagaaaccagactnttatgacttggagagttggcngaatgcaatgnagtgngcaanacanttngaaaaaaatgtgaaccagccacnactngaactgcacaaacttgccactgacaaaaatgacccccatttgtgttaccccantgagacacaanacctgaattagnnggtgaaagccancaangattttggggaccacgtgaccaacttgcgcaatttnggagctncccgaattttgcttggnggaaaacccctntgacaagcacaccttgggngacagttaaaatgaaagcnaagcctttggcaaantccccca

SEQ ID NO: 726029 - DNA, 764 bp, Homo sapiens
  misc_feature (13)..(13): n is a, c, g, or t
  misc_feature (61)..(61): n is a, c, g, or t
  misc_feature (63)..(64): n is a, c, g, or t
  misc_feature (76)..(76): n is a, c, g, or t
  misc_feature (79)..(79): n is a, c, g, or t
  misc_feature (101)..(102): n is a, c, g, or t
  misc_feature (105)..(105): n is a, c, g, or t
  misc_feature (109)..(109): n is a, c, g, or t
  misc_feature (112)..(112): n is a, c, g, or t
  misc_feature (120)..(120): n is a, c, g, or t
  misc_feature (128)..(128): n is a, c, g, or t
  misc_feature (150)..(150): n is a, c, g, or t
  misc_feature (153)..(153): n is a, c, g, or t
  misc_feature (178)..(179): n is a, c, g, or t
  misc_feature (184)..(184): n is a, c, g, or t
  misc_feature (226)..(226): n is a, c, g, or t
  misc_feature (233)..(233): n is a, c, g, or t
  misc_feature (247)..(247): n is a, c, g, or t
  misc_feature (249)..(249): n is a, c, g, or t
  misc_feature (258)..(258): n is a, c, g, or t
  misc_feature (261)..(261): n is a, c, g, or t
  misc_feature (284)..(284): n is a, c, g, or t
  misc_feature (301)..(301): n is a, c, g, or t
  misc_feature (303)..(303): n is a, c, g, or t
  misc_feature (306)..(306): n is a, c, g, or t
  misc_feature (308)..(308): n is a, c, g, or t
  misc_feature (330)..(330): n is a, c, g, or t
  misc_feature (334)..(334): n is a, c, g, or t
  misc_feature (368)..(368): n is a, c, g, or t
  misc_feature (389)..(389): n is a, c, g, or t
  misc_feature (394)..(394): n is a, c, g, or t
  misc_feature (454)..(454): n is a, c, g, or t
  misc_feature (462)..(462): n is a, c, g, or t
  misc_feature (518)..(518): n is a, c, g, or t
  misc_feature (526)..(526): n is a, c, g, or t
  misc_feature (529)..(529): n is a, c, g, or t
  misc_feature (548)..(548): n is a, c, g, or t
  misc_feature (558)..(558): n is a, c, g, or t
  misc_feature (570)..(570): n is a, c, g, or t
  misc_feature (628)..(628): n is a, c, g, or t
  misc_feature (632)..(632): n is a, c, g, or t
  misc_feature (642)..(642): n is a, c, g, or t
  misc_feature (658)..(658): n is a, c, g, or t
  misc_feature (677)..(677): n is a, c, g, or t
  misc_feature (757)..(757): n is a, c, g, or t
taatattccaggncaagatagggggcaggctgggctggttcttcttcaatgggcttttgcngnnaaggaggagagnggncttggctcactatccagggtannccnagcncgnttttcccntggttagnccagggaggagagaggagaggngangggggcagcggggagggaggggagnnaaggnagtgatgctttggggtaagaagttgaggctgaggctgggggnacagggnggagctgcccaggngnagtgaccantgntcagggacagagcgcgcaaagcntgggaagggctgaaggnancanangggtgatagagtgaggaagganaagngggatggatggagaaaaggagctgggggagggcngggctcagggctagccctctncgctntaaatgatgatctgccgaggtcgtccgtagcctgtaatgccggcctgggaggcccctttnttgttgcncatttgaaggccaatgaaatgctttccctcctgcagctggttctttgtaaattccnttttatgntcntgggctttttttataaacnagttgggatntccacggtagtncgccattattcttggtcactgccaagctgcccaaagccattagggtgctctgaactgntggnatgtttttgncttcaaagaggtcaanagtctggaacatgttaatnttgatgaccccatagtcctcagccgccttcaggaactgagccacctgctccatctgcttgaagaccatggagggtgggtnctcgggg

SEQ ID NO: 726030 - DNA, 328 bp, Homo sapiens
agatgatagatagatagatagatagatagatagatagatagatagatatctaccaccaatgtcaaaaataaggttaaagaacacttgtgaggggctaataacctcctccaaaggcatctacatcgtaattcccagaacctgtgaatatgttacctcacttggcaaaaggtacttttaagatgggattaaattacagagatcagcctgcattatatgttttggcccagcgtaagcaaaaaggatccttataaaagggaggtagagaccagaatcagaagagatgtggcaacaggagcagagattggagcgatgtactttgcagatggag

SEQ ID NO: 726031 - DNA, 422 bp, Homo sapiens
gcgtcgaccaccattgcactccagtcttactcttctactcagactggagtgcaatggtgcgacctcggctcactgcaacctccgcctcccagattcaagcgattctcctgcctcagcctccccagtagctggcaccacaggtggcaaccaccacgcccaactaattgtttttgtatttttagtagagacggggtttcaccatgttgcccaggctagtctcaaactcctgacctcaggtgatctgcccgcctcggcctcccaacgcgctgggattacaggtgtgagccaccgtgcccggcctgaactttttgtaaaggcaagtgaagcagtgggagtggagaaggaacaatgacatcagtaactggttgtgatcagctagttgtaaacaccactgcactcggaccagcctatgtgaactgttt

SEQ ID NO: 726032 - DNA, 1269 bp, Homo sapiens
  misc_feature (449)..(449): n is a, c, g, or t
  misc_feature (799)..(799): n is a, c, g, or t
agcgggaaaaagctagtgaaacaagacgatgacaagtcactggccgtctcttaccatgtttgtgtctctctatttctctacccttcacgtgaggttacttgggtactgtgtcacgaactttgcacattattcctcggatcacacaggtcctccactgatactgcttggtgtatcctacgataataaaacctcctgatcattcacgcataaccatgaacgcgattcaccaacgtactgcgttaatagtacatgtgggtccggcgtgtaggcatgtccgaaggcgtaagtaaaggaagcctgaactcaaggcacaatgcctagacacaccgtgcaaaccagcgtcagcacataaggacacaactccgaatgtgaaactagtctgccacgaggtcacaatccagacacgcacttggagtattactcggacccagaacacacgtatacatttntcgcttgtatccacgaccttttctcgcccaaagacggcagaaaatttctgtctgttgatcaacgtgtgtctatccctggcgtagaaaaatgtcgacccaatagtctctgtgaaagattcactggaggatccattgtgtctccctgcacaacgggcttcttacccattgtggcctcgattgcaagatccgacatatacaataaccactttctccggcgccaccgattcctcttcccctttgtgccaatggggcttttggggccaactcttcgaatttaccatgggggattttggagaccaaccgtttgtgtacccgtcggttctcagatacgcgatttgccgctcataggngataggaaacgcgttacacaagaggttcccgttcgtggatccacatactccctttgtgggaatcaggtcggatatgctcacgttttcattcctcccacaaagccacggggataactccgggcattaggtctatataggtggtgggtcacactgggcataatgcctccggttgcaaattggttggagagagtcgggcgaattggtgtataccacatcctacttagtaatatgaaagtccgcctcgtacgaggaatgggtatatacccatattgtggccatctccatatctcttgccccattgagagttaaaggctttccgcaggcaaaacgagatatggagattgactctactgcgtatatgcccaacttatagagttgagatctggtaatgaaacccaattcattacttaaccgcaattgtaaccttgacttagtgccacccatctggttcccattccttcggattgtgg

SEQ ID NO: 726033 - DNA, 385 bp, Homo sapiens
  misc_feature (83)..(83): n is a, c, g, or t
aaagtggctgtggatctgggtgaatcaagtgcagtggttaagtgaatgtgaaagccctaggacatcactatctactactgtanacttataaacactgtatattggcccaggcgcggtggctcatgcctgtaatcccagcactttgggaggccgaggtgggcggatcacgaggtcaggagatcgagaccatcctggccaacatagtgaaaccccatctctactaaaaatacaaaaattagccgggcatggtggcgcatgcctgtaatcccagctacttgggaggcggagggaggagaatcccttgaaccagggagttggaggttgcagtgagctgagattgcgccacagcactctagtctggtgacacagcgagactccatctcaa

SEQ ID NO: 726034 - DNA, 1296 bp, Homo sapiens
ccgtgctgttgttataatgtgcattagtctatctctatactaccttgctcttctcttcgatatgtgtgttgtcgtctgcgcccttggatttagttgccttataaatgctgctgttgtttgcctatgtactctttctttatacgcctatttttccctcttctgtgtcttattttttttgctcttctcttgggataggggtctttttcattcgccgcacttgtttactacttcggaggttttttctctcacttattacctattcttttaattttggttcttcttgccccttccctgttatctccctaggagacgccgtttctccgaagtcacaatgacttggactcaacattatcgggcaaatcccagttctacagagtctcctcttgagataggcccaaagcttctttcccgtgattcctggctttcggttatcttcgtaatgccctgtattgctgtggcctatgcctgctgtctcgaatgcagattgctctttgaacatgtccttttggctcgttcccatatcaatgaatagatgagtgaaaggagttttctttttctctttagtacttacgtatttgggattcctgtgtctacagctctccctctccagatgaatacatcagaatcctgcaactttttgcacagctggtatctgtctggtagtcagtgagaccccttgtcttggtgatccttcactgggtttccaagcagaggagtcaacatgattacaattgccagtagagttgcttgtttggcggtacaagatgagcaagtaaagtaaacacctacagcctcttctacagttctgacatgctatacagtgcgtttaacgctttctaaacgtgtttaccagactgcctgaaggccaagggcgatggcgcacgacagaagcacttatgctttcacggatatttctaaactctcgttagagagcagcctttgaaaatcgcccaattttggttcatgcttatttagacctctctctaccttcttcagggtaatctttgtggcacaaacgatagcatttccaagctttagagttttctgaattcctgcgccttcctgacgtgagccctgagcgatcgttctatagcagttctgtccatgcgtcctgcttggtctctctgtgttctattgttacttgggtgcaatagcaacttccctaccccgtgcattccatcttctcatgcttgtgtaaagttcttcacttttttctctgagggctgggggttgggggagtcagcatgattatatatttaatgtagaaaatgtgacatcctacatactaggtgaata

SEQ ID NO: 726035 - DNA, 1287 bp, Homo sapiens
ggctaggtggtgcactgggaaacgcgggcgtaggtgaccggctggctttctcagttttgtgtggatgactgggctgcatgttggtgcagctttgctcagcttgcttgctgtgtcctgatgtgcaggacagcaccattagtcgcatgtggactagtcaccataatctgcaagtgcacccctgccacagcctgctgatgctgtgccagctgcaatgtgaccctgtctgctgtgatacctgctgcacctgcgagacgcaagcgctgtgaccctgtcagagagagtagctcctggctggctccaaaccacctgtgtacctagcgagtgtgcgtggcactgctgtgtgtacgcctggtgactcggtgcgcatgccagttgcctctaacgttcttctcctgagttacaacctggtcatctcgttcaacttgtggacgcaaggcgtccagacgactcatgcacggagcacaagttacacggttgctcgcactggacaacatatacctgacacgaatgcactggtctaactgtaggagggcttactgtgcgacctgccttcttaccttcaccagtgacactcggtgcttccaacagatgtgtacatatactaggacaactccacaacatggcacaatacctcgaagcccacacaatactaattttcctggctccatatgaacaggaacttaggacactggcttgtgcgggccccaactcttgcccaagaaatacgaagaatgaccaccattgacagtttaccaagattcccatacacacgggaccacgatcattggcgaaatggaactcactgccattggtcaaatatccccgaatcggtgcctccttatacagtgggtactgttcctgcacgggtaaccttctaccaactctcgaacttggcattccctactttagacaaaaacctcccacatatgtactgtacccccattaccgctggcaccaggtgcacctttgcacggtgtctcactctttctcaggaaactctccgctcaatcgatcaggaaatctctggaccgccaccggcaatggaagtgtgcacgattgccactctctacgtacctgccagtcatcttcgcccaccaaccaataactcatcagaacaaaagacacaatcgacacaccatccgtcctcaatccccagacacacaagctactcaaattgataacactacatccaacacttatatcactctacaacgcctcgcacaacatctcacccacagtatccaccctccttctcttcgcttcttttctttctctcttctctcctgc

SEQ ID NO: 726036 - DNA, 418 bp, Homo sapiens
  misc_feature (206)..(206): n is a, c, g, or t
  misc_feature (225)..(226): n is a, c, g, or t
  misc_feature (248)..(248): n is a, c, g, or t
  misc_feature (252)..(252): n is a, c, g, or t
  misc_feature (262)..(262): n is a, c, g, or t
  misc_feature (283)..(283): n is a, c, g, or t
  misc_feature (295)..(295): n is a, c, g, or t
  misc_feature (308)..(308): n is a, c, g, or t
  misc_feature (327)..(327): n is a, c, g, or t
  misc_feature (333)..(333): n is a, c, g, or t
  misc_feature (342)..(342): n is a, c, g, or t
  misc_feature (361)..(361): n is a, c, g, or t
  misc_feature (373)..(373): n is a, c, g, or t
  misc_feature (376)..(376): n is a, c, g, or t
  misc_feature (383)..(383): n is a, c, g, or t
  misc_feature (406)..(406): n is a, c, g, or t
ggcatcgatcctccctgcccgcgaagtgacagtttacaaaattattttttgcaaaaaagaaaaaaaagttacgttaaaaacccaaaaactacatattttattatagaaaaaggattttttctcccccagacaaatggaaaaaaagaggaaagattaactatttgccccgaaatgtcttgttttgttgcgacataggaaaataaccnagcccaaagttatattccnncccttttactgatttttttttnttcnatctgttccntctgcgggattcatttctccnatttcatgtccnttttggggtgggngtcggggtaggggggactnttgtcnaaaggcccnttggggcatgggggtttgntagctcccttgnccntgaaaanattttatgatattaaagaaaatnttttgaaatgga

SEQ ID NO: 726037 - DNA, 141 bp, Homo sapiens
attagagaccggcagcactgaagctggtgaagaatgagactcatctcaataataataataataataataataataataagtgactgtacagctgagttaactgctataatttatagttgtaatatcaaataaagaaactat

SEQ ID NO: 726038 - DNA, 832 bp, Homo sapiens
  misc_feature (32)..(32): n is a, c, g, or t
  misc_feature (52)..(52): n is a, c, g, or t
  misc_feature (56)..(56): n is a, c, g, or t
  misc_feature (76)..(76): n is a, c, g, or t
  misc_feature (135)..(135): n is a, c, g, or t
  misc_feature (215)..(215): n is a, c, g, or t
  misc_feature (219)..(219): n is a, c, g, or t
  misc_feature (228)..(228): n is a, c, g, or t
  misc_feature (375)..(375): n is a, c, g, or t
  misc_feature (400)..(400): n is a, c, g, or t
  misc_feature (409)..(409): n is a, c, g, or t
  misc_feature (419)..(420): n is a, c, g, or t
  misc_feature (422)..(422): n is a, c, g, or t
  misc_feature (427)..(427): n is a, c, g, or t
  misc_feature (432)..(432): n is a, c, g, or t
  misc_feature (490)..(491): n is a, c, g, or t
  misc_feature (493)..(493): n is a, c, g, or t
  misc_feature (498)..(498): n is a, c, g, or t
  misc_feature (507)..(507): n is a, c, g, or t
  misc_feature (525)..(525): n is a, c, g, or t
  misc_feature (533)..(533): n is a, c, g, or t
  misc_feature (538)..(538): n is a, c, g, or t
  misc_feature (551)..(551): n is a, c, g, or t
  misc_feature (580)..(580): n is a, c, g, or t
  misc_feature (590)..(590): n is a, c, g, or t
  misc_feature (592)..(592): n is a, c, g, or t
  misc_feature (594)..(595): n is a, c, g, or t
  misc_feature (599)..(600): n is a, c, g, or t
  misc_feature (612)..(612): n is a, c, g, or t
  misc_feature (617)..(617): n is a, c, g, or t
  misc_feature (626)..(627): n is a, c, g, or t
  misc_feature (734)..(734): n is a, c, g, or t
  misc_feature (757)..(757): n is a, c, g, or t
  misc_feature (808)..(808): n is a, c, g, or t
ccgcgctcgcagggccgtgccacctgcccgcncgcccgctcgctcgctcgcncgcngcgccgcgctgccgaccgcnagcatgctgccgagagtgggctgccccgcgctgccgctgccgccgccgccgctgctgcngctgctgccgctgatgctgctgctactgggcgcgagtggcggcggcggcggggcgcgcgcggaggtgctgttccgctgcncgcnctgcacacncgagcgcctggccgcctgcgggcccccgccggttgcgccgcccgccgcggtggccgacaatggccggagggacccgcatgccatgcgcggagctcgtccgggagccgggctgcggctgctgctcgagtgtgcgcccggatggagganagaaggaagatgcggcgtctacacnccgcgatgnggacaggggnngngctgntattnccacccgggctacacgagctgcccctagcaggcgctagatcatggagcgagggcactnntnaaaangcgccgggnacgccagagtatgcgcgncagcccgngagcnggtttgcagacanatgggcgatagaccactccagaaaggagngcctgggtgngngnncccnngtgggacagcanccatngaacatgtnnggggcggggggagagcagttctgggccggaaagcccctcaaagtcgaggtatgaaaggagctggccagtgttccggggagaaggtcactgacgcagcaccggcaganggggcaagggtggcaagcatcancttggcctggaggagcccaagaagctgcgaccaccccctgccaggactccntgccaacaggaactggaccaggtc

SEQ ID NO: 726039 - DNA, 335 bp, Homo sapiens
tggagcctcactctgtcacccaggctggagtgcaatgacacgatctcggctcactgcaacctccacctcctgggttcaagcgattctcctgtctcagcctcctgagtagctgggattacaggtgcctgccaccatggctggctaatttttgtgtttttagtagagacggggtttcaccatgttggccaggctggtctcaaactcctgacctcaagtgatctgctcaccttggtctcccaaagtgctgggattacaggcgtgagccaccgctcctggctgagataggtctttcttaaaggggagagggaatggctggagagagcaggagagaaact

SEQ ID NO: 726040 - DNA, 128 bp, Homo sapiens
ggcaagaacgaggaggatgtgaaataaacacctgggtatagtcccaataatccggtccagtaacagttcagaatgaagctcagtgtttgggaactgtccaaagaaagcattcaggcttgtgttttgac

SEQ ID NO: 726041 - DNA, 168 bp, Homo sapiens
cactgcttcggatggagaagaagttgctggagttggactgtgggatactgtccaggccagctggaccggtgggggaaggggacggagacattggctacgggtggcactctgcagggagtacgggctcagtgcgcctcacacaagcgaggtagggtttggagacgccaa

SEQ ID NO: 726042 - DNA, 1980 bp, Homo sapiens
  misc_feature (168)..(168): n is a, c, g, or t
  misc_feature (603)..(603): n is a, c, g, or t
tggcgtgctgttcatcgtgtttgttgtttcttctcgttggtattccgcctcttctgcgtgtcttcgcgtgtgtttggttgttctgctttcccttgtgctaagtctgttgttgctcctggggtatagtactagcttgttgttacgtcactttgcttttgcattcgcttntgtttattgtggtctagctatttttttctcctacggttggtcgtgttctgtgatattctaccagctttctgtctctaatgatggtcacaatcgtttggttggtgtacgctccagtatgcttctgtgtgtggctgcttcttctgttctgattagttatgtcttgcccacaggggagagattattctatttttgctcgggatgcttccttgtgggggtgtttgatctgccgtcctccgcgtgtgtattttggagagggtccgtctatcatcgccttatttgagggggttgtacaactagttctctggtctagtggcgctctgtgtgttgttgttgtatacgcgaccgcctcctctcattatgagttttttgtatgagatgcgtggtcggactctcttttgtcttgtgcatccgatcgactctgatggcttctacatngaccactgattgtttctcctagtggggggggggatggttgatcatcattatctttttcgtcgcggggagtatatatggggtttggggttgggtgtcggggggtcgttgctccctccattgatgagagtgtgtgtctcctggggagcgcaccccatttgtgttggactgtcgcatttggtcgtcgcgtgttacgatgacaaatagtgtggttgaatataattgttgtgcttcagtggcgcctccctctttagtattactgtttcctaagcctacgccgggcgacaagcacccacgatgtggttcgtgtggagaatacctagctgtgtgtgataagaatttcgcgttttgttgtccggtagagaagtatattgtgctacgggagatccccactcgctccgtggtccatcgtgtttagagtcgttcggtgtattaattacgtcggcggtgttatcatcagaatgaagatagttttttggtttaagacctctcgtttaggggtgtctctcccccctgcgaagattgtccggtcactattctgttgttgatacttatatagaggtgttgttacgacaaccaacagggaaagttgtttccccacccccttcgcagataagagaacttcttggtggtgtgtgtgatataaaagtgttgtctatatccactgaccgcgcgccactcctcgtgtggatacgtctggtggaaacgctgtctcgttgtgttgtgtttccacgacgccttgatttatcctcgggggagatctccctgttgttttttttggagacagtctctctcatgagagagtctcactctctcagggcacacaaacacaggtgtgtgtggtaaaacatctggtcgtctgtcggctgtgttgcgcgtgtttcgtgtcacaacagatacacactcccctgtgatttatataggagtgcacaccagtgtgtccaatatagagaatattatagaggtgcccaaccagaggtgtgtgtataacacccagaaagggggcgccacactctctgtgtggcctctcctgtggtagagtagtgtagtagacggtaatacctgggaagaaagaccaatagaaataccacgccataattaagatatccagagatatgtttacagttgtttgtgtcttgtggggtacaaatctgtaaaagtaccaacccgctgtaatgtgcccaaggtgggccaccgtacgtacgtcttcccagagtatggtcttgtagttacagtcttcccagagtatggtcacagccatcttttaacactgtgttccacggtcctatagtttgctttctcccctttttaagagtatggtaagatttactgggattgatttactgaatgaaatttaaagccagatattcccgtttcttg

SEQ ID NO: 726043 - DNA, 150 bp, Homo sapiens
aggacggtggattattccttcaggatgcaggatagggacgtgcggatgacctccttccggatgcagatgaaggacgtgcggatgacttccttccagatgcagatgagggacgtgcggatgacttccttccagatgcagatgagggacggg

SEQ ID NO: 726044 - DNA, 374 bp, Homo sapiens
  misc_feature (23)..(23): n is a, c, g, or t
  misc_feature (62)..(62): n is a, c, g, or t
ttccctgatccctgggacaaganaccggggttttcctacaacaatattgttgagaaacatanaggcttgagaaagggcttcccaaaatcaaacttcagtttcaaaattgcctttcctgacgccaggcttttccgatgcttcagaagggcctctggagtatccagaaaagaggtctgataactttgaagattatgacactggaataaagggaaatgtacagaattcatgaagagctaaaatgttcatgaatatcaaggaaaagaagagctaactgaatgaattcagaaaactgaagcaatctttttgacttttgcttggaatattgctgatccttgttttgtttttcagagtaaaggaaacattttggactaaaa

SEQ ID NO: 726045 - DNA, 333 bp, Homo sapiens
  misc_feature (129)..(129): n is a, c, g, or t
  misc_feature (174)..(174): n is a, c, g, or t
  misc_feature (199)..(199): n is a, c, g, or t
  misc_feature (209)..(209): n is a, c, g, or t
  misc_feature (221)..(221): n is a, c, g, or t
  misc_feature (242)..(242): n is a, c, g, or t
  misc_feature (247)..(247): n is a, c, g, or t
  misc_feature (270)..(270): n is a, c, g, or t
  misc_feature (292)..(292): n is a, c, g, or t
  misc_feature (307)..(307): n is a, c, g, or t
tgagaaagaataagtgaagactttaggtttaggatgctttaggatggggcagatgtcctcaaagaacaatggggacagagtagggagcgtacatgcagcctggggacctgatccccttccacggtcatnttgcctctgctccttctgtctgatttattccgcattgggacattngtctatcattctccaattgcttcgngtttatgagntctgtatacccngcccgtcagtatgttttttanggganaggatgctgccttttactttgtntatgtacccgcatttgccctanacaaccttgtatgcnacaagaactcagtctatctctgacct

SEQ ID NO: 726046 - DNA, 1371 bp, Homo sapiens
gctgtattccagaaattaacttgatgtaatgattaaacttgtagagtccattgcatattgatgcttggaaatacgcgaggctctcatctataatcattctaggtaatatggtggaaggagtgttgcggctgtgaagaggaaacgcagcatctagatctggtacgttcgcttgatcgttccatatttccgtatgacatgtcgttgcggcaccagcgtgatatcacattgggcacgaccgtagcctctgatattactagtctggtacatcgaaacagagttatacaggtagacctaggggtgaagcaactctggtagaagtgtgccatcagtggtactcggaaaattgcactaaccttttaatgtagcttgtgacataaagccttagcccagtagatcagggaattagccagtaggactctacaataatgagagttgtattaccaaaaacagtacacaatcttaaatattttacttcaaacaaggattttttcccaagtaggagtcctcggaagaggattcgctagaaaacattccaaaacagggtggcaactacgtgttgcttgtagatgtcgcgtttgcgaatcttccatgcgtataatggggggtatatactaatgcttgtaagaaacgcaatcgtacatcttcattacggcgcctattggccatttaatttgcatccttgaacccgcccccagttttggctgtggatacgttccctatccgaatagattctgcgttctcttacatggcccggccagagttggtcaaacgcacgctaacgttaacaggatttgccgttccattcccttggaatgcgtctgtcaataaattcggattcagacacacccctatttagttgtgcagcaacggccatcaccccgaaggcaatgttgttaacgttcgggacacccgcgcaggcttaggttcaaagctagggcgcacattacaacttcttgtagacccacgttagggttatagggttccgaataccccacggcttggtgctatcataataacaaaggaccaccctctccagagttcggatactgcctcaagcaggttatcgcagagacactccaactgcgacggattcatcgtattccaaagctgggttaacccggttcgggccttgtaaacgacagggctatacacggtggattccatagtacacagcaccacgttcattaggaggaattttctcatgcggcgaacaggggaacgctacattaccgagtttccaaaggtgcccttactggaacaccaccggttttcaaccccgtacacaaaagaccagattacacgcatttctggtgcacaacggccttctaacaggacctcttaagcggctcccagcacagagcactgagaaaa

SEQ ID NO: 726047 - DNA, 344 bp, Homo sapiens
gaatggcgcgtcccccgaaggaatataaatcattctattataaagatatgtgtatgtagcactattcacagtagcaaagcactattcacaatggcaaaggcatggaatcaacctaaatgcccatcaatggtagactggataaggaaaatgtggtacatatacaccatggaataatatgcagcaattaaaaggaatgagatcatgtcctttgcagggacatgaatggggctgtaagccattatcctcagcaaactaatgcaggaacagaaaaccaaataacgcatgttctcacgtataagtgggggcagaatgatgagaacacaaggacgcgccatcgtgcgctt

SEQ ID NO: 726048 - DNA, 219 bp, Homo sapiens
tgtgcggccagttccagcttcagtgactcagtaggtcctcaaatacttcccatgggaaatacaactccacggtatcagaaaatacagttagccaatgtttcctgatgagttttgtgcacatttttcttgattgtatcttcagtccctttccaccccagaacagtgaacaattattttcccctctctgtgcttacacccttctgcgtcttctcgagccga

SEQ ID NO: 726049 - DNA, 711 bp, Homo sapiens
gggaggactcaagaagcagcagcgaggagtcagacagtgacatgagaggcactgtgcagccatgaatgcagctcaggtgaagcccttggggaaaagcccccagtgtgtaaaccctgccgtctacgcatgtgtgctatggtgtgccctctggggaaatgtgcgcctggcccatgtgccaccctgggaaggtggtggcctgcaaccccctcagcccaggtggggaagtgggaggaggactcagagagcagtagtgaggagtcatcagacagcagtgatggacgatgctgcccacagctgtggacccggctcaggaaaagtccttggggaacatctccagtgccaaatccatctccagtcctgccaaggggaccccttcagaagtgcatggggcctgtagcccgtccaggtcaaggctgaaaagcccatggacaactcggagagcagcgacggagtcatcggaccagtgcggacagtgaggaggcaccagcagccatgactgcagctcaggcaaaagcagctctgaaaattcctcagagcaaggcttgccaagagagcaaccaataccactgcatctgccaaggtcggcccctgtgcgacgtgggcacgccagagcccccggaaaagccaggaaactgcgacttctccagcaggcctcatccacagctgctggcctggcgggcacccagcagaacaggcagaggcatacttcaa

SEQ ID NO: 726050 - DNA, 496 bp, Homo sapiens
  misc_feature (280)..(280): n is a, c, g, or t
gctccgggcggctctgacgctgctcggggaggtcccccggccgccggactcccggggtgtcccgggctcgcgcaggacgcagaaggtgcagtggagccaggtgggacgaaggagaagcacgaagacggggtgaaggtggagacatgctggagcacaaggtgcccgtacttcgcacccgcataccgagccccttcccgacggagtgcgttcttctatgaaggaaggcctgtgagattgagcgtggcagcggaggaggtcgccagtataaatgggaggatgntagatcatgaatacacaacaaaggaggtttaccggaagaacttcttcaatgactggcgaaaggaaatggcggtggaagaagagggaagtcatcaagagcctggacaagtgtgattcacggagatccacagatactttgtggacaaggccggagccggaaagtcctgagcagggaggagaagcagaagctaaaagaagaggcagaaaaaattcagca

SEQ ID NO: 726051 - DNA, 1059 bp, Homo sapiens
  misc_feature (570)..(570): n is a, c, g, or t
gatcgcaactattcttccattcgtatattgttcctgctcgttgtattatccatcaagatctccacggctgactcatgcgcatcgatcgcattgaacggtctagaactcctcggatgtacaatatcctcaccgatgtagatccggaccgccaatgctgcttattcatccaattcatgtcatcgcactattgttcttacatctctattgaacgctggtccgctcgacaactaaatcgacgtgtggaagagccagaccaaacacaattgcctcgagcaacggtactataatccatggactgcaaatcatatgcggctcgctttagcatcgtagccgggtggggtatatcttcatcgcgttcagaggtgatccccttgatactctcgtgcggagagcatggaaactattacgagttatcactgtcccccattccgctctcgtagaatattttatattccctgcctttacttactttgtgtatagcaaacatattggcgccccttgtaagtcaatagctcgcttaagtgaagacaacccactctcatacttatcccccacgcatcatatgtaagncacgacatttatacattagcaaaattaccatttccaaacattctttgaagagcccctaaccccaaaaagcttcccttgggacttttttgttaataattgcactaggagctttgaaacctagaaattttccccaatcgcgaactcatttgtacgttggcacaagacattgcctgggccacaattactgcccagccaagccagcaaagggggggttgggccgtaattgttattgcaacaggctaaactgggactttgacttttactttccaaaaattattttaagccgcctttttccctttagaaaactgtgggaactcacccaaaacctaatgacaaattccctccttagcagaggggccaactttttaaggaaggtgcctgcctgggtttctttttttggccattgaatttgtccccaaggaagtttcctgtttgttgatttacccagttaaatgggggttcctgggtgaattgttgaattacccacac

SEQ ID NO: 726052 - DNA, 1130 bp, Homo sapiens
agcggagctgtgaatgaagcaggcttggggttgctgccgcctggggaggagcaggaaggactgtgagtcggacgatgtgagctcgtgtatcgctggcttgtactagggttctgtatctgccggtaggccgctgggcaactgacctctcgggggactcgcatggcctagcatggggtctgtaagcgtgtatcgggaatagcgaggcagaggatcatccttgcggaagatgggtcatggtccctaagctcctttccgctggatgcgagagttgtactaaccagtgccgcgtcatgccttgatggtgtaatgagctgagaatcggagctgcggcaacctgggaagcctcgatactcaggtgctcgatcccatctatgctggctatcaatcggtagactgtcaaggattttgatcgccatgtcaagaaaaggggtcacaacagtttggtgggggcctgtgggtgagctcatggtctcctaccatgcaactcaccgcttttgaggtcgctagagtgacgaggtatctcgcaccttcagacgtgggatcaccgtttagcaattcattgtatctcgtcccactagacttgggactcactatgttccctgccccatgggatcaactcgaggcatccaatggtcagagaacggtgatcgccgggtagaacgagcacatttgtaaacctcgctcaagacgacttccaatacgcccacatggggaccacttgaagcgtttgggtccgcttcttggtgtacacgaagttgggccttggtacagtcaggaacaggacttgtggctttcccgtgggaaacccagaaccttaattgtacacgtccccgaggccgaatccttggtttggaacgaatttccataggggacagacgaatgtcaagtgctaggggatccgatgggggggccataacacaaaggaatctgggattgggaaaccttgtgggggcacacccgcgccttgggcgggggttaccacaaacctgataccaactcctgtgtgcttaagaaccttaaaccaaacccaaggccacaaaccaacgggcaactggaacccacaaacgaataggataccttctccaaagacattttcccttaggccttgggcgcaagccaggtttggcagg

SEQ ID NO: 726053 - DNA, 189 bp, Homo sapiens
atctctacacggatcccctgttagtaccgctacttgtggaggctgagttgagaggattgcctgagccctagaggtggaggagtttgcagtgagccgagattgtgccactgcattccagcctgagccacagagtgagaacctgtctcaaaaaaaaaacacagaatgagagaaagaaggggtcccgccctc

SEQ ID NO: 726054 - DNA, 436 bp, Homo sapiens
cagtgaactaagaggtgatgtactttatgctcttcaaccctgtggcaccaaacttcgcaagcagaaaagaactaagactcacctgtcagctctggtcaccaaaggggcttagaaatgaactgctacaaggcttttaggaacattcacctctatcctctccagtagcaagtacaatgacaacagccagatgcaataaagaatctctgagagtaatactgcacacttcaaagacagaaagctaaataaagtcatttactcagaggtacacttggagagcacaagagagagccagggaaaacacattcactaactttcatggtaaaaatagaaatctgactcaactctaccttaacagcaatatttaaaaccttaactttagtcataaaaaatatatatatcaagcatgcttaaataaagaggaatatatagcaccaaa

SEQ ID NO: 726055 - DNA, 103 bp, Homo sapiens
tttattcatttgcacaacaacaacaacaacaaattcacggaatcatttaagtgcatgaacattatttttcaacacatttcacaaggaggacaagttgaatgga

SEQ ID NO: 726056 - DNA, 146 bp, Homo sapiens
catacctctgcaagtattcatgtcgtcttactttatccatttcatggatgaaaaccaagtattatgaggttcaggggtttccccgaaggctacacagcagcctaattctggtgtctatcactacactgcatcaattcttttttttt

SEQ ID NO: 726057 - DNA, 1010 bp, Homo sapiens
  misc_feature (231)..(231): n is a, c, g, or t
gcatgtgctgactggcgtcacgcaacgcgtatgccaggaatggtgcttagcagacgtacctgcagagacactattttcctgatgatactatctagatagtctgtgtcgggctctcgtgtcgtcgccgtgcttcgctggcatggccatgtacacgcgcagtctgctgcatcttccatggggggttcccccgatcgctagcgcggatgcgtgataatagcgcggggcaatatngtgtttcatggagcgcccagagaaatgcatgagcgctaattttgtagcgatttggggtacgcgctggatgaatggaccgaagaatgggcaccagggattcaaagagggtgtccttgtgaggagagaagccatgcctcacgaatgttgggtaatgagcacctttcagatggtgtacaaggaactctcatgttcctaggattgtaaaagagtaagaaatcgttataccagtgtagaagttcattgaattccatgaagtactaacatggcgtgaggtcgatgtagtccgtgttcttaatttttaagaggtcatagacggttcgttgtatagcagtaaatggtctataaaacattttgtagtccctatgggactttgatatcaaggattattcatgtaaccgtttagagagttgtgggcaagattatccccggtgaaaaggattcttgacttgtgaagctgtgagtacatttttacattgacttctatgttggaaacgccaggtcagtaggtggggcggttactgttccttcgattgcaatgggatagtcatttgtctgatgattgttcaattctgactaaaagtttggttaggacaatataagatagggaggggaaaggaaaggaggacttttgggcgcaaaacaaaattgtgtgggggaccgaagagttagtgttaacccacgggctcgcatatggtgtttccaaactgggggagggcatccgattgtgtgtagcatgtaacaggggtatttaataaaacagaaataacgaggtcgaaaat

SEQ ID NO: 726058 - DNA, 360 bp, Homo sapiens
actaataatcatctcccttcctactattactactactaattattactatcatgactaccacacactcactcggctacatacaaaaatccaccccttaccgactgctgctgctatccctatttctcactccgcccggcgctcctttttccttcatatcttcttttagctattacctacttcttattagatctatcaaattagcccgtccttttatcccactacctatgcatccactactaacaaactaactcatgcctgctactagataatgtctatcccttcttcttattcatcatccatagtcactacttctgtctctatgtattgattactacaaggatgatactgactgcgcctaat

SEQ ID NO: 726059 - DNA, 1462 bp, Homo sapiens
  misc_feature (21)..(21): n is a, c, g, or t
  misc_feature (91)..(91): n is a, c, g, or t
  misc_feature (253)..(255): n is a, c, g, or t
  misc_feature (264)..(264): n is a, c, g, or t
  misc_feature (273)..(273): n is a, c, g, or t
  misc_feature (276)..(276): n is a, c, g, or t
  misc_feature (290)..(290): n is a, c, g, or t
  misc_feature (295)..(296): n is a, c, g, or t
  misc_feature (312)..(312): n is a, c, g, or t
  misc_feature (324)..(324): n is a, c, g, or t
  misc_feature (330)..(330): n is a, c, g, or t
  misc_feature (336)..(336): n is a, c, g, or t
  misc_feature (342)..(342): n is a, c, g, or t
  misc_feature (366)..(366): n is a, c, g, or t
  misc_feature (370)..(370): n is a, c, g, or t
  misc_feature (375)..(375): n is a, c, g, or t
  misc_feature (378)..(378): n is a, c, g, or t
tctcattataactttttaaanggggtctcaaaattctgtgacaaattttgggtcaagtggtttccattaaaaagtacgtgattttaaaaanctaaataactttaaaacgtgccacagcgcaaaaaagaaaaccaagaggtggctccacaaaacattcctccttttcctttcgtagaggttttacgagtgcttgtgttatcattaaccgagctcttttatacttacttaaactttaagagtggccaatgtgaannnaaacgagtntcgtgaaancgngttctttccaccancgtgnnttaagaaggtgggggnggcgaggttatngagggnataatnatctcnatttgacgcctttctgtggagctntccngtggngcnagacacgtgtgggtgaaccttgtgccagagcctccaagcagagccttctctgtggtcccaaagtgctttggaagtgaacaaccccgcgcgagacaacgtggctcgtggctctctcatatactcagcgaacacgaggcagagaggcgaacccccaaagaggggtcgcatatacgtctcgtggagaagagcgctctctcaaaacaacaaacatgtgggccttgtgcccgaggagaaccccaatactccacagcaaaatggcggaaggaaactcaacccagagatctctcaaagagaacattagagcgcgcgcccaatacgtgtccccaacgtctgttgtatcaccacaagaaccggggcgagatcacaaactcttttcacccttttacaacggtcttcagggcaaacaccttttggcagttgcgcacactgtgttggaaccccccgtggggtggcgcacaaaaatccaccaaataaacacgcgggggcacattaagaccgcggaggagcacttatatttgatggacgcacctggggaaagtgcgggctcccccagggccattaattcccaccctgtgaagaccaggtatgaaaaagacccccaacgcgtgtctatctcccccacagtggcggccggggcgccccatcttcttcggggtctcgtgtccacccccaccccaaccggttttgcgccatcggaaaccaaatacttttcctctttctgagcccagacaagccacacctttcttctttggcacatctctgcgaagcgcgccccaatatgttcgccccccgaagagaaaaaacgttttcctctccaaaaagagtccagcagagggccgcttttcaacaagcaccatttatcaatgcccagcagtgacagacgtgcacggttgggaggccaatcgtgccaacggctcaacccgggctgttgtggaagaccaccacatcctcactctcgcgcacagcgacgacccacaccaacccccatcatgtagaaccctccgagagcgcacagcgcaggttctcacacgaacagtctgcgagcagcagacgacccaaaacgactgagcgaagctcaatcaag

SEQ ID NO: 726060 - DNA, 104 bp, Homo sapiens
tgactcacaggagctaccttactgaggataaatacgtcaatatcaacggcgcgagcgtatcgcgcatgacctttcccatcttggttccttgctgtcagatggtc

SEQ ID NO: 726061 - DNA, 242 bp, Homo sapiens
tgccgggcccccccagggggtcccccacaacccggcctggcctcctggtgtttgcggtcccagtggcccctgggcaggggccccccggcttacccttaggtgctggtgctgggtctgttttggctttggggtgtgctgggaggggcccccggtcccttttccttcctgtgccctttgaaaggtaagggtttgtgtggctgtggagctcaagggtttgtgaataaaggcggcggccctgggga

SEQ ID NO: 726062 - DNA, 329 bp, Homo sapiens
  misc_feature (284)..(284): n is a, c, g, or t
  misc_feature (301)..(301): n is a, c, g, or t
tcgaatcgacggtttctctgggctgcagctttctcaggtctgacactttcccgttcaggcccttcatcttgaagagatgttctcctcatggtgattgttcttcttaatgaggtcttagatggaaatgaggaagttattgggaacaggaataaaaggtacatctatgtcatgctttcagcaaatagcttgggtgcattgtgtccaggccctaggaatctgtggaagtttgaacttaagagtgatgacttagggtatcagggtatctgggcagaagaaatttctanagcagcaaagcattcanagatgtggcccctggctgatcgctagca

SEQ ID NO: 726063 - DNA, 747 bp, Homo sapiens
attcataggacgagcacgttctaatggtgaccgtagatatgccgcaattccggcctatgtccactcagtctagagcaaaaagtcggaagtaacgtgtagcacattctgatgggtgtaatggctgaatagatgccttatgttacatagctgcataagcggattagactattactagaatccacgccattaatatggacctttgaaattcagaagatttggcctgtgaatgctgcgttgctcatgccaattcgtgttaatatgttagtaagtaatatttacttagtaccaataatacttgattgacatggttgagagcaggtgtatatcgacgcattactcgatttaatgctcatctgcagactacggttcatatttctatttcagcctattagcgcaatttatgcctcagctctgggctagtggcagggtggcgtcagtgacaggaatcagatctgcgtatttcatcatgcccagctcatcttgcctcaattcttaatcacgagaggtagctggcggaaagcagagactgttaggatacactgagccctttcagtaaggaagcttaaggtagattacgacaagttagggaacctgaccagcatacaatcttccagatggagtattacctgacatctgagatcatcttgctagtcatgctatcatagctgtcgactgaattaaggaaaggtgaactagttcacaaggcatatacgcagccgattgattcatggcacacctagctcagac

SEQ ID NO: 726064 - DNA, 263 bp, Homo sapiens
actgctgcccctgtccccgaggagtgtcccgcggagccacacctggcaagagcagtgtgggatgcagggaaccgtatgcacgtggaaatgccctggaccgtgagtgtggccctccctttctgggcctccccaggtgagccctgtccctgccccgccatgaccagcctcatatgagcccacggttcccacggagctgacttacccggggtgcctgtgccaaacaataaacccggcgtgtgtttccccaaaaaagacaaaaaaaa

SEQ ID NO: 726065 - DNA, 855 bp, Homo sapiens
  misc_feature (25)..(25): n is a, c, g, or t
  misc_feature (42)..(42): n is a, c, g, or t
  misc_feature (45)..(45): n is a, c, g, or t
  misc_feature (560)..(560): n is a, c, g, or t
  misc_feature (606)..(606): n is a, c, g, or t
  misc_feature (625)..(625): n is a, c, g, or t
  misc_feature (636)..(636): n is a, c, g, or t
  misc_feature (638)..(638): n is a, c, g, or t
ggccaggatggcccccgactctggncctccatgatcacctgntcngcctcccaaagtgctgggattacaggtgtgagccactgcgtccggccaaaaaaatttttgtaaagaccaggtctcaccatgttgcccaggctgttctccaactcttgagctcaagcaatactcccacctcagactcccaaagtggaggctggtattacaggctgagccactgcacccggcagagaatccatgtttgtttggaaaatatcacttctttgttcttgattttggtttttgatattcagtttagaacttaccctagctttcagtatatttgtgtgtgtgtgtgtacacatgtgctttatagaaagacacacacagagggagacagagattatgcagactaatgactgacttcacatattagttttaacttagaatgctgaatcatactttaaactataagaaatgctacaaacccacacaaattgtgtttgtaaaacgttaatatacaaaacataagaaatgacactatacacacgctagctgacttacacaaaataatcttagaaacnattaaagtagattaatatagctataatagccatatattatatatantgtaaatagtgaccctatnttattcttaanangatcaggtttctagtcaccatgtatgaaagtccttccaaattacctcaaaatataacaaatctttctctaaccctaagacacaagcagaattctatgcttctttggcaacaacaataactattagaaaatcttaacctcacccagaagttaaaacaagaaaagaaagaaaagaaaggaaaaaacagcttacttaaataattgtgctaaatagcttat

SEQ ID NO: 726066 - DNA, 886 bp, Homo sapiens
  misc_feature (56)..(56): n is a, c, g, or t
  misc_feature (591)..(591): n is a, c, g, or t
  misc_feature (637)..(637): n is a, c, g, or t
  misc_feature (656)..(656): n is a, c, g, or t
  misc_feature (667)..(667): n is a, c, g, or t
  misc_feature (669)..(669): n is a, c, g, or t
cgctctagagtatccccggctcatttgagttcactgcaacctccacctcccaggtncaagtgattttcctgcctcaccctcctgagtagctggaattacaggtgtgagccactgcgtccggccaaaaaaatttttgtaaagaccaggtctcaccatgttgcccaggctgttctccaactcttgagctcaagcaatactcccacctcagactcccaaagtggaggctggtattacaggctgagccactgcacccggcagagaatccatgtttgtttggaaaatatcacttctttgttcttgattttggtttttgatattcagtttagaacttaccctagctttcagtatatttgtgtgtgtgtgtgtacacatgtgctttatagaaagacacacacagagggagacagagattatgcagactaatgactgacttcacatattagttttaacttagaatgctgaatcatactttaaactataagaaatgctacaaacccacacaaattgtgtttgtaaaacgttaatatacaaaacataagaaatgacactatacacacgctagctgacttacacaaaataatcttagaaacnattaaagtagattaatatagctataatagccatatattatatatantgtaaatagtgaccctatnttattcttaanangatcaggtttctagtcaccatgtatgaaagtccttccaaattacctcaaaatataacaaatctttctctaaccctaagacacaagcagaattctatgcttctttggcaacaacaataactattagaaaatcttaacctcacccagaagttaaaacaagaaaagaaagaaaagaaaggaaaaaacagcttacttaaataattgtgctaaatagcttat

SEQ ID NO: 726067 - DNA, 178 bp, Homo sapiens
taataaccgtacagcagacagtcaaaggacatcagttaataaggtgacacataagaataggccagaaccacatatctgatgagaatggcagtaccacaccgaagtcaagacagataaacagaacatctttgcactttcttgcgtagacagacttgttacttagggctggaggcacatg

SEQ ID NO: 726068 - DNA, 134 bp, Homo sapiens
ccaaacctcttcagttgctggtcagatccgtgagaggaagcaagaaggaggaggaggagctgaggccacccttctgcagttaggcctgaggcacttctagtcaggaaagcagctttagtcagacctgatacagc

SEQ ID NO: 726069 - DNA, 678 bp, Homo sapiens
  misc_feature (383)..(383): n is a, c, g, or t
  misc_feature (429)..(429): n is a, c, g, or t
  misc_feature (448)..(448): n is a, c, g, or t
  misc_feature (459)..(459): n is a, c, g, or t
  misc_feature (461)..(461): n is a, c, g, or t
aattcgcggccgcgtcgacacacggtgactcatgcctgtaatcccagcagagaatccatgtttgtttggaaaatatcacttctttgttcttgattttggtttttgatattcagtttagaacttaccctagctttcagtatatttgtgtgtgtgtgtgtacacatgtgctttatagaaagacacacacagagggagacagagattatgcagactaatgactgacttcacatattagttttaacttagaatgctgaatcatactttaaactataagaaatgctacaaacccacacaaattgtgtttgtaaaacgttaatatacaaaacataagaaatgacactatacacacgctagctgacttacacaaaataatcttagaaacnattaaagtagattaatatagctataatagccatatattatatatantgtaaatagtgaccctatnttattcttaanangatcaggtttctagtcaccatgtatgaaagtccttccaaattacctcaaaatataacaaatctttctctaaccctaagacacaagcagaattctatgcttctttggcaacaacaataactattagaaaatcttaacctcacccagaagttaaaacaagaaaagaaagaaaagaaaggaaaaaacagcttacttaaataattgtgctaaatagcttat

SEQ ID NO: 726070 - DNA, 127 bp, Homo sapiens
cctgattgaacttgatttagtgtactttgaagatcgatcacctctctcattcagatgaaattctttggatagaatttatttccaaagtaaggattttcatcaaaataaaaatctgttcagcaatttg

SEQ ID NO: 726071 - DNA, 453 bp, Homo sapiens
gcattgtgctgagtgtgccccagtaatggctagccaggtgcttggccttagagcaccgatgtacagggtcctccaggtcttcaatggagaaaccaatgtccacaggtatagctcggaccacgactcctcttgtgacgtgtcctccaatgactggatcactttcatgcctctgtttaaatcctgcatctgctcaatgtcttcggcgctcaggctgctgaatttctcataggacactttcagtgagctcaaagatgtccacctctgcagggtgtgtgtcatcgctgctgctcagcaatgcacggaggtgcgggatagtgaggagagacactctgcctgttgaccacattatccaggtatctgcccagcatggtcatggcctcgccctcgtcgctgcagcccagcagctgctccatgttggcgcccatgacggacagggccacctgcaggatcacc

SEQ ID NO: 726072 - DNA, 132 bp, Homo sapiens
acatcgatgatagccacctacaggatgctgctggagcgcgaggagagcaggatgtctctgcctctcccaaactttagctccctgaacctgagggaaagtaatcgggattcactccctctggtagatacccac

SEQ ID NO: 726073 - DNA, 795 bp, Homo sapiens
gcctggtgtgattccgtccgttgcgcggttgttctctggagcagggttcttttatctccgtgccgccttctctcctacctatgtgcgtgcccgtatcccgatgaaagattcgatggacgatggacatgagccccctgatggccccagaactatcttgtacggtctgtgaactaaaggccgagcaagagattatcacttgtaaggtggtgtaaatgactgaaaatgtagcaccagttgatcttgtaagacatcggtcagttccaggggctgtgtgcaaagtgctgagtttgcctccattgttgaaagcagatgggccatgctacttacggaaggtcagtgccaaattaatcgtaagcactgggggagtattgaacagattgtctgtacggcccaacggtatactcgcttggggggcttccgaatatgatcgagccaccagtggttcttgaaggtagactgtggtcggtttcgagggccggtgcattatgagttggacagcactttagtaggctgtgagatggagagatgcggatgtccaggacaggattggaccgacggccggagtggattgttgaaagctcctttaagtactatctgcgaccaggcgggtctagtccccttggaagggttggtaagcaatggttccccccaggacaaatatgtaaccaacttttgctctgctttgatggaacgagtagattgcggacttgattgcattgaaagacggattggattgttgggcacgattgggtgactgatgcaagaactttggacggagattagggaagcttacag

SEQ ID NO: 726074 - DNA, 442 bp, Homo sapiens
  misc_feature (167)..(167): n is a, c, g, or t
acatccattcactcacattcatgcacatacactacggacaatttagttcatcagttcacctatagttcatgtctttggaatgtgggggaacctggagcacccggaggaatcccatgccaacacgtagagaacatgcaaactccacacagaaatgccaactgaccctngccgaggctggaaccaacaacttttcttgctgtgaggtgtcagtgcttaacgactgagccaacgtgctgccctaaaatgtttcagacatgcagtttaaagagtcaaataatgcaaatcatagatcattatgaggcagttttgatgtggatcattcgttctttatttccctcacaaatgtctttaaatcactggacaatgctttgagatctgttaaattaataatgctcttttgtatgttgtgaaataaagtcctgaggagaaatgaaaaaaaaaa

SEQ ID NO: 726075 - DNA, 802 bp, Homo sapiens
  misc_feature (40)..(40): n is a, c, g, or t
  misc_feature (105)..(105): n is a, c, g, or t
  misc_feature (131)..(131): n is a, c, g, or t
  misc_feature (133)..(133): n is a, c, g, or t
  misc_feature (165)..(165): n is a, c, g, or t
  misc_feature (208)..(208): n is a, c, g, or t
  misc_feature (219)..(219): n is a, c, g, or t
  misc_feature (248)..(248): n is a, c, g, or t
  misc_feature (252)..(252): n is a, c, g, or t
  misc_feature (258)..(258): n is a, c, g, or t
  misc_feature (261)..(261): n is a, c, g, or t
  misc_feature (295)..(295): n is a, c, g, or t
  misc_feature (306)..(306): n is a, c, g, or t
  misc_feature (310)..(310): n is a, c, g, or t
  misc_feature (320)..(320): n is a, c, g, or t
  misc_feature (346)..(346): n is a, c, g, or t
  misc_feature (348)..(348): n is a, c, g, or t
  misc_feature (353)..(353): n is a, c, g, or t
  misc_feature (358)..(358): n is a, c, g, or t
  misc_feature (362)..(362): n is a, c, g, or t
  misc_feature (364)..(365): n is a, c, g, or t
  misc_feature (367)..(367): n is a, c, g, or t
  misc_feature (370)..(370): n is a, c, g, or t
  misc_feature (374)..(375): n is a, c, g, or t
  misc_feature (390)..(390): n is a, c, g, or t
  misc_feature (395)..(395): n is a, c, g, or t
  misc_feature (399)..(399): n is a, c, g, or t
  misc_feature (403)..(403): n is a, c, g, or t
  misc_feature (408)..(408): n is a, c, g, or t
  misc_feature (415)..(415): n is a, c, g, or t
  misc_feature (420)..(420): n is a, c, g, or t
  misc_feature (425)..(425): n is a, c, g, or t
  misc_feature (429)..(429): n is a, c, g, or t
  misc_feature (435)..(435): n is a, c, g, or t
  misc_feature (443)..(443): n is a, c, g, or t
  misc_feature (455)..(455): n is a, c, g, or t
  misc_feature (469)..(470): n is a, c, g, or t
  misc_feature (473)..(473): n is a, c, g, or t
  misc_feature (476)..(476): n is a, c, g, or t
  misc_feature (479)..(479): n is a, c, g, or t
  misc_feature (482)..(482): n is a, c, g, or t
  misc_feature (486)..(487): n is a, c, g, or t
  misc_feature (491)..(491): n is a, c, g, or t
  misc_feature (506)..(507): n is a, c, g, or t
  misc_feature (511)..(511): n is a, c, g, or t
  misc_feature (514)..(514): n is a, c, g, or t
  misc_feature (565)..(565): n is a, c, g, or t
  misc_feature (572)..(572): n is a, c, g, or t
  misc_feature (578)..(578): n is a, c, g, or t
  misc_feature (584)..(584): n is a, c, g, or t
  misc_feature (601)..(601): n is a, c, g, or t
  misc_feature (605)..(605): n is a, c, g, or t
  misc_feature (790)..(790): n is a, c, g, or t
cccacaaccccagccctagttcaaagctggacacattggngctcaaacagctgcctctcaccacgaccggaaatgctgacaaatgtgtatatattatcaatcccngggggcttgggtttaaaataaaattncnttattgcgggtctccaagtccttaggatttgnccttaaaggtactagaagatgagtaagaccacacacaccaagnctatgtttagnctttagagtaaactagcaaatggccagtntgtnctaggntgnattgcatcagacatcacagtacatgaagaaaatntgctttttgtnaaangccaccaggnattttagatcccgtttaccatgaggngnggggngcggngggngnncnggngggnnggtgagtggaaaggnggagngggngggngggcnctttggnggggntgggnacgntgcaangggggggngggactgggaantggagggggagggnnatntanaanggngtgnntagnaaagtgacttgaaannggtngtnaaccacttcccagggatccctcccctctcccaccaaaacaaacaaacaaanaacaacnacaacnaaaacnctgggaattatcttganagtnaagttaaaactatgtggtggagaagagagtgcttgttccaggtaaaggacttcaagataatttacaggcagatttatttttattagtaaaagtcacaaataggaaaagacttattggctgactttgagctgtgtgcttttaaaaatgtctctattattacgttaacaagaaaaaaaaatcaagcnagtttttgcttc

SEQ ID NO: 726076 - DNA, 1127 bp, Homo sapiens
  misc_feature (343)..(343): n is a, c, g, or t
ggcccttgctccggacgaatgccccttgcatcctcttcatcgatgaaatcgatgcggtgggaaggaagagaggaagaggcaacatttggagggcagagtgagcaggagaactacactcaaccagctgctggtggagatggatggttataatacaaacaacaaatgtcgtcattttggccggcaccaatcgaccagatatcctggaccccgcgactgattaggcctggggacgtttcagacaggcagatcttatattggaccaccagacataaaaggaagagcttctattttcaaagattcatctccgaccgctaaaactggacagtaccctggagacaggcanaacattggccaagcaacaactggcatctttaactccagggttttcaggatgctgatgtttgctacatgtctgtcaatgaagctgcgtagattgctgcacaggcatctgtcagattccatacatcagaaacactttgaacaggccattgagcgagatgattggtaggcttagcagcaagcaaaacgcaggttctgcagcctgaggagcacagcaagactgtggcataccacgaaagcaaggccatgcggttgccggctgatatctggagcacggcagacccgatattaaagggttatccatcatcccacgtgcaaaggactacgtatgctcagtattacctacagaccataacttctaataccaaagatcacatcctggatacgacacgtatatgaacttacagttcacaaaaactctgaaaaaactcctacattgacacacttcaccacatgcattctcacacatcacctaacaacagtaacaaacaattatattccataatgcacaaacagcatcataacacctagcaaacccaattaacaccaaatagagacagataatacaaaaaacaaacacatcaaaaaaaaaacagaaagagatataaggaagagaagaaagtaaaaacaaaagggcacagacaggcagcaacaaggatacaaagcgtactacacagcgagagacaagaagagagtaaatacagacgagagaaacacaccaaaagatagcgctagaagagaaacaaaatgacaaaacagatgtagggagatataaaataaagaacaag

SEQ ID NO: 726077 - DNA, 160 bp, Homo sapiens
agaatcgagcgtcggtaccagatgagcagctgaacgttgacggaggtcgctctggatcgacgaagctgatatcacacgtcttgggcaggttcagctcgtttatgtccttctggatccgcagctgcgccgcggacgcttcttgctgctcgccttggtgccg

SEQ ID NO: 726078 - DNA, 258 bp, Homo sapiens
  misc_feature (107)..(107): n is a, c, g, or t
  misc_feature (133)..(133): n is a, c, g, or t
tcaagaacaacataggcatatactatatcatgggcaccaattagcaatgatttttttaaaccagtttagtagggacaaaaagacatgtaaatagacaagtgcgaaantacgtccatatgtggaacaaggtggntcgtgaaggaataagtaatcagtttgaactagaggcagaggaagtggccagaacatagggtgtaaataaggacccatggagaagtaacgctcaaaagctatctggccccataaaagacattataa

SEQ ID NO: 726079 - DNA, 955 bp, Homo sapiens
ttagtcataaacgtaccagcaagctctgcatctactggacaagagtattatgactttaaaaaccccatttattgaaaagtacctgagaaggcagctcacgaaatccaggcctgtgatcctggacccggcggagcctacaggaagaacttgggtggtggagacccaaagggttggaggcagctggcacacagaggctgaggccttggctgaattacccactgctttaagcaatagggatggagttccccagatgaggctcgcatggattctgctggtctgaaagcaaatcagatgctacgtacggagtgatcacactgacgtatcccaaggatgggtatcaggaaactaggtgggttacattggaaaacacatgaggtaccctcatttctctcatagacccaggcgcattccaggcagcatccaaacccacaaggcaaaaaaagagggactgtgtccttgcagcaatcgcgtctagaattgccaagtgaaattcttgcgcggggacaaagggccgccaggtgttactctcgcaccatggttccttcattttgcatggttggggaacgcttatgaatccaggagacggaacaagagcgtcctctaggtgagctgggttgtacttaaattccaagggacaggaatccccaggagtctcctgaacttccgtggcaactttcttattgccctcatatcctaagtcattagataaacattcttccaaaagacctcaacttcattgccaacctattctctggaaatattcccttgctgagagaaccagaggagagtttacgattaagaagacatgagaatgccaagcctttgactttcttctgtgcaaccttgatgggggagggtaattgtctaactgtaatttattcaatagccaactaaaaataaagcaaataaccaaaaatacaaagggagagacaaaaaaatatcagggacgagaaag

SEQ ID NO: 726080 - DNA, 204 bp, Homo sapiens
tgcggccttgatctcccgggtacaagtaatcctcccacctccaaagtagctgggatcacaggtgcatgccaccatgcccagctaactttttactttgttgtcgcaatgggtctagctatgttgccaggctggtctagaactcctggactcaagcaatcctcctgcttcaacctctcaaagcattaggattacaggcatgagtca

SEQ ID NO: 726081 - DNA, 127 bp, Homo sapiens
agaaatctctgtaaatcgtatcagataagggactacagtctagaacatataagaaaactcttacaagaaagaaagttgttaatggcacaggatgggaaagaaggtatacaagtggcatcgataaaca

SEQ ID NO: 726082 - DNA, 779 bp, Homo sapiens
tggcttccccggggtcggaactatagtgtggtggacccggatgactctatgatgtgtactgttatgctgaagacctaagatggagaactgttcctgggcttgaccctccagagaagctgacattggaggaatgcacgggacgtactgcaggagcggggtgcaagagattgccagcatgggcccaactgtatgcagcctgggatggtggcctggaccactgcatcccagggtggcgtagctgatggcagtgtgcgctaccccgattcgtcacactcacagcgcagcgacttgtggtgggggcttgcctggtgtcaagacgtctcttctctcttcccccaaccagactggtcattcccccaataagcacaggcgattcaacagtcatactgcattccgagactcgagtccagccttctgcgcatccctgtaggcctccagaacgcggaggctccaagccatggctctgatggacttagaggctatcgtcacagtgacagagacccttggatggaactgcaggctgcctcaggaaagccacgtgagagtgaatccccgtgagggccattgaagttccatcccccagtcatgggagtgacgcggaggaaggtggaaaagctccagttccaaaacggaacccattgagaggcccccttaggcacgctccctagactttggaaaccaccaattccctggtaccggccacggggtctcagaaggacggacgttaggcttgggggacgcagaacatatgagatgggcaaggcagaggcggaaaaaag

SEQ ID NO: 726083 - DNA, 332 bp, Homo sapiens
caaatcgccatgatgacaaaaatgagacggatggccttgtatttttcactggagcactattcacaataacaaagacattgaatcaaatgagatgcccatcaatggttgactagataaagaaagtgtcatacatatgtgccatggactactgtatagccataaaaagaatgaaatcatgtcctttgcaacaacatggatgaagctggaagccattatcctaagtgaattagtacaggaacagaagcccaaataccacaggttctcacttataactgggggctaaacatcgagtacacatggacataatatgggaacaatagatactgaagacc

SEQ ID NO: 726084 - DNA, 442 bp, Homo sapiens
ttgggggggagggaaggaagaactcagggtatgttaatatacctttacaattgctttcctgtgagttgtctcggcgggatctggaatcttactactgcatcttctatatagaagctgtgtgacttttaggtatagcagcattatgcttttatctatgggataactcattattataatatgaaatataaatgtgacttaattgatctttacattgaaatacgtgctaactgtcactgtccatagctgcctgctgagatgactatctacaggggggcactctttactgaagaaagtattgtgagtcgcactacctcagcactccttagactgtgtatcccggaactggtagctcatgaaccgtatgcttcccaattgacagggtactctcctgtctgagagacatacatgtctgtgagaccattcttctccagcatgagactct

SEQ ID NO: 726085 - DNA, 150 bp, Homo sapiens
tttggacgggctcgtgacctggagcccacgccagttacagaatgtctgagagagcagagctgggatacaaagacactggtacttaatagtcgggtaccacgtagtatactagtccacattgtcttagtagggttcacgttcaggtatcca

SEQ ID NO: 726086 - DNA, 1174 bp, Homo sapiens
  misc_feature (1)..(1): n is a, c, g, or t
  misc_feature (1143)..(1143): n is a, c, g, or t
nctacgtaagacatagagtgagaccgccattgatggtcagtgctgatctactagggcttctctgcccacgtgtctcggatctcttcgcttcgttctgaatgtgtcttcctgtagctcattcgctcgtcgagattgcgcgcgctgtgatcgcggtgcaggtgcgcttgctttgttgtggttctcgatcactaacggctagtaggtatctctggtccgacttctggaccggactgcactctgttttccggagcgtgcgtgcccagttgtcaggaagcggatgttcagtcccagctctgaagagaatgagccacagtgctgactatcaatcgtcgttgcgtcaatgtcaccgacgctccaggaagcattaggccgatcccattgccagccatctcttctcgtcgtctattcagcactcccagcctctgacttccttacctgtgacccacgtctctctctgaaatttctctgcagggcgtactggagaccaattcacacactatggatctctttcttacctgtgatgactgtcgtggactgcaaggttgtctactgcccatggtggacccactagctccaggcatcttagtatttgtcccccgtcctcatgcatcgccacaaagcggctttctctaggtgtggggagtactcctgaaaaggactgagatcgggtgcgtcctaccaagacagtggactgcaccaccctggtttttactaagaagcccacgctctgcgtgtccgagagcgactgcattcaattttagggtccacttggagtatcaagcggcaggctctcgagtcgatcttgtcgtgtgcacttttgaatcttctgctagcttctattctgccgatagcatgtgcatctcagcccgcatcaatatacttttagccacgatggatggatgttcatttatacacaggagtttctcaactccattcttcccttgctggactctgacacagactgctctcaaacagccagaagacaagggttgctactgagaaaggggagagacgatatatttcaaagagtgggcactgtaatgattttgctagctcctgccagcttgccttcctaaaatggcttttcccgccagctgatgccggatagctggtgataagatcagcttcttctatatcatgacnaaaaccgttcccggaagggagcgtcaccaga

SEQ ID NO: 726087 - DNA, 316 bp, Homo sapiens
cttaacgcgtagctggagcattcattcactgctaattcacgatggcacgcactgactcacagacgggcgtgttaagtcgctgctatgatcctgctgcctgattggggaggtgactgtcctactagaaccgctgtgaagaaccttgaacagtaacactccatgcaggcccagctgttgagggttttcttgatgaatgaatggggcaccatacatggctaagataaagccttgcgctccggactttatctgaggtgtctggagaagttctcctgcccctccacttttttgcatctactctcactaaatgagtataatg

SEQ ID NO: 726088 - DNA, 214 bp, Homo sapiens
ctcctcgtacgggcatcaagcaggaggggtagatggaggttggagttgctggtcctcttggcgcccctgtgtaccaaggaagaaaacaagaagccgtgaatagcataacccaactcccaagtgaggatgggaaatcctgcgttggaaaaactgacagaaagcacaacaatgcgaagatgaggagctggagcactataggtcgcatgagtccaca

SEQ ID NO: 726089 - DNA, 205 bp, Homo sapiens
tgtctactagtaggatccccggctgtgactatttgttgcattatacaacgtatctgtagaagatgaagggcagctttagttctataatacacagaggacttactacatgcgaggaacgtatttcaaacatgttacatatctcttttagatcttcacaaaaactttacgagggtagttattaattatctatccctagcttaacggg

SEQ ID NO: 726090 - DNA, 648 bp, Homo sapiens
gcgaattcactagtgattcggcccgcggcggggacgtagggctaagggagggggcgctggagcttccaacccgaggcaataaaagaaatgttgcgtaactcaaaaaaaacaaaacaaaaaaaaaacaaaaaaaaacacaaaaaaacaacaacacaaaaaaacaacaaaaaaaacaaaacaaaaacaaaaaaacaaaaaaaacaaaaaaaaaaaaaaacaaaaaacaacaaaacgaaaaaaaagaacaaaagaaagaaagaggaggggggcgggcgcggggcgggcggcgacacgagaagagagcaagaagggggaaggggggagggcgggggcgcgcgcggaacggggggggggaggggggcgcacacgtgcaggaagaaggagaacggggagagacgaagcagaaacaaggggtgggggcccccacaacacaagaaaacacacagcagacgagcaggggggagagcggcaaacaggggcggggacgagagagacaaaaaaacgacgacgcacggcgagggacgggcgacggcgcggcgaggggacaacgcggggaggacaaacaagacagcaggaccaggcgagcgccccgcgcaccgagacgccaccaaggacaggacggcccccgccgggcgggggggggggggt

SEQ ID NO: 726091 - DNA, 117 bp, Homo sapiens
gttagatagcagcagagtttcactcatatcgcccatgctgaagtgcatggaacgatatcggcccacagcaacatccgcctcccaggctccaacgaccctcccttctgtcgtcttctc

SEQ ID NO: 726092 - DNA, 936 bp, Homo sapiens
agatcaccatttacagctggttctcagtgctcttttttttctttgagacggatctagctccaccgcactctagcctggtgacagagtgagactccatctcaaaaaaaaaagaaaaaaaagaaaaatactgatgcctgggctccagcaccctgcatgcctagtctggatttaagtaggagtgaggcgtgggcgcctagatggatcgaggaagcctcccaggtgattctaatgtgtagaaatgttgagatacagtccttcagctacatagtgttcaaagcgtggtgcgtagatcagacatggacaatctcaaagcaccccagccttgctgaatcagcccctgcctcttaagatgcctctgatgattcctttcacaaagcttgggaagcagctttctgtcggcccagtgcctagccttggagaccacctctccatagagggctaccaggatctccttcagcactgcggaagagtgggccccagggcatgattaggagaccccagtcctttcagaatgggtcaacaatagcaagggagtgaagctcgaaggacaagttcaggcttgggggaactcatggttcagaatggctcccttccctgggttgctgcctctaggctgttctggaactgcagtgattcattgtgcttttgagttttggggctttcatctcactattgctggatagtctgtcagagttagaagtggaatgagtcgaggcaggccaggggcctctcccttgctgctgggaagggccagcacattcctcgttcctatgatgaagatgcacgtgtatacaataaccaccacatttcttggtactccacttaaaacatgtaaataacccgaaactgttactccaagtataatgtgaatacagcttggcaaggaatttaatatttgcaaaactataaaatgttttgtaatataaaaaaaaaaaa

SEQ ID NO: 726093 - DNA, 1732 bp, Homo sapiens
gtctaatgtttgtgctatttgttccgcagtgcagtagtgtgttagtgagtttattttctaagttctatttgttttttgcgtctgcttttttcgtgaattgtctgcatttgatctttgattattgtttctcccgaagataaacttatcctcttgtgtgtgttgggataccatctctttgtggtggtggtcccatacgtactattagtgttgtggtgtatgagctcaccatttttgtggtattactgcagaaaagcagctaccgtgctgtatgttattatgcgtctcctcgcgcggcggcggtgtgttcgttcgcctctgctggtgttttgtgtgtcgcttccctgtgctgtgtggttgtgtttctttgtggtgctccggccttcggtggtgggtgctgtgtattgtaggtgtatcctctcgatgtgtgggggtgtttcgagcgcgtcgcgttgtggtgtgtggtgtgggtggtgtggttgcggcgtttgctctcttctcttttcgtgtcggtgggtgttgatgtggttgtttcgtcgctctggctctgtccgttgcctcgcgcgcgcagccgtgtttgttgttgtttgtgtgtgtgtattgttgttctcgttgccattggtggtgtgtagttctgtgcagagtggggctgctggcgcgtgagttgcgtcttcttcacgtgtgtggtggtagggtgtgcggcactactacatctgctccgcatgtgttgtgtgttgcgggttcggtgccggccctcctcccctcccctcctctctgcgtcgctgagtttgtttgtgttgtgttgggcgttctgcactctcctccgccgggtgtgtagtggtgcggtgtctgctcccggccgtcgtgctggctgaggtggtgtttgtttatcctcttcgcttgcacgttcagctctgtcgtgagtgtgctgtggggtggtgttggtggtgcttgctgttgtgtcgcgtcgccgctcatcgtctctgctccgtcgctgcttgcggtgtgtgtagtgggtcgctgctccccctcctcccccctccctgcgtgggttggggtcgtgggggggcgcggctgtcggctggtggtgttgtgtggtggtgggcgtaccgcacggcactgacaacatacgcagctctgtactgctgtgtgttgtgcgcgacgcgcgcccgcgcggcgcgcgtcgctcctccctgctcgctgctggtcggctgttgtgtgtgtgctgctctcacacgcgcgtcgggcgtccacacccagcgctccctcctccgcgcgtggaggtgcgcgcgcgcgcgctcgcgtgctcacagtgctgcgcgtctctcctcgtcgcgtcgtgcgtgtgtgtgtgcgtgtggcgtggtggctggcgggcgcctcctcgcgcgcgtcgcgcgtcgtgtgtggggtgtgcgtgagcgcacccacccgcgcgcgcgctctcgcttctctttctcctccctcccgctcctcccctccccgcgcgcgcggaaggtgtgatgttctccacgaataatatatctcctcgcgcgggtgcgccccccgccaatagttatgttgtgtgtgggtggccgccccccccaccccccccacccgccccccccccccccaccacccgaggcgccgccccccccggtcgggtgggggggccccccccccccccccccccccccccccccaccaaaactcccccccccctaaaaatatccggtggtgggggggggccccccca

SEQ ID NO: 726094 - DNA, 449 bp, Homo sapiens
cgctgcatgccgagcatcccccctaaagatacaaaccctcccccacgcatggtgttcataacccggcgtgttcccctgttagccacttcctctctcttcacaccctgcactcttgctggactgatctacttgcagtttcttgaatctgcaatactcccctctttgttgctttgtgtatggtgctatttccgccgcaaacacctcctgttggttaacaccttttcagacctcaagactcagtcaagatgtaacttccagaaagccttgactcagcctacgactagttcagatcagtaacacttctctggttttctcttttctcacagctctctgtgagtacttgaacataatacttatcacataggattgtagctatctgtttccttgttgggtcctaccactagatagggagatccttgagggtagggactgtgttttagtctcccttg

SEQ ID NO: 726095 - DNA, 408 bp, Homo sapiens
ctaatccctgaatatctgaacttcattagaggggtggtagactcggaggatctccctctaaacatatcccgtgagatgttgcaacaaagcaaaattttgaaagttatcacggaagaattaggtcaaaaaaatgcttaggaactctttactggaactggcggaaggataaagagaaactacaaagacaattctatgcagcagttctctaaaacccataacagcttggacatacagcgaacgactctcaaaaatccggaagaagtctttcagcagctagttacaggtactacacatctagcctctggttgatgagtcatggtttctctacaaggcactacttgcacccagaatgacaggagaaccagaacacatatctattatatcacaggtgagaccaagggaccaggg

SEQ ID NO: 726096 - DNA, 339 bp, Homo sapiens
  misc_feature (1)..(2): n is a, c, g, or t
  misc_feature (84)..(84): n is a, c, g, or t
  misc_feature (116)..(116): n is a, c, g, or t
  misc_feature (127)..(128): n is a, c, g, or t
  misc_feature (246)..(246): n is a, c, g, or t
  misc_feature (267)..(267): n is a, c, g, or t
  misc_feature (325)..(325): n is a, c, g, or t
nnggcacgagcattggctggcggcggtttgccagaaatcccaggtttgcctggcggtgacaccggtggcgagacaccagcaccntaatccagaagccggtccgattgaaagcgcancccagcagttnngttggacgttgctccaatcgagatgatccaaccattggtcagccaattgaagatggcatcatcactggtgctgctgcactggacggcctgctggctggcggaatcccgggcggtgacnaaggtcttgccctatcccganggaatccggtctgcactgacagattctggttggggttggcaacaggcctcttcaattnggggcctcaacttg

SEQ ID NO: 726097 - DNA, 524 bp, Homo sapiens
  misc_feature (66)..(66): n is a, c, g, or t
  misc_feature (201)..(201): n is a, c, g, or t
  misc_feature (520)..(520): n is a, c, g, or t
aattaggatggaaaaaacggatttaaaaattaggaaaaggattcaaatccccctaccctggcccanagcacccaaatgccccaaagagcccactcatcctgtaagagcttgcctgtgcctgcctgggcgggaatcctgcaaaccctggtaccctgtaaaaggaataggtccttaaaggtcccctactatggttgagagcangagaaacgaaggtttcccctgggtcattaatatccatggatcacttcacctaaaataaattgcaagtagggccgagtgtggtggttgacgcctgtaacttagctagcactctgggattacaggtatgcgccaccatgaccggctaattttttatttttagcagagatagggtttctccgtgctggtcaggctggtctcgaactcctgaacttaggtgatccacccgccacagcctcccaaactgctgggattacagttgtaactaccgcaccctggcagaaaccccatctcttaaaaacaaccaaccaaccaaccaacncaaa

SEQ ID NO: 726098 - DNA, 1905 bp, Homo sapiens
gtttaaaaacagaaacgaagaaacgtgacaaagtggagccaggagcaaggctactgaaggcgcagagttctcgtgcatacattgcctgaaaacaaaaacgtatcacaaaagtctgcaataaattgcaaccttgcacactaggtcatcggagccttacacgaaaaaatacttctgcgaggacttcgtgccagaacaagctgggctgttcaacctcaatactggcgtcacccttgttactggatcttggtaggcgaaggatactttcatctcgaaaacaagattatataagtacctcagttgtatcctttagaaaaccttcgtcttctttaacctttacatagttcactatggcatgcttattcccattgcacgtgatacatacccagatgagatattgagtttattttagaggtgcctcgtctattctgactatttaggtcaactagtgttagatttagctggtataacaggaaactgttcttatgcttaggagatacatgctgaaagatatttggggaataaaagtgtcagtgagatgcttggtaaccttttcgaaaggcgtccaacaatcgaacgacacggatcgatatgcgcaacgtattcatgttccgaggcaggttttaccctttttaccaattttacatgacagatttccaagaggttccggacaggctcccggctctgcagtttgaaaatttcgctaataaacagcggtcgacccgctcttggttcaaccggattccgctagttgccggcacaggccctcgatggaggttccgaccaggtcccaactataaacgcggggggggggcaccccgatggcgagaggtagtcggttgtcgtctacacctcaaatagacatgatatctttgcttccttcttctctttctctgacagacagagaaaacagaacacagtgagaggatagcgacagagagagtagagcgtgcacgcaatacgatggacagcaccaagtatgcacgacggcagggagaacgcaggagcaaggcgggggctcgaacgccagggagaccgcgaggacagatagcacgagagcaggaaagggagacaaacgaagagaagacaaaagagactagcgagcgcaccgagccaacagcgcacaggcagcgcagcagagccagcaagcaccacagcaagaggcaagaaaacagcagaactaaggaagacccgacggcaagagaagagaagaggcagagacgaacacgacacagaagcgaccgcaggcagcacacaggcagaacgacgcgaccaccagcgacagcgcacgcagagcgagcgagaggcagacgcgacagagagagcgcgagaaagaggcgaaacgcaagcaagcagacacagcgacgcacgagaccaagacgaggagaagaagcagaaccagacgacacgaagaacggacgagcggagaaaaacagaaagaaacaaagcaaaacagaccctaagggacggagaggcgcgagaagacagacggacgaagaagaaagcacgagcagacaaacaaacagaccaacgaaacccacgacgacgaagccacacacccacacacagacagcacaacaaaggaacagaccagcagcgagaggacgaggcgagcagcacgagagagcagaacgcgaacagcacagcgggcgagaccgagaccaccaagaggagacgaccacagagaacgcgcacaaccaagaagcgagagccagacacagagccgagagcacaccaggaacacccgaaccaaaaagaaaccaaagaagagcaacgacgaacggccaagaaggagagcgcaacacaggaagcagaggaagcaagcgagagacaaccgaggcagaccggcgaagcaagggaggacagccagagcagagaggaacagagagcagcagaacaagacagaag

SEQ ID NO: 726099 - DNA, 252 bp, Homo sapiens
gcaaacccccatgacacaagtttacctatgtaacaaacctgaacatgtatgtacccctgaacttaaaagtgaaaaaaataaaaaatatatatacacaggtcattataatataaatgatagtgcttgcataatagacggtacaccgtgtctatgcaatgcaaaaggaggttgccttcatggggaagatggtaatctcaggggaggctttagcacgaaaatctgtcataattattggggacccagatttgtagt

SEQ ID NO: 726100 - DNA, 310 bp, Homo sapiens
  misc_feature (106)..(106): n is a, c, g, or t
  misc_feature (158)..(158): n is a, c, g, or t
  misc_feature (230)..(230): n is a, c, g, or t
  misc_feature (264)..(264): n is a, c, g, or t
  misc_feature (291)..(291): n is a, c, g, or t
tggtcttgaacttctgggtcttgaacttctgacctcaggtgatccacctgccttggcctcccaaagtgctgagatgacaggtgtgtgccactgcatccagcctgtnagaggcatttaaaccagagcaactctatcttgagtaggggctaggtaaaatnaagctgggacctgagctgcattctcaggagattaggcattcttagtcacaggatgagataggtcagcaacgntacaggtcacaaaggccctgctcatcacaaaaantgcaagaaagtagctgttcaaacccgncaaatccaaggtggcaatt

SEQ ID NO: 726101 - DNA, 477 bp, Homo sapiens
tcactcagtgctgtaggagaacaagagcaggtccaaatcatatgatctcagaggaatcaggaaatgtttgagagacaactgattcaaaggtcggcctgggaatggaaataccacatgagaattgatgtgcgagatcaggcgccaggcatggatggtcatcttgcctgcttgactataagttaaatcctggcgacagaagtaccgatctctcaataggcaatctcaggtcatctgctggcctctgtcaagtactaaacaatggatgctccgagtaggaaggctgctacccaattatctaatcaggagtttacaaatggttctaggcccttagccaggatagcagagccagtcttatagttgtcatgtctgcagtgagccccagcgccctgcttctccaccctctgccctagaaccaatgtatcacagaataactgttggttcagcaacaggcttcatctgcacaggaggatatacaac

SEQ ID NO: 726102 - DNA, 275 bp, Homo sapiens
atcgagctcggtccagcggacacgcactgaagagactcccagtctgggttcactgttgactggactggggtgaactgggacgatagtattcctttccgctgtagatttttttttttttggatcagcggtagacttttatgaaagtggctgggtgcccaccaaatagaaggctacatcgggttggtaatgtgtctaaggtgcagaccagcccatggcacaaagctgtcccctcgggtttggctctggctcggtgtccagggtggctggtcccgcgg

SEQ ID NO: 726103 - DNA, 674 bp, Homo sapiens
cgatggtaggcggcggcggggtcggcggtgtgcctcctgtaagaatgccaaccccctcatctaccagcgctctggtgtgagcggcctgtgactggctgtgctgaggagtgacgagcatgtgttcccgacagcatcgacgcacgcgagatcttcgatctagatatctgctccatcaatgacccggagcatccactatgactgctatgagtgagtattgaactgtagtagagcaggtgcgggttcaggttagctgacccctgacgagtacagtggctgtgtgctttcacaccaaccattccgcactgccagcatggccacgccttatatggtctagtaccatacaatggtacaagcttactgctgctcccttcctacagcgtattcaaagatggactgtgcaacatatatctaccggggacccatgcctcagagcatgcagtgaacaagcaacttgcatgataaaggagcgggtaggcagctgccctggagaaacacccacctacttgcgagcgttgtgaatacagttgccttgtcatgccgctgataccttgagcctaggcttttggacccctacatgcctgcatacatggtattcctggacccagcttcctgccagtgcttgtaacctgttgatttcttgaatcactcacactgagaaactaacatttaggcaa

SEQ ID NO: 726104 - DNA, 501 bp, Homo sapiens
gcgggtataagatctttcttgccacgatcggtggtgaatgcgtgcggtcagtgttacttgcagcagtagtcaactcgtctgccggcacggcgtgattcagcctgagcgcagcctgtcggctgtacgctgctctacgagggggcatggagcccatgcagatcgacgtggacccccaggaagaaccgcagaatgcacctgacgtcaactacgtggtggagaaccccagcctggatctggaacagtacgcggccagctacagcggcctgatgcgcatcgaacggctgcagtccattgctgatcactgccccacgctgcgggtgcaggccctgaagatggccctctccttcgtgcagagaccctttaccgtgtacatgtacgaggagatccacccgcaagctctcagaggccaccagggagctgcagaacgcacccgacgccatccctgagagcggcgtgcagcccccagccctggacacggcctgggtcgcgcgcacgcggaaa

SEQ ID NO: 726105 - DNA, 1055 bp, Homo sapiens
  misc_feature (70)..(70): n is a, c, g, or t
gggactaattgggcctagggccactacacagagggagccgagctggtcgagctcggtccgggatgtggtngaaggaaggagtcagaagagcttgggactggtgctccggagaggcttgcgcagggctggcgccacgtgctctgggcgggtgcggaacggggtccggcgatgggcaccctgctcatcagctaggatgccgggaagatgtacgcctgaccggggcatgaacagcttcagtggtcatggcgcctcacctcgagatggtgtcatgacgagtgggtggtgtgagccctagcaatcgccagcctctcggtccaccagctggtggaaaacacagatgaaacgcgtactccattgataactgaggccctgtatgacatctgcattccgcaccctgaagctgaccagccccagctacggggacctcaaccagctggtgtcggacaccatgagcggggtcaccagctgcctgcgcttcccgggccagctgaacgcagacctgcgcaagctggcggtgaacatggtgcccttccctcgcctgcacttcttcatgcccggcttcgcgcccctggaccagccggggcagccagcagtaccgggcgctcacggtgcccgagctcacccaggagatgttcgagtccaagaacatgatgggcgctgcgaccggccacgggcgtacctgacggtggctgcatcttccggggccgcatgtcctgaaggaggtggacgagcagatgctcaacgtgcagaacaagaaccgcagctacttcgtggagtggatcccaaaaagtggagacgggccggtgcgaaatccggcccgggggcggacgatgtcggcactcatcgggaacagcacggcatccggagcgggaaggccatcccgaacagtcgggcacggtcgggcaaggccccggcggccggggcaggctgcgcaagggtcacccgacaacacagaagacggggcaccacagcacagaacgggcacacggcgcagcagcggagcgcacacacaccacgcaccacagcgcacggacaagcacgagagcgaaacagag

SEQ ID NO: 726106 - DNA, 121 bp, Homo sapiens
cctcatttctattctcctcactcctcccgcattccttctactcaccttaacctccagcaccacgccccttctactatctcgcacctgtatcacaagctaacatgacctgcttgggctgttt

SEQ ID NO: 726107 - DNA, 1604 bp, Homo sapiens
  misc_feature (17)..(17): n is a, c, g, or t
  misc_feature (30)..(30): n is a, c, g, or t
  misc_feature (37)..(37): n is a, c, g, or t
gcggccgccgagccagngccccgcgggggnaacagangaagcacatctggacagctgtgcggcctcctcgcgggccgacgtcagccgagcacgtcccccacgtcctctccttctcgccacttattatttattcgttttcccaaagaagcgactagggacccaagtttaaaaattcctccccccacccaatgcgagacgtggccagatcccatccaacacacggtttaattttcatggggctctgggatcaaaagaacagaaacagcaacaacaaaagcccagccgctgtctgattttaagctggcaaagtgggaaaaataaagtgttgagtaaacagaccaagttggatcatggggaatttcagaggtcatgccctccctggaaccttcttttttattattggtctttggtggtgtacaaagagtattctgaagtatatctgcaaaaagcaaaagcgaacctgctatcttggttccaaaacattattctatcgattggaaattttggagggaattacaatagttggcatggctttaactggcatggctggggagcagtttattcctggagggccccatctgatgttatatgactataaacaaggtcactggaatcaactcctgggctggcatcatttcaccatgtatttcttctttgggctgttgggtgtggcagatatcttatgtttcaccatcagttcacttcctgtgtccttaaccaagttaatgttgtcaaatgccttatttgtggaggcctttatcttctacaaccacactcatggccgggaaatgctggacatctttgtgcaccagctgctggttttggtcgtctttctgacaggcctcgttgccttcctagagttccttgttcggaacaatgtacttctggagctattgcggtcaagtctcattctgcttcaggggagctggttctttcagattggatttgtcctgtatccccccagtggaggtcctgcatgggatctgatggatcatgaaaatattttgtttctcaccatatgcttttgttggcattatgcagtaaccattgtcatcgttggaatgaattatgctttcattacctggttggttaaatctagacttaagaggctctgctcctcagaagttggacttctgaaaaatgctgaacgagaacaagaatcagaagaagaaatgtgactttgatgagcttccagtttttctagataaaccttttcttttttacattgttcttggttttgtttctcgatcttttgtttggagaacagctggctaaggatgactctaagtgtactgtttgcatttccaatttggttaaagtatttgaatttaaatattttctttttagctttgaaaatattttgggtgatactttcattttgcacatcatgcacatcatggtattcaggggctagagtgatttttttccagattatctaaagttggatgcccacactatgaaagaaatatttgttttatttgccttatagatatgctcaaggttactgggcttgctactatttgtaactccttgaccatggaattatacttgtttatcttgttgctgcaatgagaaataaatgaatgtatgtattttggtgcaga

SEQ ID NO: 726108 - DNA, 668 bp, Homo sapiens
acggaccatgcagagttattcttggtttctttaaagccatattcaaacattcaaccttgggccctaaatcgggtcctttttaagttcacaagccatgaatcttccagttttattacctcacattccaatcctttaagcaagacttctcctatgccatcagcatgtatatcatttcctaggaatttgatcttcctgtcattctttttgggtacaacggccctttctgggttctcaaagctctagtttcttctaattctggatcatcgcaagtctggccctctttgaactttaaaacataatgtctaattccaccccaattttcagcatttcttcaactaaatcgataaagctgtctccattatgagaaaggccagaataatactccgagtaagcataagaaagctggtcattttacaacttctcccgactctaggaagtaatatgatgccatttgttgagcatctacagtgtgccaagcacatggttcatctctgcaaactgctgctacattctgtaaagcaagtattatccgcattttagggattaggaacagcttcctgatctcttgccaaaagtcacagctagtgagtggtttaggcaagatacaaaccctagttagttaatccttactcagaagtgtataggactatgatacattgtctcagctt

SEQ ID NO: 726109 - DNA, 614 bp, Homo sapiens
  misc_feature (17)..(17): n is a, c, g, or t
  misc_feature (30)..(30): n is a, c, g, or t
  misc_feature (37)..(37): n is a, c, g, or t
gcggccgccgagccagngccccgcgggggnaacagangaagcacatctggacagctgtgcggcctcctcgcgggccgacgtcagccgagcacgtcccccacgtcctctccttctcgccacttattatttattcgttttcccaaagaagcgactagggacccaagtttaaaaattcctccccccacccaatgcgagacgtggccagatcccatccaacacacggtttaattttcatggggctctgggatcaaaagaacagaaacagcaacaacaaaagcccagccgctgtctgattttaagctggcaaagtgggaaaaataaagttaaagtatttgaatttaaatattttctttttagctttgaaaatattttgggtgatactttcattttgcacatcatgcacatcatggtattcaggggctagagtgatttttttccagattatctaaagttggatgcccacactatgaaagaaatatttgttttatttgccttatagatatgctcaaggttactgggcttgctactatttgtaactccttgaccatggaattatacttgtttatcttgttgctgcaatgagaaataaatgaatgtatgtattttggtgcaga

SEQ ID NO: 726110 - DNA, 1751 bp, Homo sapiens
  misc_feature (17)..(17): n is a, c, g, or t
  misc_feature (30)..(30): n is a, c, g, or t
  misc_feature (37)..(37): n is a, c, g, or t
gcggccgccgagccagngccccgcgggggnaacagangaagcacatctggacagctgtgcggcctcctcgcgggccgacgtcagccgagcacgtcccccacgtcctctccttctcgccacttattatttattcgttttcccaaagaagcgactagggacccaagtttaaaaattcctccccccacccaatgcgagacgtggccagatcccatccaacacacggtttaattttcatggggctctgggatcaaaagaacagaaacagcaacaacaaaagcccagccgctgtctgattttaagctggcaaagtgggaaaaataaagtgttgagtaaacagaccaagttggaaacttttcagcattacctaagaagcaaaggctcaattttggctgcttcattcttatctcttctgccacagttctaacgtgcctgatctactgagaccaaggatgaccaatgactcagaagggaaaatgggatttaaacacccaaagatcatggggaatttcagaggtcatgccctccctggaaccttcttttttattattggtctttggtggtgtacaaagagtattctgaagtatatctgcaaaaagcaaaagcgaacctgctatcttggttccaaaacattattctatcgattggaaattttggagggaattacaatagttggcatggctttaactggcatggctggggagcagtttattcctggagggccccatctgatgttatatgactataaacaaggtcactggaatcaactcctgggctggcatcatttcaccatgtatttcttctttgggctgttgggtgtggcagatatcttatgtttcaccatcagttcacttcctgtgtccttaaccaagttaatgttgtcaaatgccttatttgtggaggcctttatcttctacaaccacactcatggccgggaaatgctggacatctttgtgcaccagctgctggttttggtcgtctttctgacaggcctcgttgccttcctagagttccttgttcggaacaatgtacttctggagctattgcggtcaagtctcattctgcttcaggggagctggttctttcagattggatttgtcctgtatccccccagtggaggtcctgcatgggatctgatggatcatgaaaatattttgtttctcaccatatgcttttgttggcattatgcagtaaccattgtcatcgttggaatgaattatgctttcattacctggttggttaaatctagacttaagaggctctgctcctcagaagttggacttctgaaaaatgctgaacgagaacaagaatcagaagaagaaatgtgactttgatgagcttccagtttttctagataaaccttttcttttttacattgttcttggttttgtttctcgatcttttgtttggagaacagctggctaaggatgactctaagtgtactgtttgcatttccaatttggttaaagtatttgaatttaaatattttctttttagctttgaaaatattttgggtgatactttcattttgcacatcatgcacatcatggtattcaggggctagagtgatttttttccagattatctaaagttggatgcccacactatgaaagaaatatttgttttatttgccttatagatatgctcaaggttactgggcttgctactatttgtaactccttgaccatggaattatacttgtttatcttgttgctgcaatgagaaataaatgaatgtatgtattttggtgcaga

SEQ ID NO: 726111 - DNA, 697 bp, Homo sapiens
catctaaagagccgcggggcctggccaccatggcacaaccccgtctctaccggaaatgctgaaattagcctagtgtggtggtgatgcatgcctgtggttccagctactatgggaggctgaggcaggagaatcacttgaacccgggtggtggaggtcgtggttgagctattgtgccatgcactccagtctatgcaacagagtgagcacgctgtctcaaacataaatcacctcaaaataaatacacatcaacaatcaaaatacataacagagacctcaagcagggggccaagaaagatgtcccctcagcagatctccaggatttacacttttcttttcccgccgcaattctcccacttgcagagagcatagagggtggagcttccatctgcccatctgagctcctatttgtgtttacacccataatacatgcctacccagtctgtaattaatgaattgtcagtttacacttcatatctccacatgacccaggtatcctataccctcactccaacatggaggaataccacggtcaggacatgactcctggttattatcaataaatctaaaaaaggggggcccgacaaagaattaaccattcaaaggggcacagtaactaacatcagtacacacctatctttgtacacattgatcataaactgaggccgattaatacgtcgacatggcgacatatcaaagt

SEQ ID NO: 726112 - DNA, 264 bp, Homo sapiens
aaaaaaaaaaaaaaaaaatttttaaataatttgggggggttttttgcccaaaaaagttttaggttttccccccttcccccccccccggggggggggccccaaagggcccttaaccccaacccctttttccccccccccccctttccccccgggggggcccgggggtgtcccttttttttttttttttttggggggtggggccccgggggggggggaattcccccttggggaaaattttttgggaaaaaaaccttttttttttta

SEQ ID NO: 726113 - DNA, 1501 bp, Homo sapiens
tgagcattaagcagtatctcccagcattgttagctactgagtggcacatcttcagtacgcatgattcgtgggggactcaggcagaggtaaaagtgtgaaacttttcagcattacctaagaagcaaaggctcaattttggctgcttcattcttatctcttctgccacagttctaacgtgcctgatctactgagaccaaggatgaccaatgactcagaagggaaaatgggatttaaacacccaaagatcatggggaatttcagaggtcatgccctccctggaaccttcttttttattattggtctttggtggtgtacaaagagtattctgaagtatatctgcaaaaagcaaaagcgaacctgctatcttggttccaaaacattattctatcgattggaaattttggagggaattacaatagttggcatggctttaactggcatggctggggagcagtttattcctggagggccccatctgatgttatatgactataaacaaggtcactggaatcaactcctgggctggcatcatttcaccatgtatttcttctttgggctgttgggtgtggcagatatcttatgtttcaccatcagttcacttcctgtgtccttaaccaagttaatgttgtcaaatgccttatttgtggaggcctttatcttctacaaccacactcatggccgggaaatgctggacatctttgtgcaccagctgctggttttggtcgtctttctgacaggcctcgttgccttcctagagttccttgttcggaacaatgtacttctggagctattgcggtcaagtctcattctgcttcaggggagctggttctttcagattggatttgtcctgtatccccccagtggaggtcctgcatgggatctgatggatcatgaaaatattttgtttctcaccatatgcttttgttggcattatgcagtaaccattgtcatcgttggaatgaattatgctttcattacctggttggttaaatctagacttaagaggctctgctcctcagaagttggacttctgaaaaatgctgaacgagaacaagaatcagaagaagaaatgtgactttgatgagcttccagtttttctagataaaccttttcttttttacattgttcttggttttgtttctcgatcttttgtttggagaacagctggctaaggatgactctaagtgtactgtttgcatttccaatttggttaaagtatttgaatttaaatattttctttttagctttgaaaatattttgggtgatactttcattttgcacatcatgcacatcatggtattcaggggctagagtgatttttttccagattatctaaagttggatgcccacactatgaaagaaatatttgttttatttgccttatagatatgctcaaggttactgggcttgctactatttgtaactccttgaccatggaattatacttgtttatcttgttgctgcaatgagaaataaatgaatgtatgtattttggtgcaga

SEQ ID NO: 726114 - DNA, 1680 bp, Homo sapiens
  misc_feature (17)..(17): n is a, c, g, or t
  misc_feature (30)..(30): n is a, c, g, or t
  misc_feature (37)..(37): n is a, c, g, or t
gcggccgccgagccagngccccgcgggggnaacagangaagcacatctggacagctgtgcggcctcctcgcgggccgacgtcagccgagcacgtcccccacgtcctctccttctcgccacttattatttattcgttttcccaaagaagcgactagggacccaagtttaaaaattcctccccccacccaatgcgagacgtggccagatcccatccaacacacggtttaattttcatggggctctgggatcaaaagaacagaaacagcaacaacaaaagcccagccgctgtctgattttaagctggcaaagtgggaaaaataaagtgttgagtaaacagaccaagttggttctaacgtgcctgatctactgagaccaaggatgaccaatgactcagaagggaaaatgggatttaaacacccaaagatcatggggaatttcagaggtcatgccctccctggaaccttcttttttattattggtctttggtggtgtacaaagagtattctgaagtatatctgcaaaaagcaaaagcgaacctgctatcttggttccaaaacattattctatcgattggaaattttggagggaattacaatagttggcatggctttaactggcatggctggggagcagtttattcctggagggccccatctgatgttatatgactataaacaaggtcactggaatcaactcctgggctggcatcatttcaccatgtatttcttctttgggctgttgggtgtggcagatatcttatgtttcaccatcagttcacttcctgtgtccttaaccaagttaatgttgtcaaatgccttatttgtggaggcctttatcttctacaaccacactcatggccgggaaatgctggacatctttgtgcaccagctgctggttttggtcgtctttctgacaggcctcgttgccttcctagagttccttgttcggaacaatgtacttctggagctattgcggtcaagtctcattctgcttcaggggagctggttctttcagattggatttgtcctgtatccccccagtggaggtcctgcatgggatctgatggatcatgaaaatattttgtttctcaccatatgcttttgttggcattatgcagtaaccattgtcatcgttggaatgaattatgctttcattacctggttggttaaatctagacttaagaggctctgctcctcagaagttggacttctgaaaaatgctgaacgagaacaagaatcagaagaagaaatgtgactttgatgagcttccagtttttctagataaaccttttcttttttacattgttcttggttttgtttctcgatcttttgtttggagaacagctggctaaggatgactctaagtgtactgtttgcatttccaatttggttaaagtatttgaatttaaatattttctttttagctttgaaaatattttgggtgatactttcattttgcacatcatgcacatcatggtattcaggggctagagtgatttttttccagattatctaaagttggatgcccacactatgaaagaaatatttgttttatttgccttatagatatgctcaaggttactgggcttgctactatttgtaactccttgaccatggaattatacttgtttatcttgttgctgcaatgagaaataaatgaatgtatgtattttggtgcaga

SEQ ID NO: 726115 - DNA, 188 bp, Homo sapiens
cgcagcatctagtgtcgtactactgagcacgctactctgcactcgcacctgactcagcactttgtacactggctcagcagctatatgtttacacatcatttaaatgttcctgctttgtaattcatgtaatagagatgggtggccactgtacagatatttattacgcttgagatccacattaaaggaga

SEQ ID NO: 726116 - DNA, 266 bp, Homo sapiens
gtcggcccaacttttgtctcagctcaccaaggaggagcgtgatgtgacacccccatccagcttcagtgagctgctggctgctggagacagccctgggtggccagtgtgtggacctgccaggaggtggctgagatcacaaatgcagctgccccctggtggtgcctgtcagcaagcccgtgtgcccttctgtcgctccctgtccctgctccattgtcccatggacagcacatgagcaggctcgagatgggacttgtgcacttgtggct

SEQ ID NO: 726117 - DNA, 1090 bp, Homo sapiens
tgtggagattttttttttgggggggggggaagcccccccgcgcccgcgcgacccccccgcgcccccccggcgcgctctctctcaaaaaaaaacccgcgcccccagatttcacaaaacaacaaaaaacaaaaagctcaaaacccacacgaccgcaaaaatattatatacacaaaaaagaaaaaatctctctctcttattttacatccacacacatactatatatattcctctctctctctctctctctctccaccccctctctcccacacacaaaagagagcgcgcgtgatatatactctctcacacaatagatatatatatttctctcacacaacacacacaagagcgtcgggtcgctacatactactactctctctctctgtgagagatatattctatatttttctctctctacactactactctcacagagagagagcagcacacaaagaacatgtgtgaggcacacacactaagagagagagagagtggctctctctctctctcacgcgcgcggtggtgtcgcacacacacacagtgtgcgtctactcacacccgcagcagagtagtagtatacacaaagatatagtgtgagagagagagagacacgacactctctctctcctcatcacactctctctcctgtagtatatcgtgtcacacacccacagagagatatatatattcagcagagtgacgtcgaaacaccacaaaacacagagagaggtgtgccgacgactatagtgtgagagacgagacgaagggacagaaactgcgtagacgccaccaccaccctcctccgcagcagagaaggagcaacacaccgcgaagaagagagacaccactctctctccacacaaacagagagtagtccatcgctcagctgtagatgtacaacaacgagagtgttgtggggcgacctacaaccacaacagctgtgatatcaaccagatgagagagagtcgaggaacaaaaattctctacacacaccacaagatgtgtggcgccgctgtcgccgggaggagaatgtttcgtcgaggcaacccccccccccccctgtgtgaaacacacttccccacaaaagatacat

SEQ ID NO: 726118 - DNA, 1348 bp, Homo sapiens
ggtttcttacaaaatctgaagcaggctggttgatcaccttctgggttgcagatatgccacaccaaggttgcccaggcaagataagagagagatcatggggaatttcagaggtcatgccctccctggaaccttcttttttattattggtctttggtggtgtacaaagagtattctgaagtatatctgcaaaaagcaaaagcgaacctgctatcttggttccaaaacattattctatcgattggaaattttggagggaattacaatagttggcatggctttaactggcatggctggggagcagtttattcctggagggccccatctgatgttatatgactataaacaaggtcactggaatcaactcctgggctggcatcatttcaccatgtatttcttctttgggctgttgggtgtggcagatatcttatgtttcaccatcagttcacttcctgtgtccttaaccaagttaatgttgtcaaatgccttatttgtggaggcctttatcttctacaaccacactcatggccgggaaatgctggacatctttgtgcaccagctgctggttttggtcgtctttctgacaggcctcgttgccttcctagagttccttgttcggaacaatgtacttctggagctattgcggtcaagtctcattctgcttcaggggagctggttctttcagattggatttgtcctgtatccccccagtggaggtcctgcatgggatctgatggatcatgaaaatattttgtttctcaccatatgcttttgttggcattatgcagtaaccattgtcatcgttggaatgaattatgctttcattacctggttggttaaatctagacttaagaggctctgctcctcagaagttggacttctgaaaaatgctgaacgagaacaagaatcagaagaagaaatgtgactttgatgagcttccagtttttctagataaaccttttcttttttacattgttcttggttttgtttctcgatcttttgtttggagaacagctggctaaggatgactctaagtgtactgtttgcatttccaatttggttaaagtatttgaatttaaatattttctttttagctttgaaaatattttgggtgatactttcattttgcacatcatgcacatcatggtattcaggggctagagtgatttttttccagattatctaaagttggatgcccacactatgaaagaaatatttgttttatttgccttatagatatgctcaaggttactgggcttgctactatttgtaactccttgaccatggaattatacttgtttatcttgttgctgcaatgagaaataaatgaatgtatgtattttggtgcaga

SEQ ID NO: 726119 - DNA, 219 bp, Homo sapiens
tggccgcatcgacatttattattggttaagctgagtaaaggatgacaaaaaccaattgtcgaaagaaccaaaaacatctaatgcaaaggataaaaatgttcggccattctactgtcatctggctgtcacgctttgaccaaagccaaagtgctccttcaagcagttttttctctgaagagagtttagaagcagcagaaggagcttgatataaaaagtcac

SEQ ID NO: 726120 - DNA, 1447 bp, Homo sapiens
tgagcattaagcagtatctcccagcattgttagctactgagtggcacatcttcagtacgcatgattcgtgggggactcaggcagaggtaaaagtgtgaaacttttcagcattacctaagaagcaaaggctcaattttggctgcttcattcttatctcttctgccacagttctaacgtgcctgatctactgagaccaaggatgaccaatgactcagaagggaaaatgggatttaaacacccaaagatcatggggaatttcagaggtcatgccctccctggaaccttcttttttattattggtctttggtggtgtacaaagagtattctgaagtatatctgcaaaaagcaaaagcgaacctgctatcttggttccgctttaactggcatggctggggagcagtttattcctggagggccccatctgatgttatatgactataaacaaggtcactggaatcaactcctgggctggcatcatttcaccatgtatttcttctttgggctgttgggtgtggcagatatcttatgtttcaccatcagttcacttcctgtgtccttaaccaagttaatgttgtcaaatgccttatttgtggaggcctttatcttctacaaccacactcatggccgggaaatgctggacatctttgtgcaccagctgctggttttggtcgtctttctgacaggcctcgttgccttcctagagttccttgttcggaacaatgtacttctggagctattgcggtcaagtctcattctgcttcaggggagctggttctttcagattggatttgtcctgtatccccccagtggaggtcctgcatgggatctgatggatcatgaaaatattttgtttctcaccatatgcttttgttggcattatgcagtaaccattgtcatcgttggaatgaattatgctttcattacctggttggttaaatctagacttaagaggctctgctcctcagaagttggacttctgaaaaatgctgaacgagaacaagaatcagaagaagaaatgtgactttgatgagcttccagtttttctagataaaccttttcttttttacattgttcttggttttgtttctcgatcttttgtttggagaacagctggctaaggatgactctaagtgtactgtttgcatttccaatttggttaaagtatttgaatttaaatattttctttttagctttgaaaatattttgggtgatactttcattttgcacatcatgcacatcatggtattcaggggctagagtgatttttttccagattatctaaagttggatgcccacactatgaaagaaatatttgttttatttgccttatagatatgctcaaggttactgggcttgctactatttgtaactccttgaccatggaattatacttgtttatcttgttgctgcaatgagaaataaatgaatgtatgtattttggtgcaga

SEQ ID NO: 726121 - DNA, 1642 bp, Homo sapiens
  misc_feature (17)..(17): n is a, c, g, or t
  misc_feature (30)..(30): n is a, c, g, or t
  misc_feature (37)..(37): n is a, c, g, or t
gcggccgccgagccagngccccgcgggggnaacagangaagcacatctggacagctgtgcggcctcctcgcgggccgacgtcagccgagcacgtcccccacgtcctctccttctcgccacttattatttattcgttttcccaaagaagcgactagggacccaagtttaaaaattcctccccccacccaatgcgagacgtggccagatcccatccaacacacggtttaattttcatggggctctgggatcaaaagaacagaaacagcaacaacaaaagcccagccgctgtctgattttaagctggcaaagtgggaaaaataaagtgttgagtaaacagaccaagttggaaacttttcagcattacctaagaagcaaaggctcaattttggctgcttcattcttatctcttctgccacagttctaacgtgcctgatctactgagaccaaggatgaccaatgactcagaagggaaaatgggatttaaacacccaaagatcatggggaatttcagaggtcatgccctccctggaaccttcttttttattattggtctttggtggtgtacaaagagtattctgaagtatatctgcaaaaagcaattcctggagggccccatctgatgttatatgactataaacaaggtcactggaatcaactcctgggctggcatcatttcaccatgtatttcttctttgggctgttgggtgtggcagatatcttatgtttcaccatcagttcacttcctgtgtccttaaccaagttaatgttgtcaaatgccttatttgtggaggcctttatcttctacaaccacactcatggccgggaaatgctggacatctttgtgcaccagctgctggttttggtcgtctttctgacaggcctcgttgccttcctagagttccttgttcggaacaatgtacttctggagctattgcggtcaagtctcattctgcttcaggggagctggttctttcagattggatttgtcctgtatccccccagtggaggtcctgcatgggatctgatggatcatgaaaatattttgtttctcaccatatgcttttgttggcattatgcagtaaccattgtcatcgttggaatgaattatgctttcattacctggttggttaaatctagacttaagaggctctgctcctcagaagttggacttctgaaaaatgctgaacgagaacaagaatcagaagaagaaatgtgactttgatgagcttccagtttttctagataaaccttttcttttttacattgttcttggttttgtttctcgatcttttgtttggagaacagctggctaaggatgactctaagtgtactgtttgcatttccaatttggttaaagtatttgaatttaaatattttctttttagctttgaaaatattttgggtgatactttcattttgcacatcatgcacatcatggtattcaggggctagagtgatttttttccagattatctaaagttggatgcccacactatgaaagaaatatttgttttatttgccttatagatatgctcaaggttactgggcttgctactatttgtaactccttgaccatggaattatacttgtttatcttgttgctgcaatgagaaataaatgaatgtatgtattttggtgcaga

SEQ ID NO: 726122 - DNA, 1844 bp, Homo sapiens
  misc_feature (17)..(17): n is a, c, g, or t
  misc_feature (30)..(30): n is a, c, g, or t
  misc_feature (37)..(37): n is a, c, g, or t
  misc_feature (1766)..(1766): n is a, c, g, or t
  misc_feature (1768)..(1769): n is a, c, g, or t
gcggccgccgagccagngccccgcgggggnaacagangaagcacatctggacagctgtgcggcctcctcgcgggccgacgtcagccgagcacgtcccccacgtcctctccttctcgccacttattatttattcgttttcccaaagaagcgactagggacccaagtttaaaaattcctccccccacccaatgcgagacgtggccagatcccatccaacacacggtttaattttcatggggctctgggatcaaaagaacagaaacagcaacaacaaaagcccagccgctgtctgattttaagctggcaaagtgggaaaaataaagtgttgagtaaacagaccaagttggaaacttttcagcattacctaagaagcaaaggctcaattttggctgcttcattcttatctcttctgccacagttctaacgtgcctgatctactgagaccaaggatgaccaatgactcagaagggaaaatgggatttaaacacccaaagatcatggggaatttcagaggtcatgccctccctggaaccttcttttttattattggtctttggtggtgtacaaagagtattctgaagtatatctgcaaaaagcaaaagcgaacctgctatcttggttccaaaacattattctatcgattggaaattttggagggaattacaatagttggcatggctttaactggcatggctggggagcagtttattcctggagggccccatctgatgttatatgactataaacaaggtcactggaatcaactcctgggctggcatcatttcaccatgtatttcttctttgggctgttgggtgtggcagatatcttatgtttcaccatcagttcacttcctgtgtccttaaccaagttaatgttgtcaaatgccttatttgtggaggcctttatcttctacaaccacactcatggccgggaaatgctggacatctttgtgcaccagctgctggttttggtcgtctttctgacaggcctcgttgccttcctagagttccttgttcggaacaatgtacttctggagctattgcggtcaagtctcattctgcttcaggggagctggttctttcagattggatttgtcctgtatccccccagtggaggtcctgcatgggatctgatggatcatgaaaatattttgtttctcaccatatgcttttgttggcattatgcagtaaccattgtcatcgttggaatgaattatgctttcattacctggttggttaaatctagacttaagaggctctgctcctcagaagttggacttctgaaaaatgctgaacgagaacaagaatcagaagaagaaatgtgactttgatgagcttccagtttttctagataaaccttttcttttttacattgttcttggttttgtttctcgatcttttgtttggagaacagctggctaaggatgactctaagtgtactgtttgcatttccaatttggttaaagtatttgaatttaaatattttctttttagctttgaaaatattttgggtgatactttcattttgcacatcatgcacatcatggtattcaggggctagagtgatttttttccagattatctaaagttggatgcccacactatgaaagaaatatttgttttatttgccttatagatatgctcaaggttactgggcttgctactatttgtaactccttgaccatggaattatacttgtttatcttgttgctgcaatgagaaataaatgaatgtatgtattttggtgcagaaaaaaacaaaatggncnnattggcccccgcgatgcaactctgcgcacggtgcctttccggaggatgatccatgattcgcacgcgtgctcggtg

SEQ ID NO: 726123 - DNA, 1161 bp, Homo sapiens
  misc_feature (17)..(17): n is a, c, g, or t
  misc_feature (30)..(30): n is a, c, g, or t
  misc_feature (37)..(37): n is a, c, g, or t
gcggccgccgagccagngccccgcgggggnaacagangaagcacatctggacagctgtgcggcctcctcgcgggccgacgtcagccgagcacgtcccccacgtcctctccttctcgccacttattatttattcgttttcccaaagaagcgactagggacccaagtttaaaaattcctccccccacccaatgcgagacgtggccagatcccatccaacacacggtttaattttcatggggctctgggatcaaaagaacagaaacagcaacaacaaaagcccagccgctgtctgattttaagctggcaaagtgggaaaaataaagtgttgagtaaacagaccaagttggaaacttttcagcattacctaagaagcaaaggctcaattttggctgcttcattcttatctcttctgccacagttctaacgtgcctgatctactgagaccaaggatgaccaatgactcagaagggaaaatgggatttaaacacccaaaagattggatttgtcctgtatccccccagtggaggtcctgcatgggatctgatggatcatgaaaatattttgtttctcaccatatgcttttgttggcattatgcagtaaccattgtcatcgttggaatgaattatgctttcattacctggttggttaaatctagacttaagaggctctgctcctcagaagttggacttctgaaaaatgctgaacgagaacaagaatcagaagaagaaatgtgactttgatgagcttccagtttttctagataaaccttttcttttttacattgttcttggttttgtttctcgatcttttgtttggagaacagctggctaaggatgactctaagtgtactgtttgcatttccaatttggttaaagtatttgaatttaaatattttctttttagctttgaaaatattttgggtgatactttcattttgcacatcatgcacatcatggtattcaggggctagagtgatttttttccagattatctaaagttggatgcccacactatgaaagaaatatttgttttatttgccttatagatatgctcaaggttactgggcttgctactatttgtaactccttgaccatggaattatacttgtttatcttgttgctgcaatgagaaataaatgaatgtatgtattttggtgcaga

SEQ ID NO: 726124 - DNA, 220 bp, Homo sapiens
atcccctatactgttcgcgccaagtgtttgctattgaacagtatgtgggactctgtcgtgaatctcggagattgcagaggtcccatcagtctgaccttaccagttctaaaggatcctggggatcctgcagggtccaaatagcagacacccagcaggctggagaatgcaccacggagccgaggcatcctccgctgctgaatgccgggccgtggtaccaaca

SEQ ID NO: 726125 - DNA, 111 bp, Homo sapiens
tatcaagtatcaaggaagaaaggagagcttcaaatccatgaaggaacgggaagaattgcagatcaggtaatctacaaaccggactgtcgtggggactgggtcatgttctgt

SEQ ID NO: 726126 - DNA, 193 bp, Homo sapiens
aattccatcagagccaattttaaaagcatatgtggaaaataattattcttgctgtactttatgcaaataatcaggccaagtataagactaaagtttattttgcaaacaatcctattatgatttgtttttaacaaaaatgaagactggagagtttcaaaacttatcacacttgtcattaaattctagttttatt

SEQ ID NO: 726127 - DNA, 136 bp, Homo sapiens
aaaaagtcaacagtttgatgattgtagaaataaaacagttctataaattgttataatttttcaagtctaaagaagtaccagtacagaaaatggtcgaaaagtttctaagtaagtcatcatctttgtcggtttacga

SEQ ID NO: 726128 - DNA, 719 bp, Homo sapiens
  misc_feature (592)..(594): n is a, c, g, or t
  misc_feature (628)..(630): n is a, c, g, or t
  misc_feature (633)..(633): n is a, c, g, or t
atgcctacccgtctgactctgagcggacttcgccagtacctccccccggtacccctgtccgacgcccgcctaccaccaccagatgccacccccacactcggacactgtggaattctaccagcgcctgtcgacacgagacactcttctgtcatctttcgtactatctggagaggcactaaggcacagtatctggcagccaaggccgctaaagagagcagtcatggcgattccacaccaagtacatgcatgtggttccagaggcacgaggagcccaagaccatcactgacgagtttgagcagggcacatacatcgtacgtttgacctatcgagaagtaggggccagcggaagaaggaacggctctgcaccttgtgagtaccgctacctggaggaccgggacctccagtgacaccggcccctccctctactccactacaccgttgcaccccgtcatgactgatccccgctagcccaggtgagggccactgaccctggaagactggagggaggccaccaagccacggggcatcacaccctctcccaggaagcagggagggggccgggaggttttcctctcagccccacctgggggnnncgggggcgagggctgccccctcctcccctccacnnntgngggacattttttggataaacactattattcattaatggaaaatactttaatgaactacaccctacgctctcttactatgacacaca

SEQ ID NO: 726129 - DNA, 204 bp, Homo sapiens
gggaatacagacgtgagccaccgcgcccgggtgggatatatcacagtttaatcatccacctgtggaaggacctcggggttaacttccaatttggggctatgaaaaataaaacggcggtgaacatgccattttatatttccgctagccacggtacgcatgatccagtttctctctatcctggccatcactgggtgttagcacggg

SEQ ID NO: 726130 - DNA, 145 bp, Homo sapiens
cctgaaataatggattactagcacaagttggtcatgttatcaaccatgcacgaagaccaacagtaccggaatttttccttctgtctgtcctttgaccacatggtttatggtcttaccttgcatcttcagaggcatgctgaaaatc

SEQ ID NO: 726131 - DNA, 191 bp, Homo sapiens
gcctggcctgggtccaacctgtgggggcttgcccctgggcttggggctcccgtcccccctcaggggtggtttgcagcgctgtcagttcagtgtggaaagcatttttttttaagttatgggaacggttcctggggttgctttgaaaaaacccttccttacctggggggttttttataaattttcataggtta

SEQ ID NO: 726132 - DNA, 164 bp, Homo sapiens
tgcggtctcataaaaggtttggtctcgtaaaagcaattttttttccaaggacacagccctcaggagatccggagaagataggctcaaaacaagctctggtgatatgttgcccagggcaggttaacagttttcaggtacagtcctgtatcagggtgtggctaatc

SEQ ID NO: 726133 - DNA, 906 bp, Homo sapiens
gggaccctgcagcctcggagatgttgatgcctaagaagaaccggaattggcattgattaatctccttataaaaggataggagtcgatgtgtggccacagaaatgggatgtccgacatgcctaagtcgtcccggagactagtggagactaataatgtgcccaacacttcatgtcactgaatggcatgtagtctctcgacgtctcgtgactaggatgaaggagacgagttgcgcctggagatcatttctacctggtatcgcttaccagactgaggagtatccaggtatctccgtgattaccttcatctgcccccgtagattgtgcctgtcatcctacgccgtactccgtccagagactgtgcatgcctcggccgtaaatggctctggagggtgacgcgacctgacggattcactcacaactaggggaaggctagtacagtagatacctagccgtacggagtgctgtgtcgacctggttgctcgtacagaagatcttgatgtctggggctgtctcagcaaaccgaattccagtttagaggcggatttggtcgtggacgtggtcagccacctcagtaaaattggagaggattcttttgcattgaataaacttacagctaataaaaagggcgctgatagatagacggtgcccccataaagagacgccgcatggccacattcttgagggcgggcgaaccaacgcgtaaatgcgcgggcaaggtcgaaacaggttctccaagccggttttgttataatgggcaacgtccgggcgcccatagtgggacgcattattttcacaccgggtgatcctgttatattcactaacagcaaattcagatgcatgtgatctaatacctggcatcaatgctacaagtgcttcaaaatcgtgaacacgtaaatgcatgacgatt

SEQ ID NO: 726134 - DNA, 873 bp, Homo sapiens
tgcaagatggccggagagtgcagcagcacccctgagctgtcagtgctgttccgccgctggccgctgatgtgccctgcctggcctggctggtggagctactgccctggacggccagcagttgccctgctggtgagtgtgtgtgcttgcctgctggctgatgtgctgagtgctgggcctgctgctgctgtctggctgtcacatgccctgctgtgcatgatgtgctgcccatgtggctggcctgtgtgcccacgactgcctgaaatgcgcctgcttagctgtgtttgcctggcctctggatgtgcttccccctgtgtgcccctggctgtgctttggaacccgtgctgctgtgtgctgtggagtgctcgggcgggcggtccgtgccctgggactcgggtttgggcgaccaggaggtgccggtggcctgcgctcggacccggtgacttaaggagattaaaattaattttggttgctgttggttcttgaacaaataagttgagttcttttagtttgagggtattgccagtttttgaagggactgaggacggttgggaggttttatccgtaggaggataagggggaagatctttggggaaagggtcaggtagtttttagtagtagggaagagggggtgattgaaggccgtgcaggggagggtttggagggtcagcgttcgttcgcaggcttggcacgcggattaacgaggagtgcgacatggtaagggcaagttggggtatgggggcaagagcggttgaggccaaagcccagtgttcgtcgtttggagtcgacggttttcgcagtgtttcgaaccccgtaagcccacgtggagggaagagtcagggggaggtgggattgttgtgacctattgtcgggaga

SEQ ID NO: 726135 - DNA, 892 bp, Homo sapiens
  misc_feature (375)..(375): n is a, c, g, or t
gtgctggcccccaggattcccccagacaaactgtctttgtcaccacgtggggctcactttgttcatcaccttcccgcaacttccctagatccccgtactagagttggacagaccccttcggctacaggaaggcaggaggggtgagtcccctactccctcttcactgtggccacagaccccttgccctaccgtcctgggatctgagtacatagtagtggatgattggaagaatgcagtcacattagttgtccatgtgaggcccaagtagcccgggttggctcgccacctgaggattggcatgggtgcgtgcatccccactaatccctacttgttgctttccgacacttcagctcaatttccccctgtcctcagaantgggagctacactaataatcaagggaggctcacacctgccccgactcacaaaacccacccacatcctgatccatccctagccacccccaaagggttcctgggtaccaatatattatccatcatgatcgcacaaaaaggtaaccctcctgaaacagcttgctgtacgtgagcgccgcgtatcaattgttccacttctctcgatcatctcggtcacttagcttgcgtgcataccagggtagccaaagatgttcaatcctccattggcctcccctgttctgcccacggatcccccttccaccccaagaatacctcttgctggccggaacgacgggggcgtgccggcatggcagggcggggtggaaccgactaccccagatccacacgcgcaacggtgggggccctgcccctaagggatgcttgccgcccacagtgaggcacaggggggcccgaaaccaccaataaaaggtgtacgggcacaacatcctcgcccggtaaggaggagacgggacccaggacg

SEQ ID NO: 726136 - DNA, 347 bp, Homo sapiens
atatatatatgtatttataactggttacacgtgggattcataattaggcataaccagttgtagttggcacagttttggtatttaagctcagggtcaagttctgtttcattttgtcggtccaaagtacaaagagaaaataaaaatgaagggcatttgatctccatggtgtttacttaaatacaggaatgtcataggaaacagtatgtacagatgagcagagcctcctgacccctattctggctcttggagataggggctggggtccgatggaaacgggtcaatgcggcctgctgctggactccgaggcctgcctcttgcgtgaaggggtgtagccgttgagacagcca

SEQ ID NO: 726137 - DNA, 109 bp, Homo sapiens
gtccttacttccacgatcaccaaggtgtcaatgtccagcactgtgcaggcagcaacatctttgagagaacggaggtctggcagctctgattgtgggtggcatcgtgggg

SEQ ID NO: 726138 - DNA, 410 bp, Homo sapiens
cagttccgagtgctctaggtggacgtaggatggtaggttatggggtggagaggttgagtgtggtgtagggccgtcggttacgatataagagtagcgagataaggatgaaaaagaacttgtggtaggttattatccgtattacttatgtatgaaagtgttggttgtttggtagatagagggttagcttgaccttgattttaagacgctccctctgcacgaagagcctaaatctataggcgaagggggactttagctttgtaataagttgtggcctgtgttagtgttttaagattttgagtagcaagaagatcgggttgatgcttagtatgaatggttggagctttaccttcagtcttaggttctaggtgaagtccccgattatagcgcatcgttactgcctgactggctaa

SEQ ID NO: 726139 - DNA, 454 bp, Homo sapiens
atccgaaagtttcttttgttgcacagacaggctctgtactttttttgttactatttggagtcaggactatggagccgagtagttaatcttataaatatagccggtgttacttgtatgaacttacagttaacataggaaaaatacaagtaaggatgtgagaattggcatttaaaggggaaattttcaacccttaatctgaaacacagaagacagtcttaatcataactgtactgtgacgaatgctattgatgtcaataggtactgattactttccaaatattgatgtatatggccagtgggcttttcttaaatgaaaacactgttccatataaagtacatttatgtttaatccagtaagagaatagaatgttcattggtgactctttaaatcctttactaattatctaattggaaagcgaaaagaagggcctatattaaatgctgaaagtgacaa

SEQ ID NO: 726140 - DNA, 217 bp, Homo sapiens
acatcagctaactatgacatatgatctgttttcttcttaactctgtcatctgtggtgtactacactgacatagattcttatcctcttgaactggccattgtgtccatagcataacccccacttgatcataggtgtataacttatttctaatataatgctgtatgtagttctactccactaattttttttctttcttttttttttgggaaggcggaaa

SEQ ID NO: 726141 - DNA, 1146 bp, Homo sapiens
  misc_feature (753)..(753): n is a, c, g, or t
cgtgtgtggagcgtgctcgccggacgcgttgtgtggcttgtgtatgttcttcgtcgcgtgcgggtcttcttgggtgcgcttttcccaggtggtttgcttgttggtctgtgtctccctctattactcgtggggtctaattccggccttacgttttcccccctgtgccattctgtgtgactcgttgctacccgggggcccccacccgtttaaattggggctctcccgcgccggcctttgtctgtgggcattatgtccctgaactgttcccccttttgggtgacccctccccgtctggtggtaccttcgctttggcccaatttcgatcccggcgtcgaatgtccttcatcgctcccaagaccactgggacgacccccagggggacttctccccaacggccctgtgcggggttccgggtgttcctgctccggtctttgtgcgctctcccctgggcaatcattgttgctgcccccctggttggggccccctgggttttccccgaaatccgctcatgtgtcgtgaacccagccggttttttacttgagttggcgcccttcccgcaggggccctgtcccctggggccccaggaggccccaatgtggacctttttcgtgttgtaccccgggattacttaaaggtgcccacctagagtgccccttagtttcgtgtaacgcgttgtccaaagtaaaagagttaaagtaatttgtcaaacacttttgcttcttgtccccgccacgggacccaggtggcacgaanccgaggcttatgggtctggcacccccccaccacgctggagaccgcgaaggctttccctggggactggtgttctcccggagcccggggttctcgtgtctaccacgatcgggctcttggcccctcgcgacggcaccctgttgaaccacctcggagggttcccccggagccacccctcggggtgggctcctgagggaccctggggaactgattttgttttgttggtgtgtggccacctgtggcgaccggatataggccctgaactggggaaccccggcccttccctgttcccccctgagcctgcttctcctgagaccagatgctcctagtgaggctgccggcccggtgtggtggggccgagtgtgaccctttgctaaataaagtgaaataccccca

SEQ ID NO: 726142 - DNA, 438 bp, Homo sapiens
  misc_feature (163)..(163): n is a, c, g, or t
cgttaagaacaggtgaggcctggtgctatcttctggagcaaggctgacagcttgacttgtggggcaggattctctgcagcccattcccaagggagactgaccatcatgcctctctcgggagcctagcctgctccaactccatactccactcccagtgccccancattccccaatccctcttcaggcctgtcaagagggaggaagggggccatggcagctcctgaccttgggtcctgaagtgacctcactggcctgccatgccagtaactgtgctgtactgagcactgaaccacattcagggaaatggcttattaaactttgaagcaactgtgaattcattctggaggggcagtggagatcaggagtgacagatcacagggtgagggccacctccaaacccaccccctctggagaaggcctggaagagctgagaccttg

SEQ ID NO: 726143 - DNA, 483 bp, Homo sapiens
  misc_feature (191)..(191): n is a, c, g, or t
tcttctccaatagaaggctgttttgttggctttgaaaatctgtaatttagtgtagccaccttcatcaatgatcttagctagatcttctggataactttctgcagattctatatcagcacttgctgcttcaccttgcatttttatgttatggaggtggcttctttccttgagcattatgaaccaacctctcntagcctcctcaccactctcagtctttatagtattgaagagaataggctgggctcagtggctcacgcctataatcccagcactttgggaggccaagatggaaggatcacttgaggccaagggttggagaccagtgtgggcaacatagtgagtgttggcatgcacatgtagtcccagctacttaggaggcagagcaggaggattgcttgagctcaggagtttgagactgcagtaagacatgatcaagcccctgcactccagggtgggcaaccacgccagaccctgttttttaaa

SEQ ID NO: 726144 - DNA, 997 bp, Homo sapiens
cttgtcgtggaacatgacttcatcatggccaccgtatctagcggatcgcgtcatcgttttgatggtgtaccatctaagaacacgggttgctagacagatcctcaaatcccttatggcttgggcactgaatataaaattgtttgtctcagtttgaaattacatgcagcaaggagatccaacatcaactataggccacgaatgaaacgaaatcttgaattcaatgaaggatgtagaacaaaagaagagtggaaactacttttctcttggatgattagacatgactctgagaatatgataagccatttattaaaaggagtatttactatgaatttttggtcatataaaatcttgagattcaggattttatgccaccacatactctggaatttgaagtatagtatacttaatataacataaaaagccagttgggctgctaccagttcgtagttcgaaacacatgaaaatgccacttattctgttcctgtaacgaggcttcttgtgtgcataatattactaaacatgaacgacattctcaagctatacataattacttccacagttgttcatgagtgtatgggaagatttcagtaggtgtattaatattcacggtaccacacttgctgtaccagtgttgctcccttctggaaatctgtgaaaaaagcggttcactgtagcttacctggtttgccaagtatgccagtgtaatgaaactgccttatggtaaaagccaggcaaagattcactgcttgacagttggattaattgaacatccggattatgttcactgggggtgtcacgtcgtggccgtataattaacacggatatggtttcccgagggaaaattttcccggcgaaacccactgtttgtaaaatcgctttacactggtgcaacctataggggccttacaagtttatcaaaaaagaatacgtccttccgaaaacccatatttggaaatggttgatacgagggggatccccccagagtgtgccaaacttt

SEQ ID NO: 726145 - DNA, 358 bp, Homo sapiens
acctgaaagttttccagttgtgaaaaaaacaaagctgactattttttatttataagtatgtaaatgttcgaacggatcagaacatgaaatgccgtcgtaaatgtcaggtgttggcacacagtagctccaacaccttgagcatttttaagggagtggcttcatttcagtagcgacaaatctttaagaatagttgtaaaattggggttgtgatttccatttctgatgtgtccagattggcacccctttgtagttcaatacagtcacgagatttgccaggggcagccaaggcaaacaatcccaatctttatatataaaatgtattcaagcaaaacatacaaataaatttctgggatattta

SEQ ID NO: 726146 - DNA, 239 bp, Homo sapiens
  misc_feature (208)..(208): n is a, c, g, or t
ccccagtggtccaccccaccctcatgaaagttgccctgcagggcgaagacctgcgagagctgcgcagacatgtgcacgccgacagcacggacttcctggctgtgaagaggccgtctcagtgcgtgttcccagcctgcacctgcacctgctttttttttccctcggagcaggaaggggccgcgggtggggagaggcctgtgcccaagtncccccctcaagaggctgagcagcttagccac

SEQ ID NO: 726147 - DNA, 931 bp, Homo sapiens
gagagagtggggaacgtccggcttcggcagcgggcagtgttcgtatgtgccagcgcactcaacacaagcagacattcaacatcatagggtgcatgttgcagcaacaggcacagcacagcatttttcattcatgacagtgttccccagttgccacacacgttgacaaagggcaggcaacgcacagagactgtggccaaagtctccatgggtctcttatgggcggcaagacaggtcagggcccctgggatactcgttacaacaggccgggcaataagaaacaaaaggcactcaatgctaggggggaagagggaattacaagtggaatgtgcagtcattttgggaaggaattccgcaaggaaggttacaattcccgttgggacaaaaaaaaagtgggatcttatggtacagggacttttagaagtagatgcgaacggagagagagacaaaggggggacagaactgtttaactttaaggatctagaatgtgtgcacaagaaagatcagggtttgagttgtaatttggggattgtacatctaacattggggggggcccagttggggacacctgaaaaaagtggagcagtgtgataagcgacgatgaagcagcggaggaaaaaaatgtgggtctgatataacaaggtggaaagtagtgtgtgatgtgaaaaaggggggtgttggagttcacaacaagagttcacggggattagtgaaggaatgaagagaagttcctggttcagtagttagagatggagcctgaaggagaaacgttgtaccgcagcaaatgtacgaaagttggacatcggtaggagtgtgtgggaacagtaggagaataccatgcagttcgttagtggggttaagggaggagacaacggggtcgccgggtagagaagtatattaaggaagcgtgttggaaaaaggaaaacgtgaggac

SEQ ID NO: 726148 - DNA, 407 bp, Homo sapiens
cagattaacccattgcgtgaagaatcatcgcgggcaaggcgtacaaggattcggagataaaataagaggggaagtattgtaataagggatatatcccatccatattgcgttgttaataataactggtggcgcgaaacatggacaaaaggatcggataggtgccgggtggacaaggtccggcgggtacaacgacgtatgtggcgggatgcataccgcccgtaatagcgtgttggggcctgaaataggtattggggcggagggcggataaaagtaaagtcgtgccaagcccagcgtccgcggacaccgtttcgtcgcggtatggatatttaagtcagcggcgccggcggtcgcgcaagcttataaatacgatagggaccggaatcggcacataaaagaaatcgcgggga

SEQ ID NO: 726149 - DNA, 238 bp, Homo sapiens
tccaaagcgtgaccaagactgagccaaagaattgatcaagttaaatgaaaactgacatctgatatgagcatatttattagtctattcaagcacagtttcgaatttagcaatacatctaaatcctcacatctctacaaggtaggtcaagagctatgattcttctcacttgtacaagataaatggctgtattacatgtctagtcttagttctgacaactgttggatactacgctttggca

SEQ ID NO: 726150 - DNA, 1024 bp, Homo sapiens
  misc_feature (1024)..(1024): n is a, c, g, or t
tcttcatggtggcttgtgggaagtcagcctacgctgtgtccctgctgcgggagtgtgtgaagttgcggccctcgtgaccccaccgtgcccctgcatggccgcgaaggtctgtatcgggtcccttcgcgtggctagaggaagcagagcacttggccgtgatggtgatcagctctcggagaggaagccggggagttcctccccatgggctacctggactctggggtctcacctatagcctgcaggccgaccgatcgccaccctgaagtccaagcaagatgaattgcaccggaaggcactgggtgacagctggagagggcgtcagctggctggccgcccagtgacccccgaggtcatcctctatgtctcgctggcgagctggccctcgtccgacagatctccagtgccatggagcagctgcaggaggccctgagaggttggcaaggatgatgcgccacgccctccacactgctggcactggctcttcgtctgcccgagaaggcaactagcagtcatgccctggtatgtgtcgaacatggcatcaccgagcaagccctgaggaacttcaagctgatgttgagcaaggtgaaagctggagcaggtgctgaaagggccaggaggaaagccctcgtgagctgcatgacaagtgctgatgctgtgggggaccctgtaccaggttctcccagttgggaggctaaagaggattggagttcgggggaggcgccaccgtgaaaaaggagaggtggctggcgcctgagttggctgaggccatgaatgggaggcctggtcccggggggtccacaaagcgctcccgtgagaggacagtagagaggggaaaacccttggggtaaagaagccgcgagtgggggcccgggccttcgttgtggcggtctcgtcttcaggcgcacagaagagtcgacaaaggagggagaccagcacgcaataggggaggagaagaagaaacaggaggaaagaccattatagcagcaaacgagagaaaagagggcccccgggcgcgcgccggccn

SEQ ID NO: 726151 - DNA, 814 bp, Homo sapiens
gcttggacaagctcctcctttacctgcgcatcgtgcattccttggattattacaacacctgtgagtaccccaacgaggacgagatgcccaatcgctgtgggatcatccacgttcgggggcccatgccacccaaccgcatcagtcacggggaagtgctggagtggcagaagacttttgaggagaagctcacgccgttgctgagtgtgcgggagtcactctcagaggaagaggcccagaagatggggcgcaaagacccagagcaggaagtggagaagcttcggtcacctccaaaaaggccaggaaccggggcccacgggttacgttggccgtggtgtcctcctacatgtggccaggaatatccagaggggctcctggagtgtgtgcgcaaacctatatcttcaacaagcatgcagagaaaatcgaggaagtgacaaaaggaagtcgcgttttttaacaacttcctcactgatgctaagcgcccagctctgcctgagatcaagccagcccagccacctggccccgcccagatactcccccacaggtttgaccccaggactcccctacgccacaccagactcccaggtgctgatgacctatggtcagcccggaccccgatcttgggctatggagctggtgctgtccagcctgcagttcccacaggagggcctccataaccccgatgcccgtatggagcaggcgaaggaactatgacgccttcccgcggccagggaggctaccctgggcaaactcggcacacgatgctacgagaagacccaaggccatagcggacacaacgggacggatgcccaaacca

SEQ ID NO: 726152 - DNA, 450 bp, Homo sapiens
  misc_feature (17)..(17): n is a, c, g, or t
  misc_feature (70)..(70): n is a, c, g, or t
  misc_feature (117)..(117): n is a, c, g, or t
  misc_feature (160)..(160): n is a, c, g, or t
  misc_feature (188)..(188): n is a, c, g, or t
  misc_feature (190)..(190): n is a, c, g, or t
  misc_feature (194)..(194): n is a, c, g, or t
  misc_feature (202)..(202): n is a, c, g, or t
  misc_feature (213)..(213): n is a, c, g, or t
  misc_feature (219)..(219): n is a, c, g, or t
  misc_feature (228)..(228): n is a, c, g, or t
  misc_feature (241)..(241): n is a, c, g, or t
  misc_feature (252)..(252): n is a, c, g, or t
  misc_feature (257)..(257): n is a, c, g, or t
  misc_feature (260)..(260): n is a, c, g, or t
  misc_feature (299)..(300): n is a, c, g, or t
  misc_feature (345)..(345): n is a, c, g, or t
  misc_feature (352)..(352): n is a, c, g, or t
  misc_feature (385)..(386): n is a, c, g, or t
  misc_feature (430)..(430): n is a, c, g, or t
cacaccaggggccaggntccagttccctcatctctggcaggaaagatccacagcttttcctccatgtctnttactcactttcaccagtccgggtaaaatctgtggatcagggttaanaaagcaccgtggagaatggccctcttcaggaaagaaaaataancaaatgaatggtccacctaggggttcantnaagnaacaaatntgttaactgancctgantcccttctnggaagtaataatnaccattgacanctaanaantagacaccatgctaacacacttacatacaatctccttgnntcttctcaatagcccattgcacctctagaaactgttactttcccnttttacncacagtgacacatgaggctcagatataaaggannggtactggacttgaagtcacaaccacgacaggagtaaggatttngcttaaggatttggtcctgt

SEQ ID NO: 726153 - DNA, 86 bp, Homo sapiens
ggatttgctggtgcagtacaactgggcttaatagggacatgccattgcacttcagcccaggcgacagtgagagactctgtctaaaa

SEQ ID NO: 726154 - DNA, 468 bp, Homo sapiens
agctctttatgacctgtatcttgtgccgatatcctgtcttattctgtgacctagaatgctttaaccatctgggaatgcagcccagcaggtctcatcctcatttttacccagcctttattcaagatggagttgctctggttcaaatacctctgacaattcctccccccaactgttgttcaggcaagactgccctattttctgtcattatatattaaattttagtttctagaattttaaataaatggaattatgtaatatttattcttttatctggcttctttccctcagcataatgtttttgagattcatccatgttgttgcatgtatcaggagtacctttttattgctgagtaatattcttttgtatggatatatcacaatttgtttattcactcacctgttgatagacattggggtcgtttccagttttggctattatgaataaagttgttatgaacatttaaaaaa

SEQ ID NO: 726155 - DNA, 256 bp, Homo sapiens
aaaaaagccaaaatggcccccggaaacccttttttttccgggccttcccggaacttttttggggagggacttaacgggcccaaaagggggggggttggttaaaaggggtaaaaaggcccaaaaaaaaagggttttttttttttccctttttggttaagaaggggggggtttttttttttggcccggtttagggagggggggaaccaagttggccccccaaaaaccgggatttttttttgggggggggtttttccca

SEQ ID NO: 726156 - DNA, 436 bp, Homo sapiens
  misc_feature (19)..(19): n is a, c, g, or t
  misc_feature (31)..(31): n is a, c, g, or t
  misc_feature (36)..(36): n is a, c, g, or t
  misc_feature (40)..(41): n is a, c, g, or t
  misc_feature (55)..(57): n is a, c, g, or t
  misc_feature (70)..(70): n is a, c, g, or t
  misc_feature (79)..(79): n is a, c, g, or t
  misc_feature (131)..(131): n is a, c, g, or t
  misc_feature (184)..(185): n is a, c, g, or t
  misc_feature (288)..(288): n is a, c, g, or t
  misc_feature (369)..(369): n is a, c, g, or t
  misc_feature (383)..(383): n is a, c, g, or t
  misc_feature (385)..(385): n is a, c, g, or t
  misc_feature (409)..(409): n is a, c, g, or t
tggacgggcagaacaccanacacacagaganaaacnaganngcgtgcataacagnnncaaacaatgcagngctaacgcngtcagcggtgacagagaaccactgaaccaagatcaggcgaggccgaaatccngggaggtgagagccagccgggccacgtctgtcctagggttcggatcactgatnnggcatccctgtgaggctgaagagagagttcccaagaggctcttgtagctctcctgagtgggaggacaggacattccagcacagcaaggcaaggccctggcccntcctgggcagcccctccctgagggtgcgggaagaccagcagcgccgggcccttggggactctctgagcacttatcagtgtntctggccccttggntngatgagattctctcagaaacaacnttctgtccctcaggcaggggtacggag

SEQ ID NO: 726157 - DNA, 280 bp, Homo sapiens
gggggggaaggttttttgggggggagggaaaaggggccccccaggtttttttcccattcggggttttttggttttttaaaagaggggtttggcctaaacccccagcaaatggggaaatgggggggggggacccccaaaaaaaacggccgggcaaggtttttcttaaaccaaaattaccctttttcccaggttttttggggaaataaaggggggttctttgggggttggcattttagcccccggttttgttcccgggggcccttccccccctttagggcca

SEQ ID NO: 726158 - DNA, 508 bp, Homo sapiens
tggtacatcgtttgtggtgggaggacggcgctcggtttaggggattagagaactactcttgtccctggctgtcacaggagccacgagcttgtaatatttcctctgtatgtgaacacccacaatctggtgcacaaagggcacacatattggagggcctggttgtgtgctgggctaattgctgctgcagtttgggtcaggggaggtcccttatgcagaactgtctcccttgtactgcctttaaggcactcctgtttctaggcgtgcccatcacccacagcaggtccactccagatgtgcagctgtgtctggtgtgcctggatgctccttaggggtgaagctgcatcagagctccctggcagggcagtctggatgagttctttgagttggcctctgggtccgccttctcgggatccgtgcacgttaacgattactaggactatgcagaaaccttgttttctttttttttttttttttttctttttttctcttttttttttttttttttttt

SEQ ID NO: 726159 - DNA, 1029 bp, Homo sapiens
ccccccccgagccgcccgccattgccccgcggcaccccccgtgaagaaaggccctctttatccccgggagcaccataaagagattaaaatagaagggaagggcgagagtcgctggtgaccaccatgacacataactcacccttgtattttatatcattaatcgatggaggacaacacaaaacgacaacaagaaacagcccaccagtcacctgaaatattcatagagagggggaattgatgcgatgcactatagctttattttttttttcttcttggattttgaaagtatgcaggttctcttagatcataataagtgagatagaagaatgagaagatgtgaaaaggcgcgtcccgcacaagaaaacacaaacgacctacacacccaacaaatataacaactctattaccaacctcactcttcgttaactaaaggacgagttaacaaaattagtaacacaatagaagaaaacatataaggcagaaaaagagagatggcaaccccaccatccaagtattaggacgctaacgacgcggtgcatcataaaggagaggatcgagaaggcgcaatacagaatcggtaaatgtgtagacaccgcaacgaatcagctcgtcactaccacctcaagcagaagagtagaggtaggaggactgaagggactgaggaggaacagacgggaggtgatacggtggatagaaagtggggacctagcacagactcaacagcagaacatacatgtaccgattataggtaacgagtcacactctttaataagagcatcatcgctattaacgactgctactcgtatttcactgtctacggccacatatgtataacatgagagatagcgttgatgtctatttgccactcttacctggtcgagtccatacacgatagtatataaataacttgtgtagactgttcatatacacatgaaacgtgcctatccacatcataattatataaataaatataatatttgtacgatactgcagagcataggttagagtgagatgctgcgcacgactccg

SEQ ID NO: 726160 - DNA, 279 bp, Homo sapiens
gttctagaggatcccacgcgtcaagtacttaaccaagggtcacatggtagcaagtggaagactaggatttaaacactgaaatatgcttgtatctttttttcaggtaaagcaaaaaaaaaaaaaaaaaaaaattttcaaggattatataccgggtttccagggtaacattaaattcagaaatacggcttaaaggacaatttcccccaaaatatgagggggtttctaagcaattcgggtatgggccgctgcactcggtccatgtcagccatgtaattgtcc

SEQ ID NO: 726161 - DNA, 354 bp, Homo sapiens
cactggtcctgacagaaggcacggccggcggggcgctgtgcaggcaccgctgcttatacacaagtgtggcagcgtgctctgtgctgaggctggctgtggcggctggagggagcatcgcaacagcacggtgacacgtggtcaccaccggccatggcgtaccctgcgggcgtgacgcttatacctcctgcagcagtccctgagttccaaacgccacacttcgacgctctcagcccgacgcaggtggagccgggcactggcggctccacggaggaagctggtgtgcgccggataaagatggcaaccgccgataagattgtgaaactcatgctcgaccacatgacaaacaccaccaac

SEQ ID NO: 726162 - DNA, 399 bp, Homo sapiens
aggaatgtgcatgcccaaatgctaaaggtccgtgtctccagttggtttttgatcaatcaataaagatgcaaactgccaatagttgggcaggggatgcgacacttagagttgtacaagctaggatgagagaggaatgggagagaatcacaatgacttggggcagaaggatgggacacaggagcagcaggagataaagacaaccagccatgttagaccttcccgattgagcctgggatagcatgggaaagtttaaggaatgccaaacctttgaggtagccaaggcatttttaaaaatgagctaatctatatcaatatctatctatctatctatctatctatctatctatctatctttcatttgcagatccaaagatagctccagtacaagcacccatgcat

SEQ ID NO: 726163 - DNA, 535 bp, Homo sapiens
gtatttcctccttgtggatgtcagtgtccttgctctatcttctggggtcagactaaattggtatgagctcggtatatattaaagaatattaacctggaaaaaaaaaaaaaaaaaaaaacaaaaaaaaaaaaaaaaaaaaaaacgcgggggcggcgcgcgccccgggcccgcaggaaaggctctcacacaacacccggggggggcgcgcgcggcggccccaggggagaggaaacggggcacacaaggggaccccgggaaaccacggggccagaaaccaggggggggggttccccccacgtgaaaaaaccccgggggagcaacacagaggggtgttagaaaacacaccacagaagaggctactatgagagggactaatagggggcctcctaacaagaagagaggccaagaagacgagcgagaaaataaaaaatacaccacgcaggggggaaaacaagcgataacactgagaacacacacaacaacaagaagaacactcgacaaacctaaagatacgaaaataagaccaaactacaga

SEQ ID NO: 726164 - DNA, 151 bp, Homo sapiens
tccctctctccgaaaggcaacatctctgtggtgctctccagcgtctccagtggctatggcggtgccagtggtgtcggcagatggctctaggcctgggctggatggaatgcagctactcgctatggcagtgtgtcttggctgttggaaggtg

SEQ ID NO: 726165 - DNA, 531 bp, Homo sapiens
taggatgccatttcttttatagattccttggtatttctggtggggtaaggggcaggccagggctgttcacgcccatgagggaagaggaaagtgccactgggcaaggtgtcccaccctcccctcctgaccctcctactaggcttatcctggcaatggggtagtcactgccacccttccacacacacactctcactctcacacactaaaaaaaatcccttccttgtgggattcttgggcatctcctgcctccctcactctcacggtaattaatgtcttaattggctgttgcctggggaacaggagagctgctgcaggcagatgacctcatggggggtggagggaggtgaggtgcccatgtggctatttgccctgcagatctgggagttttacccgctaccctgaacctgtattttccctacctttgggcatcttatggcctgttggggaaaactttggcccattgttggagacctaaagcgggttataagaaccagtttgccctggctccttttttggggccctattcacaat

SEQ ID NO: 726166 - DNA, 413 bp, Homo sapiens
ctttctttttaagcccctccttctcccttcatttttatgacattgtgtgtctgtcttagtctgttttgtgctgctataagaatacctgaaactggggcctggtgcagtggctcatgcctgtaattccagcactttgggaggttaacatgggcagatcacttgagcttgagcccaggagtttgagaccagcttggggaacatggcaaaatctgtctttacacacacaaaaattacaaaaatcaaccaggtggggtggcacatgcctgtagtcccagctacttgggtgactaaggcagggttgcttgagcctgggaggtcaaggctgcagtgtcgtggtcacagcttgctgcggactcgacctcccaggcttaagcaatcctcctgctcgagtgacagagtgagaccctgtctca

SEQ ID NO: 726167 - DNA, 292 bp, Homo sapiens
agaggatcccccacaactgacgcgatagtttactgagaatgatgatttccaatttcatccatgtccctacaaaggacatgaactcatcatttttcatggctgcatagtaccctaaaacttaaagtataataataataatttaaaaaatcgataatctgaaaaaaaaaaagaagattgaattcataatttaaaaacttccaaagaggcaatctccaggcccagattatttcactggacatttctaccaaatgtttaaagaagaattaacacagactgatttcgctgcagtttg

SEQ ID NO: 726168 - DNA, 418 bp, Homo sapiens
cctgcttgttcagggcggtcgattttacatctctctgtacattggaaaaccccttccggatccagaataggtcatcatggatgtgtaagccgaaggagctaggggtgcctacggaagcgtacattccagtgcaagaagtccatgatgatggagatctccgaccctcgaaaacactttgagcacggtgcatccagtgagattggaaccgaggacgctgaggacgttggagttgaacagttgttacgaaatatcccatacacgacagtgggcactctggcccaccggcatccaccaatgcatgtccatggtttgaacgtgagctgagatgccaagcgtctgcatatcacgcagctcacctggcataccagtcgccatgtgcgagctgtccatcttcccccatatcctctcccagctcctg

SEQ ID NO: 726169 - DNA, 348 bp, Homo sapiens
gaagaaacactcttattcccaaactacagaataatgtgttaaacatgctaaatagttctatcaggaaaacaaatcactgtatttatctccgcaggctatttgttcagagaggccttttgtttaaatataaatgtttaaatctaaatgtttgcctggattggccataacatgtctttcagcattaggcttttaagaaacacagggttctgtattctttactaaagatctcagcgcccttaatgttgcttcgctgcggctgaccgtcaaatacacgccagcctgggaccttagacaccactgcagaaccatcagttcccaacaacaaaacaaaaaaaacacaacacaaaa

SEQ ID NO: 726170 - DNA, 118 bp, Homo sapiens
ctgcttgaagaacttcatctcgtaaaaatgagattgcagccgggcgcagagatcccacctatatcccagcactttgggaggccgaggcaggcggatcatctgaggtcaggagttggag

SEQ ID NO: 726171 - DNA, 260 bp, Homo sapiens
tctgaggatccctccagatagaattgcgatgttgcagtgtctcaaactgcaggctcaagcatcctcctgcttggctcccaagtagctgggattacagacacctgccaccacacctggctaatttctgtgttttcagttgggacaggctggtcttgaactcctggcctcaagtgatccgcccgcctgtgcctcccaaagtgctgggattacagtcatgagccactgtgcctggacttttcttttcttttttgagacagttt

SEQ ID NO: 726172 - DNA, 259 bp, Homo sapiens
gcaggatctcatcggcgagatgacgctgagcctgagcgtctcgagtacagcaacaggagggttcgccggccagtccaggtctacttttatgtctcccgtgggcggaggaaacgcagtcctatgccagagttacaggtttctgccggtgatctgcggataggagcccctaccggactcatctctgcggggtttcccttgagcatcggcaaccccctttggcactgacatggacttctcaccaccccgtcatctcgccgat

SEQ ID NO: 726173 - DNA, 988 bp, Homo sapiens
  misc_feature (320)..(320): n is a, c, g, or t
ggctgggagataggcttgtgatatgtgtacgttagcgtctgccgagtacagatgaaactgtgtgtgagttacctgcagtgccggagtattgtcagtcacatgaattaacgtgtccttatggagcgcatgatgagcatatagtttctgaggctactacatcgttcattatatgcgttgatatatatgtatatagttcacatgtggatctgccaccaagtcatctggcataaccgattccgttttcttatcatctggagactctcaatgatgatggaggataaaatattcttgagattgaatattggaaggatgtgatcgtngaaggtggtgagagatgaggatcagtgtattgcgtcgtgtaaaccaatatcgtcgatgaatcaagattatgttctcagaatagttgatgctagagtgatttgtgcattagcatggattcacacttgtgctctcaactatgcaggctgtgatgcctacggctcccgtagaaatctttgatcgactgtggggttcaggtcctagataatacacaacagcataacagaatcaaggggcttggtagtgcccgagagcaatgttcgtagtcactactcataactcgtgagaacgacttcgaattttgggagtatcgagactatccactcattcccataatgatatggggaaaaggaagtgctagatgacttaagtagttgggattggtttggtgggaagatagttggtctttattggacctcttggaaaaatcagagatctttcttcagtcctgggggaccaaccgtgtatcagtaacgaagtaaggggaaccatgggattctttctttgaagaaatggtacttgtgatttatccccccatgcagtagggcacgattggtggaggtggactcaagtctcaagtggagcattcagggtaaaatccctttccctaatggagccgcgacttgattcttggcacatttaccgtgtcactgctgtggaaggactaaag

SEQ ID NO: 726174 - DNA, 265 bp, Homo sapiens
cttgaattgtagttcccataatccccatgtattgtggtagggacttgacggaagataatttaatcatggaagctgttatcttcatgctgttcttatgatagtgagttagttctcataatctgatagttttataagtggcttttccctcttttgcttggcacttctccttgctgccgccatgtgaagaaggacatgtttgcttcccctccaccatcaccaccgcacctctcacttcaaagttcttttcaactttcccttacggtac

SEQ ID NO: 726175 - DNA, 777 bp, Homo sapiens
gaataatggcccggttggccgggacgagctggaatgattaatgatgtatgcagcaggttatctacgtctgaaattatttatgtctactgagaacccagaattcgctaagagatggaggaacctcaaaaaagctatgtgaacacaatggaccttgcagagagatgaacctctcaaaagcaccggaccctcagatttctgttagtgaattctgcttgccactgcgtgctacgatcatcctggttaacccctaccactccttgcaactgtgggcacagcattctgcacgtcactgccttgctttatggtgggcatcttcaaagaaaacagaatgtccagaatgcagagaaaaatgggaaggtttccccaaagtcagatattctcctcagggatgccattgagaagagttatgttcctgatgccattgtagacgtgacgcattgtgcaagcacagtgtcagccagaagtaactgacagtaggtccacaacaagtcttgcagccgtttcagaaactatgggacatgatccagattcctttagctcctaatacaggccgagcgaatcagcgagaggggagggggattcttttgccggtgctgctcacaggtttaactggatgtggcagatggtcctgcctcgtcgtatcactggtagtcacgtgaggggaatcgtgaagcagcgacctcctggtccacaatgctgtggccaaatggacggcggaagaaagtcgtcctctggctggagcagcgtgggcccttgggaatcatctttaccggaaag

SEQ ID NO: 726176 - DNA, 962 bp, Homo sapiens
gttgggagcaggctaaggaaacaaatggggaggaattagccacaaatcctcgaagatagacagctactcaaaggcatcttcacggacaatttccaagcattggatgcagtggtgcattcttgcattgggcagtgattgtgtgcacacatctctttaagggagagtggaaatggggtgaggaggaaaatgggagtaggatagagtgtagcgtgacatttattttctggaaaggaagacccgagcatatctgagagctcagtgaagaaagtagtactggcgaatcggattaatatggtatgatcagactttagcaagattctatcacttttcccagtgatgatgtgagacggtgtccgcgtgtgtaagtgcacacaggtgtgtgtgtgtgtgaatcttcatgagtagtgtgcaaggagaagctgtgagaagtgatctgaaaaaagtcagattcgagttagacactagagtacagtcaaaaaagcttcggaagagtgccatcatctgtaaagtacataagagagagtcatgacctccagactcagaaatgacaagaataggcagcgtatgtgaaatagtaagctcagacaagtggagggacacgtagaaacttcctatgccaagtaccttgacgggagtaagtgaccttgaatccaagagaccatggaaactttggagcatcggcccgagagcgtgggatcacggcctggtaatcgcaagaaaaatatggagagggacagaagaattgggggcagagaataacagaagggtccacgacaagactggaaagacccatcctagggaggaacaccgggtgaaaaaaccccgagcctcctacggacaaaagtaaggaaccagagaataagagcgaagccaagagaagacagcggcaccatggaaaggtacccaagcatacacttttgcgacagagctggacggcacaggaagcaaatggggggtggaac

SEQ ID NO: 726177 - DNA, 661 bp, Homo sapiens
  misc_feature (81)..(81): n is a, c, g, or t
  misc_feature (477)..(477): n is a, c, g, or t
  misc_feature (480)..(480): n is a, c, g, or t
tgaggcaatgcagtcaatcccaaagggggtttttgaggcagtttcctttccaaagaggatatcctttttttcagatcagtnacctaccctcctcccccttttggtgattaggattattgatgcagggtggaaccactggggcttggacagccttctttttaaaccctgggagcctaaagattcaagcccttatgccaaagctcacaaaacttgtggtttgtgccctgggtttgtctgtgggcctcatgggcattgtggggggcactgttttcatcatccaaggcctgcgttcagttggtgcttccaaacaccaagggccattgtgaatcccatcctggaagggaaggtgcttccccttttccaggagcaaaaaaatggccttgttaaatgccctagcactatttttgggcccgatttatcaaatcccttttttcctccaaaaatttttcctctcccctttttctttgggacttaagntgntatatcccctcaaagctcacaaatgcctttacattttttccctgacctcctgatttttttttttttttttcaaatgttacctacacaaacatgcctggggtaagccacccggctacctaattcctcagtaacctccttttaaaatttccaaggaagcaataaattccttttttgagtttta

SEQ ID NO: 726178 - DNA, 233 bp, Homo sapiens
aacggaatgaaaaattaggggaacattataagctttcttcccacgttatccagcagagacttttggtattttttagtcctgccatccatgttgctggggctatggtcctagcttgtttcctgttcttaaagtaatgggggttcccttcttctggaagcctctactcatggaatggaagctctaccctggaggctgtgcactgaaaatcttcggtctctgatcacccttgccct

SEQ ID NO: 726179 - DNA, 506 bp, Homo sapiens
ctgctcacaaaatcagctaccacacccagcacaaaggtcgcctcaagctacagagtgctccagtctgcatcctttcaggaaggtcctgcaagataagtacaaggtgtggctgttgcggcgagaagatagcgctagatgaaactccgcaagcgtgttcaagctcctgcggaataactacacgtgcagcatgccaggcctcagggtgcttaacccaggacaaccagaactggcagacggcgcctttctggacacctaatgaatgcggtgaacacactggacagggatgtcctcaaccagctacactgtacagctcatgtagctgaggagctgcaagggttacaagcagtgtaacccccggactcgaaacatggacctgggacttacagatggaggaagctatgagcaatacaggggacaactgtgggaaggctgggaaggttaagaaacaacagaggtggacctcccaaaacatagagggatcatctgattgcacggctatgaaaacc

SEQ ID NO: 726180 - DNA, 348 bp, Homo sapiens
ctgctccgcccctctctggcctctgtggtttctgcagggtgggaagtgggagctgagctctcccatctcactgtatgtgtcaggccgttgcaagttttgtcgttactgtggtctcacctacccagacctgagcaaggcagaaaacacagaaactaatgctttagaaaataagcagttggcaaaacgttatgttttatacctagttctttgaaataagtgaattaaatacttaagctgctgcctcatcaagagaaaagagagaaacaagccaagtggtaaacaggaggtgaatagatgtgaggacagcgaggggtggcgcggggaccgcagagaggggcggagcagggg

SEQ ID NO: 726181 - DNA, 398 bp, Homo sapiens
ccgaaggatgacaagaagacagaattgcaggagctaaatgagctgtacaaacctgtagttgctgcgcaggaaaataagtaaaggtgcagatcccaagtctgtaatatgtgcattcttcaagcaaggacagtgtactaaaggagataagtgtaagttctcccatgacttgcctctggagagaaaactgtgaacaacgcgaagtgtttacattgactggggagagactgacagaaccttgaaaaagactacctactggactacttgggatgagcaaaaagctggcacagaagtagtgaacaagaagcacggtgaggcggaaaagaaaaaaccaaaaactcaaatagtgtgcaagcatttcctggacactattgaaaacaacaagtacaacctgccggtgg

SEQ ID NO: 726182 - DNA, 342 bp, Homo sapiens
  misc_feature (262)..(262): n is a, c, g, or t
  misc_feature (314)..(314): n is a, c, g, or t
agacttcaacaccccactttcaacactagacagatagagacagaaaatcaacaagaaacattgaacttaatctgcactgtagaccaaatggttctaatagatatttacaaaacattttatccaatggctgcagaatatacattctccttgtcagcacatgaaacattcgcaagaagagaccatatgttgggccacaaaacaagtctaaaacattcacaaacattgaaataatatcaagcatcttctctgaccacaatgggantaaaactagaaatcaataagagggattttggaaactatacaaacacctgggnaactaatcagtatgctcctgggttacca

SEQ ID NO: 726183 - DNA, 88 bp, Homo sapiens
acggccgtgtattactgtgcgagagggtatagcagtggctggtacgactactggggccagggaaccctggtcaccgtctcctcaggga

SEQ ID NO: 726184 - DNA, 249 bp, Homo sapiens
  misc_feature (67)..(67): n is a, c, g, or t
  misc_feature (95)..(98): n is a, c, g, or t
  misc_feature (100)..(100): n is a, c, g, or t
  misc_feature (102)..(102): n is a, c, g, or t
  misc_feature (104)..(104): n is a, c, g, or t
  misc_feature (107)..(107): n is a, c, g, or t
  misc_feature (180)..(182): n is a, c, g, or t
  misc_feature (184)..(184): n is a, c, g, or t
  misc_feature (225)..(226): n is a, c, g, or t
  misc_feature (232)..(232): n is a, c, g, or t
  misc_feature (238)..(238): n is a, c, g, or t
cagtggtcacctatgtgtatcagctaattggagatgatgtgaaagtagaacggatcgaatacaaaanaccttaaagccaggcctgtcttgatgannnntncngnttnaattcattgttcctgttgaaatcaagtaattaaacatttaagagccacaaaattgtatcacttttataatatnnncncagtaaaatataataccatcttctctgttaatacataattnntccagnttcctntaaactataag

SEQ ID NO: 726185 - DNA, 112 bp, Homo sapiens
atggccataatctctcgttaatattatgttctgtctgtgccttcctcccatttcacttcctgctaccttagttaatctgttataataaaccctgtaaacataattatgtctt

SEQ ID NO: 726186 - DNA, 165 bp, Homo sapiens
cgtgtgtgtcaagtttttccatcgtttgtgggtacagagtgttgctctgtcacccaggctggcgtgcatgtggtgtgatcttggctcactggaagctctacctcccaggttcaagtgattctcatgcctcatcagctatagcgtgggtaccgagtctcaattcgt

SEQ ID NO: 726187 - DNA, 169 bp, Homo sapiens
tgtagcattaaaatataataataaaaaccaattactggttcttaaccacggactagttagggaagcaagtggtcaggagtgtggggcttaagagacgtgggggaatgggggtgcccggatcagactttgtttggttgagtccttctaccgacctccctgtagtcgacgc

SEQ ID NO: 726188 - DNA, 701 bp, Homo sapiens
cgggggctctttcctgggtggggtttgtgaagtcgtggcccgttagcaggaagcctaacagtcgccccgacgctagtgagggacccaatctgagtcccaggccagctgaatccaagccgtgtgtactgcgtgctcagcactgcccgacagtcctagctaaacttcgccaactccgctgcctttgccgccaccatgcccaaaacgatcagtgtgcgtgtgaccaccatggatgcagagctggagtttgccatccagcccaacaccaccgggaagcagctatttgaccaggtggtgctattggcttgaggcaagtttggctctttggtctgcagtaccaggacactaaagggttctccacctgcgtgaaactcactaagaaggtgactgcccaggatgtgcggaaggaaagccccctgctctttaagttccgtgccaagtttaccctgaggatgtgtccaggaaatgatcaggcatcactaagcgctgttcttctgcaggtgaagagggcattctcatggatgatattactgcccgcttgaaccgttgtcctgctgccccgcatgctggccagtctaagaaggcgacttcaataaggagtgcctaagctcggttactgggccggaaccaagttgttcccgagaggggcctggaccggctcctccaggaccattgggaggagcgtacccaggttgccttagggc

SEQ ID NO: 726189 - DNA, 177 bp, Homo sapiens
taaaaataaaaaaaaaaaattcttttgggtgtgggggggcatgcttccaatccaagctcctttgggggttgaggcaaaaaaattgcttgaccccaggagccagaggttccagtgccccaaaattgcacccttgccctgccagccctcaagcttggggacagagcaagcctttcccta

SEQ ID NO: 726190 - DNA, 560 bp, Homo sapiens
tcttttatgtgttgtcggtgcaggtagaggcttcctaaaagtgtgaaaccgtaggcttggattaaggcgacagcgattcctaggatagtcagtaaaattacaattggtggaaacatgataatgttgtaaaggagaaggttaatgggttgattattgctaggtggtggccgctcccaattaggtgctatgagtaggtaggcctcgcagtaatggtaacgcggttaggctgtacggccagggctaatcgggtttgagatatgaatatacagagctggaatgggtatccgcgataatataaactaagttatagagggtataagggtgtggtaaggttgttcgcctatgtgggtaaaacaagtgggcgctaaagggctattttaacatcttaaaacgcaaaaaaccccttatatatcccacgtggcgccccgctccattaaagggagatatggtccctgtggtcctagagattatataaaaataaaggttggggaggtggatggggtggttcaaaaatgaagtttgaaggcccaggaagatcccgaaaggcgagattcaatttg

SEQ ID NO: 726191 - DNA, 693 bp, Homo sapiens
atgggcttaatcccacctaccatctttacttttccttatcccagcggatcacactgatcctaccacacaactctttcacatcactatcaattatttctttatccactcagaaataacctccatctcaaaatcctttatcaccatctctcaacttttttactttttttcaccatccaccccactctccctaaaaaccctcacaaacttttttctccttttaccattcccactattaatctcacgacatcttctcatccacccatataatctaaacctccaattcacaatcaaccatccgttacccaaccaaaatactctttcttatcataaaaccccatcaccccctccctcctccaccttgtcttccccaccaccatattttccaccaccactccctcctttttactattggcccttaccaccaaacccttaccacccaacaatactattcaccccctcacatctacaatcccattatcctctcttaacacaccacttcccatttttatctccaatttaaaactacactcacaacaaactaattcactaacaccccacaatcccacaccctcctcaccccttctcttctttaacctattcccattcactaaccaaccaacccgctccacttcccccaaccttgtctctccccacaccaaacatttatacactcatatgcaattacctaaacat

SEQ ID NO: 726192 - DNA, 387 bp, Homo sapiens
  misc_feature (51)..(51): n is a, c, g, or t
  misc_feature (226)..(226): n is a, c, g, or t
  misc_feature (353)..(353): n is a, c, g, or t
caagtccataagaccctttagaaccctcaaatcctagtggtttttgcaccnccctcaaagtacctgtggggacctttatgaaaactgtaatatttcccctatatttaagttttgttataatagaaaacaggtttaaggctgagtgcaatggctcatagctgtaatccccagcactttgggaagccaaggtgggaggattgcttgaggcccaggtgtttgataccancctgggcaacatagcagcaagaccctgtctctacagacaaaattaaaaaaataaattagctgggtatggtggcacatgcctctagtcccagctactctggaggccaaggtggaaggattgtttgagnccaggagttcaatcaaggttgcagtgagccataa

SEQ ID NO: 726193 - DNA, 427 bp, Homo sapiens
  misc_feature (201)..(201): n is a, c, g, or t
atgttccaggcattgtatttctgttttacaattgtgtgcaccaataattatccaaaccattctgtgagttaagaattgttactttcatttcacaggttaaaaattgaggttctaataggttaaaagtcttactcagtatgagtagcaggaccaggattctaatccagatcaattgaactccaaggaccagatcttcatccngaaagctgaaagaggtgctggcagcttactgagatagaaatagggctaccttacaagacattcattgttctgtgagtttaacggcagtccgacataaaaacaattattgtaagctactcgggaggctgaggcaggagaatcacttgaaccctggaggtggaggttgcaatgagctgagatttgcctttgtactccagcctgggcaacaagagcgaaacttcgtctc

SEQ ID NO: 726194 - DNA, 81 bp, Homo sapiens
gtcgaagacacggccgtatactactgcgcgaaggaacggggaagagttggggttccaatttttgacgactggggccaggga

SEQ ID NO: 726195 - DNA, 963 bp, Homo sapiens
gggacttccagggtacgcgtgtgctatgaatgtggcagtgtacctgtcgatattcctgattgcctggcatgtttgcatgttgggtgaaacctgaggcagctcctgcatccccactagattcttcctgctccttgtgagtgaaacaaacaaatgttatatttcatattggtggagaagattctatcatcatgtggcacattatatattacggagtttatgcgcatgcacacatgggctcatttacagcacagcattgcaatagggaaaggttgtgacatttagcccagcctggcacatcatctttggcatcacactcaattgtcagtgttgccgcgacacatggccaccaaccacgaggacataagcacaaacattcccattggcacaatcacttccccacagcacattcacagggtctattcaaccaggcacacggcgtggaaaccacgcattaggtcacgctctcccaaggcatgattagcaacatggttgggcacgcaacacatcaatatgttcacgccaattcggcaattcattattacacatagcaacaaggtcgccaacaccaagagccaacattcaatttcacaacagcgccgttggccacgccacacgcggcaatatggccccacagggtcagtattgcgcacgacagcagatacattcgccgcttttgcacacggcaattgttttggacatatcacacagtagccacaggacaattaaaaccccgttggtgctgtacactttaccacacacccatgggacacgtatgtctaacatattgcggaggcacattggataaccaacaccagcggtattggtttggaccggggcacacacaaacggtggcccccacatttccgttgacaacttatccgttcgtgcacttaacaacccccttacgcatgcggccacgtgtccaccaaggtacaggagcatacacccttcccaagttcgcac

SEQ ID NO: 726196 - DNA, 188 bp, Homo sapiens
ctaccctagaggatccggtgaggagttggtgtatcatatatggcaggtttttctagacggcaggtcaggtcaccactgacacgttggcagtgcggacacggaaggcatgcagtgagcttcccgttcagctcagggatgaccttgcccacagcctttggagcgccagcacaacctgtgaccagcacaac

SEQ ID NO: 726197 - DNA, 637 bp, Homo sapiens
cattatggccggggttgatgcatggccgcaactttttttggaggatgatgactgagcacatcggcgggcatgccattcagataattcactaactcacaggccataacagtgtgcatggcctggggaacgccatcatcaacagtgggccacggtaggactgcacacgcattgggcgcgccgggactgtgagacgacaggctgtggatgtgtcccacctgcgccgagtgaaccagaccatctgactggtaagcacaggcgctcgttaggatgacttacggaacattaaaaccgttgcagagtgcctgccgtatgagcatataaatgctgacacgggctgctggaactcctatgccattaagaagaaggactagctggaccgtgcggcccagtccaacctatgattttgccagctgctgcccactaaacctgtctgccctatgtggcacactcagccctatagtgcgcctattacatttcattggccggtcgttttaaacgcccttcctgctagagacagaaaggtcccttttttcccattgactccgggaattttttccggagggagagtaaaaatggtccgagcctttcggctttaaaaagttttttttgacgtttcaagaatggaaattcccctctt

SEQ ID NO: 726198 - DNA, 704 bp, Homo sapiens
caggaaaactcctccttaactgggtagatcatactgaagtggtcagagatttaactttggctccagatggaagctgtgatcctggtgtcagcttcaagagacaaaactctcagagtatgggacctgaaagcatgatggcaaacatgatgcaaagtatggagggggcatcagaatggggtgtacagctgtgcattctctcctgactcttctatgctggtgtccagtcggagcccagtaacagcagttttccttgcgcgaatatggataaaatacacccagtgataccggaaactagaaggacatcaccagtgattgtggtagctgtgtgacttttctcctgatggagcattactgggctacgggcatcttatgatactcgagtatatatctggggatccacataattggagacattctgagtggaattgggggcaactgtgtttcccccaacctactccaatattgctggaggagcaaatgaccgggtgggtacgatcggtatctttaaggcatgatggactgcatgtggaaagcctgtgctgatgataaacagtggggagggttctggagacatggctgaggattatccagtacaagtgtgcaactttgaagcaatgggtacttttgtggtggccttctactaacgtgatggcaggttattaagtatgtgggggaacaaatgaacgggaagggtgcattatggg

SEQ ID NO: 726199 - DNA, 597 bp, Homo sapiens
  misc_feature (142)..(143): n is a, c, g, or t
cagaattaaaagtcatggtggtcgttgcaaagagcacactcggacatattgtcagaaaaatctttctaatcggggaagggatcctggtaggtagtgagctctccatgactggaggaggttaagcatgattcagatagttctnnggtcagatttgtagatgactttcttgaattgaaaaggaattttaaagacctccctcttcagtcctgagattctataattcaaagaagtagagagaaagattaaatctgcagacaaactagtgtttagaaatttaaggcattttctttgcattcacttatttcctcttgaacaaaaggcaacacacacatatatacccttgtatattcaaatgcactcaggaaacagtcacatatttacataggtatttatatagaaatatataacaaagtttgcatacaataagatgctcaatacatagttgtagtaaagtattaagcaatttctgaaaaataataaaggactaaagtctatgtatgttaaaaaaaaaaggaaatattttccctctataattctgtgtttattatgaagtcttcagtcatttgtgacattgattattttccaacggggatcacg

SEQ ID NO: 726200 - DNA, 140 bp, Homo sapiens
tcgtgtatatacgctggtgggagggggcaggcccccttgtgcagagcctgtggtctgaggcacctggctgtgttcccagcagagggagggctggggcggtggccgtaattgtgaatatgtacgataccctcatctgtgac

SEQ ID NO: 726201 - DNA, 1192 bp, Homo sapiens
aaacaattgcttaggtttccttttgtaaaaagcatctacttgcattcagttagggaaggtgaccatatccactctgccttctgtcacagagcagggtgctattgtgaggccatctactgagcagtggactcaaaagcattttcaggcatgtccgagacgggaggactcactacgcaattagcaaacaaaagcaccctgacatcctcctatcaggcaacactgcggcgatgccagagtgcccaaatgcactaacggggcgggcgctataccctgagcaccgatctgtcatcgcaacgaaaatcatcggccggcaacctgttcacatcgttcgtgttacctcaagctccatattaccagcggcgcattcgaccacgactcatccgcctaggcattaccatcgctcgctcgcactcggccgctcagcctagcattaaaccccatcgtccactcaggccactatcaccactagcacagcccggtaaccagggcgcagtcacaaaacgcactggccctatctggcgactttcacctccccttgcattccccgcgaccactttaattccattcaacctggccagctggcaccaggacaatccagcgggcaatttcacgacacttcaaacacacccacgatcgcatacacaggcccacgtccagcaagggacttgacaacattgccccttggtcctcaaacaatttgcacaaagtaccgcatgcgcgtttcacacaccataaccaattgcccaccctttggatggccacggacattgctaagaccactcggaaacaaatacaggcaaaaccagcccctaaacacattcctcccaccatcgacagaacaacgacaggaaattggcatcccccgagacaaacggcaccaggtgcgccaacaaccccgggtgccccactcactccacttcgccaccacatcggcgtcaacccgacagctgcgcgagcccacatactaacaatataactccacatcttaactcccctaaagcaagcccagtctcactactcccctccccattcctctcccccgtcacatacccaacactcccaaccatctaacctaccataaatacactcaccagtcgacatttctacagactattactctcacaccccacctctaccccacccctcacatacactctttcccatcccctatcaacactaatctcatgacaca

SEQ ID NO: 726202 - DNA, 985 bp, Homo sapiens
ggacgcgtgggtcgactgtttgctgccgaggcgggcgagaggagccggactggtgctcctttccttggtgctgggcttcgtggagcattttctggctgtcaaccgcgtcatccctaccaacgttcccgagctcaccttccagacccagagcccgcccccgagcccgacctggaggctcacctacttcccgtggccgactgtctatcatcgacgcctctatgcccgaccttcaccgcccagatccgaggcgccgtcgatctgtacccatctatcctcgagaagggggtgtcatccagccgctgagctgggtgaaagaaggtctccgattgtcctatggaacagacttcagcccggtcccttacctcaacggactcgggcccacatccagtccctcttccagttatatcacaggtagcccgcccagtaggcacccaacatggactcgctccggcggtggcgcattggctgcggtagggggcctgccaggcccatgcggctgctccggcaatgcccacactccgccctgatcagagggaatcatgcactggggatccatgttgggccacccacggggacgccacaacacggcataggccaccacgggacgcgaaacagggacacagacggaaccgcagagggacagaaagcacactgacggtgcggactgaaccgacactggcgcaaccggcaacgcatgataccatgcgcagcggacccggcctgacgggccggggaccaacccggctgaagggcgtaacccacccatcaccagcaaacgaccccaagggaccccgaacaggcggacagaggtccgagacgcacacaggacaagacagcaccggacgccgcaacagcgaacaccggaagacccaagcaagaagaagcaaagcaaaaacaacacgaccgaagccaccacaggggcagcgccgaacggccagacgcaccgacgacggaacaagcgcaacgagaccggcacggcccaccc

SEQ ID NO: 726203 - DNA, 730 bp, Homo sapiens
tgttcccatttcctcaaccacgctcttctcacttgactcccaggctctttggggttaccaggctttagtcgtcgtgaagggaaagttccactagaacgccccatttgagtcccctcctgaggttactgagagtgacactcttagtttgcatggaagtagctcctccacgttcactccattaattgaggaaaccaatcggtatccatggcccatcccttgtcgctctcaagacacccctgggtggcccaaggtgccacacaccagagtgttcaaggatggatcaattgtagcacgttagcctctgccgctggagactccctgccggctcttcttggttggtcagtacagtacctcagagtgtgtgaacggatagactatgagagtgaccaacccggcctccccatctgtgagccccaagcactgcctttgtgccctggcactttggactccaggctacaggcttgctgaagtccttggcgacaggggtggtgcgtatccagagaatgctgccttcctctaagcctgtccctctcctgcctcattttcgctgtagctcctcctggttctgtttgctcattggctgctgtgttcatcaaagggggttctcaccagaagtgaggggcctttcccttccaatcccttggggcaccggggcagctgtgcctgcctgcctctgcctgaggcagccgctcctgcctgagcctggacaggaaatgctccccgcgtgcaa

SEQ ID NO: 726204 - DNA, 116 bp, Homo sapiens
tattctatcagcctttgggtatgaatcatacacgtgtagtcaaacagagagggcatcatgtcagaacttaacagctattactctttcgttagaaaagagacagcataacaggaaaa

SEQ ID NO: 726205 - DNA, 148 bp, Homo sapiens
tcttgcaagcacctgctacttcaatttccatttgcatgtgtgcttgcgctgctcagtgggtgcatccatctcagcagtctgcacctgccaggccatgccaagcttggccacttggcctgtctgtatttcaccacacgtctgtagcctt

SEQ ID NO: 726206 - DNA, 685 bp, Homo sapiens
ggtgtatgtcccagtgcggctgccacctctgaacttccccactgactctctgtgagtgagaaatttagccgtagtacagtaattactgtaccctcgacatgtactgttacagctttctgagcagagatgactgcccaattgtccaaatgcctacgattgaaatgaaaactctattgttacctctgagttgtgttccacggaaaatgctatccagcagatcatttaggaaaaataattctatttttagcctttcatttctcagctgtccttttttcttgtttgatttttgacagcaatggagaatgggttatataaagactgcctgctaatatgaacagaaatgcatttgtaattcatgaaaataaatgtacatcttctatcttcacattcatgttaagattcagtgttgctttcctctggatcagcgtgtctgaatggacagtcaggttcaggttgtgctgaacacagaaatgctcacaggcctcactttgccgcccaggcactggcccagcacttggatttacataagatgagttagaaaggtacttctgtagggtcctttttacctctgctcggcagagaatcgatgctgtcatgttcctttattcacaatcttaggtctcacatattctgtcagacgctaacaaagaagcccgacatctcaggttggattcctggttctctc

SEQ ID NO: 726207 - DNA, 498 bp, Homo sapiens
ggtcgcactggtgatgcggtctgttgtcccccggcctcctggactcctggtcccggggtctcccagcgctggtttcgacttcagcttcctgccctagccacctcaagagaaggtcacgatggtggccgtactaccgggctgatgatgccaatgtggttcgtgacggtgacctcgaggtggacacaccctcaagagcctgagccagcagatcgagaacatccggagcccagagggaagcctgcaaggaacccggcccgaacctgctgtgacctcaagatgtgcagtctgactggaagagtggagagtactggattgacccaaaccaagggctgcaacgtggatgccatcaaagtcttctgcaacatggagactggtgagcactgagtgtaccccattcagcccagtgtggcccagaagaactgggtacatcagcaagaaccccaaggaccagaggcatgtctggatcggcgagagcatgaccgatggatacccagacga

SEQ ID NO: 726208 - DNA, 304 bp, Homo sapiens
gaggggcggtctgttatatgtagagactggctccaatatggaaatccatccaaatacattcatcaggccgagtgacagagtagaaaactctccagctacatatatacaaaataacaatcataaccatacaggagaagctatcttcaaggtttctaccaaagactctaccgtcttgtagtaaaagacgacatcaaatccaagcttttgaaggtaggcaacctttacatcagaccctactgatccaacaactttgcagcccttgagcttagcaaatctgccccacgactgagcccacagctccagc

SEQ ID NO: 726209 - DNA, 166 bp, Homo sapiens
acacctaattttgggggtgggtagggagcgaggtctcactgtgttgctcaggctggtctgaaactcctgagctcaagccattctcctgtttagacctcccagagtgctgggattacaggtgtgagctaccacttgtggcaaaagcattaattttaaggaaaccaga

SEQ ID NO: 726210 - DNA, 155 bp, Homo sapiens
gtaacgtaaactcaaaatacgcatggtgtacggcgggtcggaaaagagaaggcgtacacgtggactacgaatctgggaaagtcaccctattagaggggtacagacatcgaggagagagaacagagacacgtcctatcatgtgtagtgttccctac

SEQ ID NO: 726211 - DNA, 185 bp, Homo sapiens
agggcttgatggtctgcgcgaggaagtagcggaacgtccgtcgcgcatcacactgacggtgctggaagatttacacggtgagcaattcctgaaagcgattgatatcgtgctggtggcagtcagtgaacacattgaacgtttcgctgccctggcgcgtgaaatggccgcgaccgaaacccgcgaaa

SEQ ID NO: 726212 - DNA, 100 bp, Homo sapiens
gaacacacgatgggctatccttacccatgacccaaggtgtgccctccgtctggaatgccgtacccttattcccagatctctagaactctgggttctccca

SEQ ID NO: 726213 - DNA, 181 bp, Homo sapiens
cgcgcacggggggggcggcaggacacatcgacttgtcgatggtgtcgttgatcgtggtggtagcgccgttgcctgcaacttccagtttttcgaagttgccgccggaagcgtcagtgatttgacggtctgcgtgctcttatcgataaacacgtcatcggtcggcgcaggcacggttacggta

SEQ ID NO: 726214 - DNA, 265 bp, Homo sapiens
tgttccacttgaccagccatttcccaatctgtccccctccgttttgggccttgctagtccctaagacacaacagttttgaaattagaccaactaataaccctacaatggcctctaagtgttccagtgaaaggaagagtagcacatctcttacattacatcaaaaactagaaataagcttcatgaggaagacatgtcaaaacccaagataggtagaaaactactcctcttgtgccaaacatccgagttgtgaatgcaaagggaaaa

SEQ ID NO: 726215 - DNA, 134 bp, Homo sapiens
atgcggatgacgcccggtgcaccgggggggcccaggggccccctggggccctgggatgggaccgcggtggcttcccgcggaggtttcggcagtgcaatccagggccgggtcgcggcccgtggacggggccgggg

SEQ ID NO: 726216 - DNA, 792 bp, Homo sapiens
  misc_feature (785)..(785): n is a, c, g, or t
cagatctctgtgggggcggagcttgttgctgggatgactacgaagcgttagcttacccacatgcccaagtgtacgtgcactgagccatatacaccagtagatgcatgtgtgggtgtgctcatgcacacacacactctctatctaggtctctggcttctctactctgttgactgtcttctcaggtcactcgcacactgaggcttcctatgagaagctcacttgccacctctcaggggggtcccagattgcatacatcacaatcccaagactggagttggggggaactggagggagcaaaacactgatctgatactgggcagtttgcttgaaactagaccacctatagctagatctctgaaaaccaatctactgaaaacttgacagcttaaaggaaatgactcactgactaatttggcacaagctcaattgctatattgagggagcgtatatgcatgtaggagacctattcttttttgacatgcttcggatatttcaaggatatatatctattcatccaagagtacttctgagctattatgagcgacatagatgtatcacatttgcagcactatgtacatgatgagaatgcttcctacctttatgggtagactgttatatgatagctaccattcaaacactttctcgtgcattactggtagcaattacaagagtgcagacgttatgtgagcatacttttggctttaatacaggatgtcttctcaacgagatgccttggaagaataacggagctccgaggcctgatgctttgggcgtacttctacatnctctggg

SEQ ID NO: 726217 - DNA, 1023 bp, Homo sapiens
ggtctgaactggctcccgtagttaactaggacaagagactacatatggagtatgtcctgaggaggggttgggatggtgtgttatctctcacctcgcacctttatgagggtcctctatgctccatcttcagaggccctcacaggtgggtggcttgtcgagcaggagtgcagagctgtaacgccagccatagaggcaaggactgactgagggggctgtgtcctcttatttggagatttgcgaacatccctcgttcttgtcctctcgttctgcataggcgcaggattccatgcagcgtgggtgtttaccaaggaaacaaaataccctgtcccagtatgggtaacacgccaggaaccgatgttggtgaacgctggcgtggttcaggcacgaagacaggtgctgactggtgagtcccttcaggcagagattccgcgcgtccttagggtctgcccttggggggtccggtaccaaataacctgtgtaaacttggctttctgggcgcccctctggggcccatacggctagtgtttacccacttaaaattgactcccaggacctcacgaagaccttatgtgggcacgccactatccattttcacccgccctaaggatagcgcagcccttgggaaaaactcacctaggtaagggggggcacgcgtgcccccaacttagcttgttggccacaatccgctataagaggaagatattgtgtagatcaacgttcaatgtatgtataatcgtgaccttggggagcggcagggcggcacaacaacctttgcccctttatacgtgagttgcctagctccgtttgtggccacgattgtgaagaaggctgctataccacttgggaccccttccgtgggacaaaggccctgaggcactttcttcttctataggacctataaaccgtgcgaaaggttacaggttccccgcagaaactgcactgcgcgttgagcacttttgcctacggcgcaaagaaaaggcggttcacggggaggtcccaggggggggggaggaaaacaaactt

SEQ ID NO: 726218 - DNA, 381 bp, Homo sapiens
ggaagatgtattgaagcggatgaagtgagggactgaagtgaaggcagactacgctgtattacagagacaccaaaagaactccttacgctctttctataaagtgcatgcgtgtctatataatccatcattatgtccatttgcgatacaatgactagctttccttgatacacgacaaacttgctgtgacaaagctggcacaaactgcatcgaaggattctgcataggaacctacaagccattctggctcgtacccatgacattcacattacctatgctcctttaaatggaggcaccttagcgagattcaggctgaggctcatattatttcaaacccatactataccagaatctagttgatgagcatatatctggtatttggcg

SEQ ID NO: 726219 - DNA, 517 bp, Homo sapiens
acattgtgtatactgccttgcgattatggcaaacaagatcacacatataataatacctagtcataataatctaaactcttatattcaggacaatgagacagtacaaacatatttcacgcagctatcgcatacatcataaatacatccctctacctgagacctccacgtaagactctcatctttccacttcagagttccagaagtgtcccacggcattatactacccccaggcttactcttactaatgtgaaacagcttcctccccctattactccctctctgtatatgccgcatttcactctgtattatatcacccccttcttccctcacacttcatagtacactttgatctggtcaaaactccaattatcggggatctcatcttacgtcagtgtgttggccttctctgatgcgcactggccgtcgtaccccaacggggattagataccccactatgcttagccctaaacctcaacagttaaatcaacaaaactgctcgccagaaccacaaatatcg

SEQ ID NO: 726220 - DNA, 223 bp, Homo sapiens
  misc_feature (66)..(66): n is a, c, g, or t
gtccatgctgtatccaacattggaggtcagcaggcagatcatgaggcaggagttaagatagcctgncaagatgtgaacatcctgtctctactaaagatacaaaaaattagcctggatggtagcacgcacctgtaatccctgctactcgggaggctgaggcagggattcacttgaacccaggaagcagaggttgcagtaagcgaagatcgcaccattgcactcc

SEQ ID NO: 726221 - DNA, 125 bp, Homo sapiens
tggggccttttgggtggggtggggggctgtggtcaaaccctattttgtatttgggacttaaggtggggggagtaaaggggcccctggaaaatgtattccaaacaataaaactttgggcctttgga

SEQ ID NO: 726222 - DNA, 922 bp, Homo sapiens
ccatattagcgtccgtggctgagtagccccattatactatttgtgcccgcaattgggttttccttggggaaccttccacagatttgggcaccttgacggcgtgcccccctagtacgacaaaatttggcgcaatactgtgcgagaattttgccacaacggcgcgcacactgtgacaaccactggcggggccccatcacaagaaccaggggttatccggcctgatgcggtaacttcccaatccacggtagcctgggaagccaacacttatctcccgggggatgcccgcctctccagtacttgccccaaggtgtctgtcgccccccccattcagctgcggctgggtgggccgaacaacagccaccggcggtagtaaggcctctggccgcaagacgtggtaacaacgcggcggcacccgcacatggtcaaggggacaagagacctccacgatcagggcgacgcacaagagacctcatctgcggacgggggccacccatcaggcagtatggcccggaaaccaccccaaccggacggtcccactgccgggggagggcgcactgatgtcttgagccgccggctgatgggcgaaccacctccccccgcgggagatcgacccacgcaaacatcctttcagtctggccctcaactcgaggggaggccaagacattgcccccccggacagatcatcgcgcggccccggtgatgcccagagggaaacacgtcaccaaggagactagttcaccaaggggctggagcgccgtggccccggagcaagcaacgccccgggaggagacaccaccacggggctaacaatacataagtgagcagtggattcaaagcgccccacatacatctgccagcacgctaaaacccccgggccccgcccagtttcatacccaaaaaggccccgcttccccctcataaa

SEQ ID NO: 726223 - DNA, 159 bp, Homo sapiens
gatcactaagtcgatcagggccatccttgcagctgcagcacaacgctctcgccgccgacatgcactgagcagatgcaacctttcgttgcaccctcaagagccacaacggctgggtaacccagattgctactacccgagttacccgacatgatctatccg

SEQ ID NO: 726224 - DNA, 1138 bp, Homo sapiens
gtgcctccaggagcactcacagccctcacagattctctgcaccctcctcctctgctggtgtgtccttggaagagagagggccttccggaaggctcagagacagcctcctctcctatggagggggttccgagattgctaaaacgtttgctcctcacatgggtcaactgttccagtgtgcggtgggccacccgggttcaagacatcgttcacagctgggaagctcctgggctggccctgattatcagtcatggggattgtacagatatgcaaaggagagtacttctggctggagcctagaagaatgcgatttgagaatttccaggaacctgacatcggcctcgtcgcacgtggctttccttctagggctcctttgcctatggaggctggaacgtttctgaatttaccgtgactgaggagcgttgtgatccctactagctgttcttcgctggaagcccgagagggtcatcttcccaagtgtgtaggccagtgatccgacgtgaagcgcttgcagtcccaatcccagccctgctcttcacatgcatctccacccgtgctgatgctggtcaccagtcgacatgtacagcactcatcgaacgtacgtgggcttcatcagagtaccgtcttctatggggtcacggttgctggacaggatagtccttcgcatggaagaagcctgattattcccccgtgcccattccaagcccctgtcctaccagggggtgagtgtgggaccagcagagcgcgacgggaagctgcaagcctttggccctgtgagcgatggtggtcttcatgtggagtgaagaaggacgcgatggaatggccccagtcccctatgtcctggggggccacggtggctaggacaaggttccaacgctcaatggctctgggtcccacagaagttccagcccgggcgggtcccccactcaatcttacactgcggtggcctggggccttccaggcggggcctttcaccctggggggcagaagccgcgggagagttgtgggatgggggctgggccatcatgccgggcacgagcaagcgacggccacataccacgggtggttacaggggcaccaaacgaccgcaagtgggtcgatgacctcttgtgagcgcgcttaacccgtgtgtgcgcaaaat

SEQ ID NO: 726225 - DNA, 162 bp, Homo sapiens
aagagagtaactaagagtatctacatccactttcacaagtgcgtttaggaaattaggtgcaatgcctattccatgtgatctctaaactcaatagatattctattcaagtgctattatacttgtccataaaattgaagtaattatattttcataccctatatt

SEQ ID NO: 726226 - DNA, 2065 bp, Homo sapiens
tagcgggtcggcgcggagcggaaggtgcagctcggtttcccccggcacccctccccctcgggcgcagccccaccctccgccggccgggccgacccacgcagaaacatatccctcatgcggcagcgagcacaggggcgggcatcaaagcgcaccccacaggcagaacccacatcaatgtggcgcagccaagacgactcacaaggcgctcccccagaggaactaccagatagaaccagcacgagagagcaggcccaagagaaggacgacacataccacacgggacgaaaacagggccaccaaaagcggagcaccaggcaagacacgtggggcaccaccggatgcaacaacacagccacaacagtgcggaagacactataaaataccgcacaccaaaaaggagcacaagacaaaggggagagaaatataccaacacacacaaatgtgatagcaaacacgagcgaccacgacacacatagaacggagcacacaaccacgaggaggaaacacacatctaatcagaccagaaaatcgccaacacagaaagcaaaggcacaaagaaaacagaccccacgaaaataaaagcccaccagagaggataagcagagacaagcaggcacccacaagggagacgaagaaaacgggaacacacaacaacaacaaaaaaaggagaacaaaaacgcaccgcgacacaacgacacagcaaccaacacacaaagcgaaccaacctgaacaaaacgagaaaacaacaaacgaaaaaagccgcccgcactaagctagcccaagcacgaatgcaggcaacacagcaggagaacctgtgagaagccacgatatacgccagaggagcaagaccaacacaacattgcaggaggaaaacaggagacacatggcagatgagagacaacaagcaatagcaacaccccacgatgcacaagtgagacccctatcccgaatgcaagaacgcacacaccaagtgaagaggcaacaccaggaagagcaaaccgtacaaccaagaacagagctagagaaaggaaaacgaaaataacagaagtatgtcacccagatagacacaagagcagcaaaacaacaaaggacaacacactaaacgtagtcgcctatacacaagcgaacaaacacggggaccaacaagcgacagcacgcgagaacaagcaaccacacaaacaccagcatatagaacaaaacagcaaccaaacgacagaacaacccccccaccaagaggtactctaaggagcgcgagggacacaaagaaagaggacgcaatgaagaggaacaacagacacgctagcacagaaaaagaggaaaaacggaacatgacaaaagaggacacccacaccgaaggcgaacaataacaggaaccgagacagaaaacacaagcgaacccacctaagtggagggccacccgcagaaaaacaagctggtgcacacaaataaagagaccaaagaccaaaagatagacgactgaagacaaagaaaacggaacagaaacacacgaaaggacaaaagagaggaacacacagtagaggcgcgaagaaaagacaaccagacagcgctggtaacacaaggcaggatgagacaggccaaaaatgatataaaaaagataagttgagtacatagtataagcattagttgattcacaaatatgaatgaacaataatagattagaccaacgaaaaaagagaagcaggagagaaaatattagaataaacaaaccagaaaatagagtatatcagataataagccgatacacaacgacgaggatggatagttaacgcaaagcaagaaattgtggaattaatcaaatataaaggcgacaagtacaaaaatgaggctaattaatgaacttaaccacagaataaagattaatctaagaaagaagccatataactgagacaactaatatgatatggtactacaccataattaaaaaggttgagaaacatacacaaaaataaagaagatgaagttaacataacaagacaaaagaagatagattctacaataggtactcgcaaagagttacataaatgagagacacgaccaaactaaa

SEQ ID NO: 726227 - DNA, 914 bp, Homo sapiens
agcaggggcgaccgatcaggttggtgtccggtttaaacgagcgcccggcagcgacaaaagagcgtcgactggaacaagaacgcgcaagggggtggaagtaacaccctacctcccactctgcggggtaggtccaggggccccggaggcggcagcccccccgtcgtgggagaagtcggtcacagatgccgccgagagcgtgaccggcagacaaaacacgggggggtcggcttacctgcggcgggggagctcacccgcacagagtggggtcagcagtgtagtctctctcggggggaatcaacacgttgcggcaaggagtcggtgagtagcaagctcgcggcgcttccgagccctaccgagacagaggttcgtcttgggatcaagttgagctcccagctcgccggtgatccattggagcgtgtacgcattgtttccaaacgagcgcgggcgcggagatcggacagaaactgtgatctctatctcataggggcagccactggaggtggagcgtagagagctcctcacgactccctctgctagcgtcgagtgagcagcgcgcccgctggcccccttctttgacgaggacattggtcttgtcagccccgccagaatgcgccccacagaataagtgagatagagcttcacatccatgccggagtgcccctccggggtgggtggattctctctggcggtggacaattcgtgagaatagggtggtcacatcgcggctcttcggtcgacgggcgatgccccgggtaagtagcgacgctcaggagctcatctcagcgggtatgatcctgcaaaggggcggggtgactgagtcaactatgccacctctcttctagaactttttcaactaaagactctctgagtcccgtcccttgctgtacaaaaaaaaggtccaccgcccacatgac

SEQ ID NO: 726228 - DNA, 329 bp, Homo sapiens
tccaggagatagctatagcatgcctgctgtcactggacgtcgcgtcataccaggtgtcacatgtgcccttcatagatcttcaccatggattaagtacctgtacaagcttatttcccccttaaaaacaagttgctttgtgtgtcttgagtggtcggagttgttcatcttgacgtgtcctaggatcagaggactgcaccatgtcttctccagtttggctcagttttttagtgcagtagggtggaggcatgcagtgggcaagcaagcaaagggaggcaagtaaagtttaattcatgcctttattgggttgaggtgcactcattaagcttacg

SEQ ID NO: 726229 - DNA, 153 bp, Homo sapiens
taccagattaaagggagcagttttctctaaacttgaaacaactgaagatagctgcatattaaccacaacaacctgacagagtcagtgggcccacttcccatatctctggaggatctgcagcttactcataactagatcacatagctgggctca

SEQ ID NO: 726230 - DNA, 249 bp, Homo sapiens
tattagcaactttgctacacttatgctgaatgttatgagaatcgtgaattaataaattacacagtaattcctaacttaaagtaaatggaatggtccaatttaacatggcgctgaagattataatagtgcctgtgtggaagggaagaaaaagcaagttgggggagattttgcaaagagaattggtgttcctccttcgtagtagcccgtggtgtctaggtcaagagttagggcataagtaaaaaagcgaaa

SEQ ID NO: 726231 - DNA, 373 bp, Homo sapiens
  misc_feature (125)..(125): n is a, c, g, or t
  misc_feature (239)..(239): n is a, c, g, or t
  misc_feature (268)..(268): n is a, c, g, or t
  misc_feature (357)..(357): n is a, c, g, or t
  misc_feature (371)..(371): n is a, c, g, or t
gagcgaggtgaccccggctactaaagaagggtaaggcagagtagccatgggggcgcacctgacccggcgctatctgtgggatgcctcggtggagcctgaccccgagaagatacccagcttcccgnccggaacctcggcttttccggagcgcaaggagcgagtgatggtggccacacaacaagagatgatggatgcccagctgacacttgcagcaaacgtgactacttgttgcccactanctcatcccggctgcttgaaagttgcaaancgagacaagctttccccaactttcctggccttgcaaagcaccgagcagcaccgactggggactacttgcgaagcaacttggggttaagntgaaaacgcgttgnaa

SEQ ID NO: 726232 - DNA, 418 bp, Homo sapiens
  misc_feature (146)..(146): n is a, c, g, or t
tcagtgatctcagtagatactcatcatgattcatgcattagaggaaaatattcctgttaagtggaaaatgtgcggatggctactggaagacttcattctaaggagctttatagtaaaacatttcatttagaaatctgaaccttctntcttcagtttgctgtaatccacatgcactgagtagaacttgtattgatcatcgcgacccagtaggtacagggctctgggttagtcttcctgtcccaacaaacatctggattgaacaatgtcaggaggcgagagaaacagtgctgctccattacctccagttccaataaatacgaaaagggggatcaccttcgcatgcttcttggcctgacccatgatctggcggagaatgtctgcagcagaagcctccaactggaaaggagacaaccagcct

SEQ ID NO: 726233 - DNA, 520 bp, Homo sapiens
cgataccagactggcacagagcacgtactccatctcaaaaagaaagaaaagaagactctgacctgtactctgaatacaagtttctgataccactgcactgtctgagaatttccaaaactttaatgaactaactgacagcttcatgaaactgtccaccaagatcaagcagagaaaataattaatttcatgggactaaatgaactaatgaggataatattttcataattttttatttgaaattttgctgattctttaaatgtcttgtttcccagatttcaggaaactttttttcttttaagctatccacagcttacagcaatatgataaatatacttttgtgaacaaaaattgagacatttacattttctccctgtatggtgactcggcgtgtgcaacaacttcgtccattcggatctgtatggtcactcggagtgtgcacaccgcgatctgcaacaacttcgtccatactgacttgcaacaacttcgtccattaagacctgcaacaacttcgtccactgcg

SEQ ID NO: 726234 - DNA, 959 bp, Homo sapiens
ggtcattgataaaaacatttctaagagtggggctagagaacatactttacatctgacatccttggcctaacaacatctattattatagtgctcagcagtgtgggcattgaagaggcgcagaatgctttgaaagaaactaatcagaatcttggaacatcatgatcatgccattcttaagtaaatcaactattttcaacactgaagaaaaatgaaacattatttagaaaacaatgagattacaagttccaaactcagccaggaatgtggctcacacctgtaatcccagcactttgggacacctaggtgggagcatcgcttgaagccaggagttccaaggaaccagttggggcacggtatgtgagacccctatctctacaaaagaatataaaaatatgagctgggtgtgatggcacacacctgttgtcccagctactcaagaagctgagatgggaggatcctgagctcaggaggtcaaggctgcagtgagccgagattgtgccactggcactgcaagctggggttgacagtgcaagaacctggtcttaaaagcaaaacaaaaccacaaaacaaaacacattatagacacacacacagcgaggtccaatatggtagcagggcatccaaggggaacacagtatgtaggtcaaacgtggccggtcacagtgtacagcttggacaaactaaacatattagagtaggcaaacacacctcaaaagtgtaggttgtgcacaaacataaaaagtgggcgctttcatctccggagtggtgagtcattactgtgactgtcaaggaggggggaccgctttggatagcctcaaaaacttcgcgggggcagtggtaaaccggcgacgagacagacacagaaaatgggggcacccgctctaaggtcggcgaccaaagaactgacacgtcgggagcaaacatcttctcaaaaaggcagttgaataaagtggctccag

SEQ ID NO: 726235 - DNA, 105 bp, Homo sapiens
tataacgtaacacctgaaggaatctaaagttccgggtaaggtcgttccgttcaaagttggcgttgttggaccaacccccccgttatacccgaccctgggcctttt

SEQ ID NO: 726236 - DNA, 460 bp, Homo sapiens
gtacatccggatcatcatgcacaagacactatagatgctatttacgttttagaaaaaaaaccacacactttcttttcctatacatctgctgccaattaatttgctgacaattttctgctggctcaactattttgtttatacacaggtatagtatttaacagaacactgtacattctttttcatctactaaataatatttgcattatatagtgttcgttcttcttgttccatgtcaatggacacttttaattatgtgttttaaaaaggaagatcttgcccctactggattctagaaaaagcaatacaaaatcttaagtatgaaacctccatcaccagccagctatgttcatgtgacaattcagcatgatatagacagttgctttaaatcttaaaatacttagttgattaacttaatcatcttctttatggaaaactgtcagtcaaaaccagaacatatcgc

SEQ ID NO: 726237 - DNA, 219 bp, Homo sapiens
atcgagagcttctaggcgcagcgaccgaaggaggaatatcagacccatatccagcatgtggagaacaacaagaatgctgacaacgattggttccgactagagtccaacaaggaaggaactcggtggtttggaaaattctggtatatccatgatctactactactgcccagaaatttcaggtcctgagctggatcgacagacagcaaagatgtacaggga

SEQ ID NO: 726238 - DNA, 396 bp, Homo sapiens
  misc_feature (151)..(151): n is a, c, g, or t
  misc_feature (169)..(169): n is a, c, g, or t
  misc_feature (296)..(296): n is a, c, g, or t
  misc_feature (300)..(300): n is a, c, g, or t
  misc_feature (302)..(302): n is a, c, g, or t
cattaactctgtactaatatagtgctgtttggtaaatgttaaaattagataatttatttttcttcacatttttcttagtatggttcttctgtgtcacacaataggaaggaagtacagaaatgaattgtttttgtaaacctcacttcttacnaactatttgtagtgtgantttcaagagaattgttgtttttctcgattaaaggggagaaatggaagtaagtgtgaggcaacttaatctttaataacagagctggaagttaggaatggatagctacagtaaatgacttctttttttnagtnanatgccacacatgagcatgaatgtttcagaaatgcaacacatgattaaatagaaataacaatggagttatatgccactccagcggggatcctcta

SEQ ID NO: 726239 - DNA, 248 bp, Homo sapiens
tccgcgactgactccgcggctgaccaggaataccccaacctcgtccacgagactgatttggaataccccaacccaaccacgagactgaccaggaataccccaacccaaccacgagacttatcaggaatacccaaacctatccacgagactgaccaggagtacccgaaccgaattacgagactaatgtggaatacccaaatctaaccacgcgattgatcaggaataccctgacttaaccaccagtttta

SEQ ID NO: 726240 - DNA, 833 bp, Homo sapiens
  misc_feature (693)..(693): n is a, c, g, or t
  misc_feature (801)..(801): n is a, c, g, or t
  misc_feature (833)..(833): n is a, c, g, or t
taaaagttcggaaaatttgcagcctgacaatgtgatagaaaagaaaaattcccattttctgaggagaaattcaagctggctgcagaaatttgcatgagtaacaggagccaaatgctaattcccaagacaatggggaaaatgtctccagggcatgtcagaggtctttatggcaacccctcccatcacaggtccagagatatcaggaaaaaatggttttgttggccaggcccggggtcctcatgctgtgtgcagcctagggacttggtgccctgcatcccagccactcccaaccatgactgacaggaggcaaggtagagcttgggctgtagcttcggggagtgcaagctccaagccttgacagcttccatgtggtgttgagactgcgagtgcacagaagtcaagaactggggtttggaaaccttcgcctagattaaagaggatgtgcggaaatgcctggatggccaggcagaagtttgctgcaggggcagggccctcatggagatcctctgccagggcagtgcagaagggaaatgtggggtcagagaccccacacacagtccctactggggcaccacctagtggagctgtgagaagaggtcctccagaccccagaatggtagatccaccgacagcttgcaccgtgtacctggaaaagttgcagacactcaatgccagcccatgaaagcagctganagggagctgtaccctgcaaaggtacaggggcagactgccaagacatgggaacccaccttcattgatgactgatgtagatgtgagcagagaatatttgacttaaattgntgccctgatttgcttatggctgacctttgttn

SEQ ID NO: 726241 - DNA, 880 bp, Homo sapiens
  misc_feature (44)..(44): n is a, c, g, or t
  misc_feature (86)..(86): n is a, c, g, or t
  misc_feature (109)..(109): n is a, c, g, or t
  misc_feature (114)..(114): n is a, c, g, or t
  misc_feature (117)..(118): n is a, c, g, or t
  misc_feature (122)..(122): n is a, c, g, or t
  misc_feature (126)..(126): n is a, c, g, or t
  misc_feature (141)..(141): n is a, c, g, or t
  misc_feature (146)..(146): n is a, c, g, or t
  misc_feature (163)..(164): n is a, c, g, or t
  misc_feature (223)..(223): n is a, c, g, or t
  misc_feature (374)..(374): n is a, c, g, or t
  misc_feature (378)..(378): n is a, c, g, or t
  misc_feature (426)..(426): n is a, c, g, or t
  misc_feature (435)..(435): n is a, c, g, or t
  misc_feature (441)..(441): n is a, c, g, or t
  misc_feature (483)..(483): n is a, c, g, or t
  misc_feature (485)..(485): n is a, c, g, or t
  misc_feature (490)..(490): n is a, c, g, or t
  misc_feature (523)..(523): n is a, c, g, or t
  misc_feature (554)..(554): n is a, c, g, or t
  misc_feature (625)..(625): n is a, c, g, or t
  misc_feature (632)..(632): n is a, c, g, or t
  misc_feature (650)..(650): n is a, c, g, or t
  misc_feature (714)..(714): n is a, c, g, or t
  misc_feature (726)..(726): n is a, c, g, or t
  misc_feature (741)..(741): n is a, c, g, or t
  misc_feature (764)..(764): n is a, c, g, or t
  misc_feature (797)..(797): n is a, c, g, or t
  misc_feature (865)..(865): n is a, c, g, or t
ccttttaaaaacgaaaatgcaaaggcagtcagtgaatcaataanataaacctatctatagcagtcatcaaaagagaggtaacagtnaccagtgtgaaaatatcacaganttcanagnncacncggntctccaatgagtcgngtgtntatccgacacagcgggnnccggtagactgaagacgaatcccccccatgcatgccccacccccagtcaagcccttccncatcaccgtccaccagcccacacagtggggtagccggctgccgaggcaattccacaatggtttctccggtctttggccatctttacgtagccacccatgccccattcttcaccccagctgtccttcaccagccaatatttattgttatctnattntgttctttcaaatccgtagccaaccaccagcacaccatgacccatgtnttcactgcnacagtntggctcaaaataaatgccttctttatagaacaggaaggactnangaccngcatcaatagcaacagaaatgggccccacagtngcaactgccttcatcagggccttctcctgcntagggatgtccacaaagccggtgtcattagcaacagaatacttgggattgtacttacaggattcttctgtngcctcanatggataggattcctcanagttcaggcctccattatcctgaacatactggaaagcataatccattaggccaccattgcagcnttcattgccttnaggcccagagcagtntaccagattctgctcactcagtnagataagcctcccagttttccggaacatctgtncttcaagagcaccagttgcactaaaagcccaataagaaccacactgaccctgattcttcataggagtnacgtagcctttctct

SEQ ID NO: 726242 - DNA, 549 bp, Homo sapiens
ctcggagatctccggaaaactgcacatgtgaggcggggacgcatggggaagggccgaagccccggacagctccagacataaagcagacggatcgcactgacgacaccgaagcgcgagtcatggctggggccttagatggcaacaagtgctgagatcagcgggctcagtagcaggaacacaagcaccacccttgacaggatgatcatggaaggaagacggcgcaggacagatctcccgaatccaccgtgtcgggcctgaagaggccgcatgaacgctcgcgattcacatgagcgcatcatggtaggcatcgcaaggccatcaacctaccaggtgaagctcgaggcgctgtggccgcatattagaagaccagagacgagcaagcatcaagatagcaaatccgcgcgaatgcgcacgcctgagtagcatgatccaacatccaccattggaccaccattcgtgacaacaaggaaaagatctgggacgagttcccaggaggccacactgcaaggcggacaccaagattgacagcgatggccagcagccatggat

SEQ ID NO: 726243 - DNA, 584 bp, Homo sapiens
ctccctctaatctagaaaaatagaagtacggcgagtacgatgctgtgtgttaatgaggctacacgccgccgcttgtgctgcagccatgtctctagtgatccctgaaaagttccagcatattttgcgagtactcaacaccaacatcgatgggcggcggaaaatagcctttgccatcactgccattaagggtgtgggccgaagatatgctcatgtggtgttgaggaaagcagacattgacctcaccaagagggcgggagaactcactgaggatgaggtggaacgtgtgatcaccattatgcagaatccacgccagtacaagatcccagactggttcttgaacagaccagaaggatgtaaaggatggaaaataccagccaggtcctagccaatggtctggacaacaagctccgtgaagacctggagcgactgaagaagattcgggcccatagagggctgcgtcacttctggggccttcgtgtccgaggccagcacaccaagaccactggccgccgtggccgcaccgtgggtgtgtccaagaagaaataagtctgtaggccttgtctgttaataaatagtttatatac

SEQ ID NO: 726244 - DNA, 126 bp, Homo sapiens
gcgtcgacggacacacccacggtgcggccacggcggccagtggtcttggtgtgctggcctcggacacgaaggctccaagaagaaataagtctgtaggccttgtctgttaataaatagtttatatac

SEQ ID NO: 726245 - DNA, 288 bp, Homo sapiens
gggtgagactgtctcaaaaaataaaataaaacaaaaataaaataaaacttgcctcaggctctcactctgccttatgcccctcaactgaattctttattctgaggagataagaattgaggttgctgcaaacccttatggattctccactgctaacagtttcagatagctaggaggaggatattaaatgttctcaccacaaaaaaggataaatgtttgagatgatggatatgcaaattcctatgatctgatcaccatgcagtatatgtattaaaacatcactgtgtactc

SEQ ID NO: 726246 - DNA, 769 bp, Homo sapiens
ctccctctaatctagaaaaatagaagtacggcgagtacgatgctgtgtgttaatgaggctacacgccgccgcttgtgctgcagccatgtctctagtgatccctgaaaagttccagcatattttgcgagtactcaacaccaacatcgatgggcggcggaaaatagcctttgccatcactgccattaagggtgtgggccgaagatatgctcatgtggtgttgaggaaagcagacattgacctcaccaagagggcgggagaactcactgaggatgaggtggaacgtgtgatcaccattatgcagaatccacgccagtacaagatcccagactggttcttgaacagaccagaaggatgtaaaggatggaaaataccagccaggtcctagccaatggtctggacaacaagctccgtgaagacctggagcgactgaagaagattcgggcccatagagggctgcgtcacttctggggccttcgtgtccgaggccagcacaccaagaccactggccgccgtggccgcaccgtgggtgtgtccaagaagaaataagtctgtaggccttgtctgttaataaatagtttatatacaaagataaaaatagttttttattttatattcagagattaataaaaaaaaaaacttcaggcggcccccgtccccaatttccctatataattcttttacattcattccgctcgttaaaactggtacttgaaaaacctgctttcccaattaatccctttaaaaaatcccttttcaacttgctattaca

SEQ ID NO: 726247 - DNA, 921 bp, Homo sapiens
ctccctctaatctagaaaaatagaagtacggcgagtacgatgctgtgtgttaatgaggctacacgccgccgcttgtgctgcagccatgtctctagtgatccctgaaaagttccagcatattttgcgagtactcaacaccaacatcgatgggcggcggaaaatagcctttgccatcactgccattaagggtgtgggccgaagatatgctcatgtggtgttgaggaaagcagacattgacctcaccaagagggcgggagaactcactgaggatgaggtggaacgtgtgatcaccattatgcagaatccacgccagtacaagatcccagactggttcttgaacagaccagaaggatgtaaaggatggaaaataccagccaggtcctagccaatggtctggacaacaagctccgtgaagacctggagcgactgaagaagattcgggcccatagagggctgcgtcacttctggggccttcgtgtccgaggccagcacaccaagaccactggccgccgtggccgcaccgtgggtgtgtccaacgacatgcaaaataagtctagtatggacctctgtctggtctaataacaataagttctaatatagccactaacacatagagtagtaagagaagaggggcgctcggatgaagaatgattccccttagagaggcacgcaaatgtaaacgcgtgtgcacacaggagtcttggtcgaccgaacggtgggccgcccttatcgggcgaattcgttattagtgaatccttggcgcacgggacacaaaggattggcccaaaccagtgtgtgatcgggggaaaacggggtacattgagcggacctttagtgaagtgaaccctaatgtcctgggggggcggccttgatgggccagatctcctcacaagagttacgggctcgcaagggaaggttcag

SEQ ID NO: 726248 - DNA, 772 bp, Homo sapiens
ctccctctaatctagaaaaatagaagtacggcgagtacgatgctgtgtgttaatgaggctacacgccgccgcttgtgctgcagccatgtctctagtgatccctgaaaagttccagcatattttgcgagtactcaacaccaacatcgatgggcggcggaaaatagcctttgccatcactgccattaagggtgtgggccgaagatatgctcatgtggtgttgaggaaagcagacattgacctcaccaagagggcgggagaactcactgaggatgaggtggaacgtgtgatcaccattatgcagaatccacgccagtacaagatcccagactggttcttgaacagaccagaaggatgtaaaggatggaaaataccagccaggtcctagccaatggtctggacaacaagctccgtgaagacctggagcgactgaagaagattcgggcccatagagggctgcgtcacttctggggccttcgtgtccgaggccagcacaccaagaccactggccgccgtggccgcaccgtgggtgtggtcctggtaagagaatgagctctgtcgcggcctggtctgttgctgatatagctttatataccacacaggaccggaatggggaagccggcggggctgtctcttcagggtcctgccagggaggtgtgtattgtctcggcgactgggcatcatgagtgtcctgtagccagattttggtccaaggggtagaactgggcgtccccagtgggcgtccttgattgggtaccggttccgctgacgggag

SEQ ID NO: 726249 - DNA, 244 bp, Homo sapiens
accggatgcgacattcactaaatgatttcataaacaccaaaaagtagttaaactttgtatacataaccaaaaaaaaaaaaaaagaaccctgtcctttcacggtttttgcgcggctgtccatccccccaaaaatccaattaagaccttattggcttctcaaaattttataaatttaattaaaacctttggctatgattgtggtgtccccccttttggcttaaattccccctccaaaattccaaac

SEQ ID NO: 726250 - DNA, 643 bp, Homo sapiens
agcgccagactccatctcaaaaaaaaaaaaaaaaaaaaaaaaaaaaaaaaaaaaaaaaaaaaaaaaaaaaaaaaaaaaaaaaaatttcccccggcctgggaaatttccccttttttgccgtcttccccccggtgtcccccccggtgtttttttttcttcccccccccccacaaccccccccccacgctttttggagctgtcaccgcgtgtttttttatttgcccaccgaaagttgtttttcgccccccgcggttatttattttcaacgccgtgtcgggggggcgcggctgtgtggtgctccctctccccagccgcactcttctatcgcgggggactatgtgacttactccgcgagcgcggcggtggtgcctctcctcctcctgtggtggtctcttttctccccactattgttttctacattcttctcccccttttttctcctccgtcagtgagagccttcttattatttgtgggtcctctctcctactcttctagaggagtgatattgtgttgccgcccccccctttctgcggcacaagatcatctgtggcgtatcactcgttggtgcatatgtgtgccgcaccccccgcattttcttttttggtgcgtctcctatgctgctttagttcctctggacctcgct

SEQ ID NO: 726251 - DNA, 182 bp, Homo sapiens
tagacgtatctctttaagttcaggggttgatgtgcaggcttgttacatagctaaacttgtgtcctgagggtttgatgacgtcatcaaaccctggtcatcacaccctcatcaaaccctcatcaaaccctggctgagtggtctacttgtagggtttagggtttcgatgaccagggtttcgatga

SEQ ID NO: 726252 - DNA, 335 bp, Homo sapiens
cccccccccccccccccctcttgggggtttttgcaccccgccgtactcccggtgttaaaagcggtgggaaatttccgtttttccccccctttaccccccccccgggtttttttaaaaaaggggtttaatcccccctcccgtccccccggggggggtggggcccccaatttttttttaaaacttcccccccgggtttttttttttttggggtttttttttttgggcccccaatttttttttttttcccgggaaagttaaagggggaaatttaacccccccccgttttttttggtaagcccgggatttttcccaaaaaattaaaaaggggccgggga

SEQ ID NO: 726253 - DNA, 162 bp, Homo sapiens
tgagccggtccgacttcgaggatggtcttcttctcggtctcgcgtggtgagcgccttcgttgtcgatctcgccgccgcaacgtcgcgccacccagtcgatgaagtcgagcacgttctgccagcggctggccgcgagcttctcgttgtcctcgccgtcgtaca

SEQ ID NO: 726254 - DNA, 450 bp, Homo sapiens
  misc_feature (198)..(198): n is a, c, g, or t
  misc_feature (217)..(217): n is a, c, g, or t
  misc_feature (221)..(221): n is a, c, g, or t
  misc_feature (231)..(231): n is a, c, g, or t
gcacagggaggactgcttaaacccaagaggctgaggctgcagtgagccatgatcgtaccactgcactccagcctaggcaacagaccaagaccctgactcaaaaaatcccaaaaaaaaaaaaaacagaaattgcttttcttatggtatatatcttgcctattataatcaataaatatcattgtttaattagatcagttnccgcgttgggcgtagttgnaagnaaaggggggnttagtataaagacatcaccagttgcctcataatactatttcaagatctcaggttatcttcttagtaattttgcctgagttcccagtcactctcaatattctgtcctctcattcagtcccaaacaaaaaataaacaaacaaacccttttctaaatgtaaaaaggggcaaggaatggtggctcatgtctgtaatcccagtaccttgggattacaggcgtga

SEQ ID NO: 726255 - DNA, 470 bp, Homo sapiens
gcctagttttcatatttttagtgaagatggggtttcaccgtgttggcggggctggtctcgagctcttgacctcgggtgatccgcccgccttggcctcccagggtgcttggattgcaggcgtgatccgccgcgcccgaccttaactatactgtttataacctgcgtggggttttaaaaagccattccaggctgggcgcggtggctcacgcctgtggtcccggcactttgggaggccgaggtgggcgggtcgcctggggtcgggagttccagaccagcctcagcatggggaagccccgtgtctactaagaatacaagattggccgggcgtggtggtgcatgcctgtggtcccggctgcttgggaggctggggcgggggagttgcttgggcctggggggcggaggttgcagtgggccgagatcgggccattgcactccagcctgggcgacaggagcggggctccatctcaaag

SEQ ID NO: 726256 - DNA, 170 bp, Homo sapiens
gtaaagtagagcacaagaagaagcggaccttccgcaattttcacctaccgcggctgtgtgatctcgcaccagctgctggacgatctcctacttgcatgcagctgatgcatcctgtacaggtgcgcgccatcgcgcggcgtgctagaacctggggctctgcggccggacag

SEQ ID NO: 726257 - DNA, 113 bp, Homo sapiens
tcgtggttactacgacaaacggctgctggaagttacctgcaggatgtgagcttgggtaaatgagttgttttacgaaacggggttaactaatccggacatagcgcaaaaacttg

SEQ ID NO: 726258 - DNA, 667 bp, Homo sapiens
taagttggggtgatgaggaatagtgtaaggagtatgggggtaattatggtggggccctccggtatgtattaagtgggggcttatgaatgaagcgaacagattttcgttccatttggggttcctccagggtttggtgtataatttttttatttttaatggggtcttgggtggaggggaggtcaggtgggtaagttgggtggtttaattatttttatgttcgggtgatcgcaggaataagtgtaacggagtaatgggggcgtaatcttatcgactatggtgcggcgttcggatctggtgaagattattggcgcgctggtgtaaattggctgcagtccatgtggtttataatctgtgaccggcaggctatatcgcaggagagaagaatggtttcccatggttcactttatactaaactattaggtcctctctaataggggctggataaagcattgggctccaattgggcgtgtagacgagacgtctccagttcataatctgtcgaggagcgatatctttacaacgcgtatgtgggcgttgtttgacgcttagaaccgcttctctaaaatcgggaggcgctgctattatagcgcctcactatgggggtggtccaacattttgtacactcttctctacaggggtttttctccctctattttggtcccaaagg

SEQ ID NO: 726259 - DNA, 279 bp, Homo sapiens
agtttcttttttttaatggaaaaatctattttaaaatctattgttactttctagaaaaggaagattgtgtgaagatgtaaggctcgccatgctgggatgtttctatccttctattttttcaaccgtgtgttaagtatcttctacataatacccactgcactcaccaagccttaaaagcacaagtagtaaaatagcccgtcgtcaaacaaatcacagcttacatgtgacatgtgaaaatgttaggtcgacgcgcccgcgaatttagtagtagtaggcggc

SEQ ID NO: 726260 - DNA, 244 bp, Homo sapiens
  misc_feature (192)..(192): n is a, c, g, or t
agcagcattactcagaagttccaaaaggtggagaaccaactgtccattgtggatgaatggataacaaaatgtagtatatacacaatggaatgttattcagaattaaaaagaagtcctgatacattctacaacacggatgacccttgaaggcattatactaaatgaaataagccagtcacgagacaaatgctntatttcactttctttttttttttttttttttttttttttttttttttttttt

SEQ ID NO: 726261 - DNA, 159 bp, Homo sapiens
ggaggtcagagtggaagcaggttttagagggtccagcagaaggaacatggctgccaaagtgttttgagtccatttggcaagttttggcctggcctttagcttgttgccagggaggccgttggttgaactcttgcctttattataaattgttggatgcct

SEQ ID NO: 726262 - DNA, 1829 bp, Homo sapiens
  misc_feature (655)..(655): n is a, c, g, or t
  misc_feature (713)..(713): n is a, c, g, or t
gctcacgtctgtcgttgagtcgtgtgtctgcgttgtagtctggatatcgttcgttgctgtctgctgtcattggtgtagcctggtgtgttgtgcgttcggcttgctggtctctggcgttctgtctgttgctctagtattgtgtttgtattgtgctgtgttgctgtggttgtgtgttgcgatcgtcgctgctgtgctccacctagtggctatccctagaaaccttgttcgttttaaacacaacccggtgtgtgggcgacaccatatatagtccctcgaggggctccccacacgtgtgcggtggccccagagagcccgcccgcggttgtttctacctctcgcccccttcgtttttttttgccggcttctctatatgggttacgcgcaccgctggggggtggacgaattcttcccccacaatgaggggctctcccccctcgtcacaaattgggcctcctgccgcccaatatttgtctccccagcagaaaagaggagacaagttgttttcctccccctagagtggggatagtttgtctacaaagctgtgggaaccgttataaagtaggttttttgtttatcctccgctgagcctcttgtcgctgataaaagtatgcggcgttatatcttctctggggaattatttatgagtgttctcacnggagggtcgtaccacccccccacgcccgccccttggccctcgtcgtgtcccttctttntgtcttgtggccccccctcctcgggaccaccccgacgaaaagtgtgtttcgttcttggtggtaataaaaagggggtctccccgcgcggggtatttcttggggggatcccttgttcttcgcttcgtgtgtgatggttcttccgcagcgaaaagagaggtgttttttggcgcttgtttccacccagaaaggggcgccacactttttttatggaggccgcttttttattgccctcggggtaaaaaggggggggccccccccctcgagagagggttctctctgttgtgtggcccacccatcagggcgccccctcggcggccgcagaggagtgttttttcttctcgcgccggtgttcacccagcaaacctcccttctctaagagtgaggggccttcttttgcttcggtgtcgcgccgagagaggggtcctctcctctctcttataggcgttgtggtggtccttcctcgggggggtttctcaacacacactgcgagaagagagatagtgggggcccccaacatagagctctctcccgagagatttcttgtggtgtttctttgtgggggatacacatctcgcgagagacacacagagagaggcgctatatatactccctgggagagatattgtgtgtggagtgcgcccctgtgagtgtgatactccccacacccgggaggaaccgccctgtgtttatacactactctctacacctgtgtgacgcacactgccctgtgtgcgcgcccccacacgggtgttgtgcttctcacacacacagaggtgttttctctggggcgcactcaacagagtgtaagaatctcactgtcttgtcccctgtggggaaccccacactgggtatagagattggccccttagaaaccccctgtcctggacacacgctggagccattttgtggacaccccaagaatatagaattactttcccccccaccccccatttctcagagcaccagaaaaggtgtgggaaacccgagcacccctgcccatagcccccgacccggtccccccccccatataccgggtttccctggccgaccgttttttggggtttggaagtttctcttcttaaaaccctctttattaaaatttggcccaaacaccca

SEQ ID NO: 726263 - DNA, 368 bp, Homo sapiens
  misc_feature (30)..(30): n is a, c, g, or t
  misc_feature (57)..(57): n is a, c, g, or t
  misc_feature (257)..(257): n is a, c, g, or t
  misc_feature (298)..(298): n is a, c, g, or t
  misc_feature (304)..(304): n is a, c, g, or t
aaacaagacaaggatgcccactcacaccantcctcttcaacatagttctggaagtcntagccagagcaagacaagagaaagaaataaaggggatccaaattgttatagaggaagtcaaactgtcactatttgctgatgatattattgtttacttagaaaatcctagagtcctccagaaagctcctagaactgataaaacaattcagcaaaatttctggatacaaaattaatgcatgcgaatcagtagctcttctatncaccaacagcgaccaagctgagaatcaaatcaagaactcancccctnttacaacagctgcaaaaaataaaataaaataaaatacttaggaatatccctaaccaaggaggtg

SEQ ID NO: 726264 - DNA, 393 bp, Homo sapiens
tcggaaggaggtaggacccaacaaccaacagacaccaaggtgattcgtgtatatccagctgagggagatagaaactcagccgatgctcccagagagaaaaagaagccatgtaaccaggaagcagctccagagctgcgcccagggctgagcggggacttccaggcttcccttggaagagagccccgtctgggattctgtccctttctccccatttcttcgggctcctcatttttcctcggtgttgcaccccagttcttggtctcctcccagtaggaaggggagagatgcaaatctggactcgggtcggtcgcccagagaagggagacttcctctcctctagcaggtcagggactgagaggggcctgacttcggcggggacagctggagaggagt

SEQ ID NO: 726265 - DNA, 227 bp, Homo sapiens
ctggcaacagttgagtttcttaagatctgcattgctgtgtatgttccgctgtattcagaaccagtttctaaccagcctgtgagatgggaagttttttccccctcattggggtgaaacctttcattccggtattttgaattgacggtgtctgtgttgtttgtacccttgtggggaatgccagtggtgttgacattctgagctcttctatgtcaccgttgaaatttgga

SEQ ID NO: 726266 - DNA, 193 bp, Homo sapiens
tccccttttggggtctttgctatagaatgtttaacatcattcccccccaaagctgttttaaccaaaaatgtcttcagacattgccaaatgttccaggaagtggggagtattgcccgcagttgagagttgctgccttagggatagttttgccttactactatggcaagatctttctgcgtactctacccaaaag

SEQ ID NO: 726267 - DNA, 281 bp, Homo sapiens
atcggtaagatttgtaatcagggtaaagccagcgcgtgaatggcaaggtatcaatcactggattgctaatggctggtttttgataacgcgcatacgcagcgttacataaacccaatatcaaacgtcacattgtgtccgatcagcaccgcatccccaacccaatcgcggaaacgtgggatgacgtcactttctggatcggcattggcacccatcgaatccgtaattgatgtcagttcagtcgtaattctgacaggggaaaccaggattgatgtattcagaga

SEQ ID NO: 726268 - DNA, 105 bp, Homo sapiens
  misc_feature (83)..(83): n is a, c, g, or t
  misc_feature (100)..(100): n is a, c, g, or t
tcatccctagaggcagctgctccaggaacagaggtgccatgcagccccgggtactccttgttgttgccctcctggcgctcctngcctctgcccgagcttnagagg

SEQ ID NO: 726269 - DNA, 424 bp, Homo sapiens
gaaaagaggtgtggatatgagagtaattatgacctctgtcacctgctaggctctgcaggagagaaaggctttggagaaaaacttctgcatcaatttagtaaaacagagattatccctggatcctccctgaagacaaagggagcccatcttaatcattgagtgatctggaacagtttgtcaacagaatcccacagctgcaagattattacagaacaatgaagatctgagaaccaagaaaatgaagaaaaagagaaaacaatggtcttagtccattttctgttgctcataacagaacaacagaaatgagtaatttattttattttgtgtgtgtgtttgtttgttcgtttgtttgtttttgagacagagtctcactctgtcgcctaggctggagtgcagtggcacgatcttggctcactgcaacgtc

SEQ ID NO: 726270 - DNA, 171 bp, Homo sapiens
ctgtgcatgacgccagggctggtcgctaaccaggccgcgctcaagtggcatgagctagcggctgagagcagcagggtcgagtaccgggcagtgcaggagattgtttaccagtcggtacttgacagaagtccttatacagcgtcagaacagccgatctgtgagagcgtgtgg

SEQ ID NO: 726271 - DNA, 873 bp, Homo sapiens
ggcacagcttgctgccccgtgaatgctccatgtccccttttcagttccaggttgttcctctgctggaagagcacgtgcctcgcctggcctctttgtctggacaccttcttttctttaagaatccacccaggaatggctcctgacgcttccagatttcctagcactgggccttataacagcatttcttaaaatggggtccccagtccaacagcatcagcatcacatgggaatttgctagaaatgcaacttttggagccctccttggacctctgggatctaaaactctgcagaactgatgctatgagaagcccaagccatggagaggccctaggcaggtgctctggtcaacagcccaagctaaatgcccagccaacaccagcatctgcggccagccgttgagaacacgagacttttgaaaaaacacagacgatgaaactatgtgctctttcagccaatacaatgtgggaagtttttctggtctgttacaaataattcaggtccttagagggtagcttggtgtaacatgtggccacagactctcagtttgggtcctctcatctggtcctccaccgtccaaagccagcacaccattcctgaagcccaagttcacaccctggatttttaccccttcatccccttgagggaccccgaagacaaacagctttgtccaacgcactaatgcttggtcttcacctcaacttgaaggtggcaatggggtcttcacaagagctggggaaggatgctccagaaactggcctgatagttgccctgacttgactgattggaaccactatgagttgggttcagaaaaaccctgggcattgaccgagatcgcctttgtctaaagagcgaagcaccatgtctctagtgacg

SEQ ID NO: 726272 - DNA, 181 bp, Homo sapiens
taaattcgcgtcccgtcgacttctaattaacttgctttttttttctagacctcaggtgatttgcccgccttgcctcccagagtgctgggattacagggatgagccactgcacccagccaatttgctaagtttttttttttttttttttttttgagactctcagaaaaaaattagtgcctgg

SEQ ID NO: 726273 - DNA, 1590 bp, Homo sapiens
  misc_feature (1259)..(1259): n is a, c, g, or t
tgggagtaaggtgggccttaataagctgagccataatttgaaagggatgaagggggaggagggggtgtgccccgatgtgccgggccggccagtgctttaggggcttggtagggtgatgtggaaaacttcgcccaggttaggtggccgattcatcttcgggcttgtgatcttccaccgtgggttgaaggtcttgtgcgcggtgtgaaaagaagcccacaaccagtggcgtgtccacaacacaaatctgcgggtataggatgtgatctcatgtgtgtccgcgacaaggtgtggcgttcttatcaccaacaaactttcgcggggtttcttcacatgtggtgcggagcgcgcctctcctattctgtgggggcgccgtgtggagacagaggcgcgctctatcaagcaggggggaggtgtgtttgcttctacgcgcgccgacagtgtgccccccgtgtgtttctcagaggcccgcgcgcggcgccggcgatgtgcgcggcgcgcgcaaggcggtggtgatcacgacgcgcggtggggccactacgaggagtgtgtgctctcggcgataaggggcaacaactgtgtgttcaccacagaccgaagagcgttggggactcccggagggggtcatcccaaagcgcgccgccggcggggcggacagacggggcgctgcggaaagaatcatcgtcggtggctggagaaaaagaaggtgggtctactcctgagaaagttatttacattatatcactaatcagacctgtgaggatgatgtaccataagaatcggtacttccacaaattactcgtttagaaggcagctacgggtgggagggatgaatcctcaacggcgggaagcgacgggaggaaatttgtggttggttgctggatgcaaacaatgaatggtacaaatacttaatccacccacccgggaggggtcgctgcgtggttgatcggcgggccacccccatattctggtgggggtcgttggttacccaccaaacttaggtggctgtggggacgaggacacccccttcctttatgcgggggccgaccctagttcgacgacagaaagttagagcaatcacttactacttgatgggggggggacggcacgccagccctccattggttagtatcctcctcacaccaaactgacacttcgactgaccccaaaagcgaggggccgtgcactcatacctcacaggtgtgcagggcaaccatcctgcgcggacgaacacaaggttggtctgcccacgccaccgatgngctgcctcctaactacacacttgggcgggggggagagcagaccactctgtttatggaagggcagaatctggtggcggcccgccccttcatttacacaaagaaataaggagggcgtatacatcactagaccgaaaaagaaattttacaattaacgttaacaacgcagcatattggttgagtggtgctagtggtaccgacagagcggcgagagaccaaagacaaacgactataatgggggtgaggggcatcattgtcatgtgatagtgaagaaggagaggaagaaacaagatatataatgtagaagcaccaaacatagtattcttcgtgacgg

SEQ ID NO: 726274 - DNA, 128 bp, Homo sapiens
tgcctaggtctacccggcgcagtacagatcattctattgccgccctctattgatcccacactccaaatgatcatcatcaacaatccgagtaatcaccaccaacagtgactaatcaagctaacctcaaa

SEQ ID NO: 726275 - DNA, 100 bp, Homo sapiens
gagacctccaggaagtctgggactatttaagcattctatccttagataattagcttctcctatcgaggaatgagaaatctaagagtttggaaaacatatt

SEQ ID NO: 726276 - DNA, 140 bp, Homo sapiens
ctgaggatcccttcgcggtatataaactccaaccccgtttcgcggtatataaactccaaccccgtttcgcggtatcataaactccaaccccgtttcgcggtatcataaactccaaccccgactggtagcgacagcaggca

SEQ ID NO: 726277 - DNA, 829 bp, Homo sapiens
ggcacctagctcaacaggccctgcacccatggcccctccaatgagccccagtgccctgagcaagcagggctctggcagcagccatgccatggaggtgcagagaaggctatggctttgggtcaggagatgatccctactcaagtgcagagccccatgtagtcagagtgtgaaacggtcccgctcaggtgagggcgaggtgatgtgtgccttatgctgcaatggtgccacgagtgagccttgaacgcctggacctggacctcacagcttgacagcacaggccacccgtcttcaaggtcttcccaggcatgtaccactgatggacatacaaccttattgttatatagaacgtggctgcatgccccgcatgcagctacactggccagcacaggggacttgcagccatgaaagagaacacccatggtgcccgcacacccatggcttggcaatggaccactatgtcaacaagacggagggagaccggaggcatggccatatgggagccaccatccatactagccacatgaagggccctgaagacacaaaaactggtgccttaatggcgtctttgcgggcagagggacacatggaacagcatcgcacgggggtccccccagcaaatgggctcatcaaacacttaaaattgggacacgcagactcgagcagatcaaacggcactgccaggacgaaggcagaggactcccacgaagcggggtaacccacaggaacacgcaacagtgaggttgcgcacagaggcagaccctaggcataacacaagagcacaacaaagagagccccgggaacaagccagcaacccccaggacgaaacacg

SEQ ID NO: 726278 - DNA, 875 bp, Homo sapiens
  misc_feature (21)..(21): n is a, c, g, or t
  misc_feature (28)..(28): n is a, c, g, or t
  misc_feature (32)..(32): n is a, c, g, or t
  misc_feature (34)..(34): n is a, c, g, or t
  misc_feature (39)..(39): n is a, c, g, or t
  misc_feature (41)..(41): n is a, c, g, or t
  misc_feature (99)..(99): n is a, c, g, or t
  misc_feature (104)..(104): n is a, c, g, or t
  misc_feature (136)..(136): n is a, c, g, or t
  misc_feature (168)..(168): n is a, c, g, or t
  misc_feature (170)..(170): n is a, c, g, or t
  misc_feature (184)..(184): n is a, c, g, or t
  misc_feature (214)..(214): n is a, c, g, or t
  misc_feature (219)..(219): n is a, c, g, or t
  misc_feature (240)..(240): n is a, c, g, or t
  misc_feature (254)..(254): n is a, c, g, or t
  misc_feature (257)..(257): n is a, c, g, or t
  misc_feature (260)..(260): n is a, c, g, or t
  misc_feature (296)..(296): n is a, c, g, or t
  misc_feature (312)..(312): n is a, c, g, or t
  misc_feature (315)..(315): n is a, c, g, or t
  misc_feature (318)..(318): n is a, c, g, or t
  misc_feature (333)..(333): n is a, c, g, or t
  misc_feature (353)..(353): n is a, c, g, or t
  misc_feature (356)..(356): n is a, c, g, or t
  misc_feature (358)..(358): n is a, c, g, or t
  misc_feature (371)..(371): n is a, c, g, or t
  misc_feature (388)..(388): n is a, c, g, or t
  misc_feature (413)..(413): n is a, c, g, or t
  misc_feature (418)..(418): n is a, c, g, or t
  misc_feature (429)..(429): n is a, c, g, or t
  misc_feature (459)..(459): n is a, c, g, or t
  misc_feature (473)..(473): n is a, c, g, or t
  misc_feature (481)..(481): n is a, c, g, or t
  misc_feature (488)..(488): n is a, c, g, or t
  misc_feature (492)..(492): n is a, c, g, or t
  misc_feature (495)..(495): n is a, c, g, or t
  misc_feature (506)..(506): n is a, c, g, or t
  misc_feature (515)..(515): n is a, c, g, or t
  misc_feature (524)..(524): n is a, c, g, or t
  misc_feature (528)..(528): n is a, c, g, or t
  misc_feature (531)..(531): n is a, c, g, or t
  misc_feature (538)..(538): n is a, c, g, or t
  misc_feature (578)..(578): n is a, c, g, or t
  misc_feature (643)..(643): n is a, c, g, or t
  misc_feature (653)..(653): n is a, c, g, or t
  misc_feature (688)..(688): n is a, c, g, or t
  misc_feature (701)..(701): n is a, c, g, or t
  misc_feature (706)..(706): n is a, c, g, or t
  misc_feature (799)..(799): n is a, c, g, or t
  misc_feature (815)..(815): n is a, c, g, or t
  misc_feature (831)..(831): n is a, c, g, or t
cagggcgggcgagcccccgangcccganggananggaanancgccgggcccgggtcgcggaggcgggcgccgccggaacgcgaacacggggctactgcnggcangcgcgaattcgccacaccgcccccggcgtganctgctggtcgcttccggcgcgggaagaaaatntngccgccttgcggangctccggaccctggccttggcgcggtcgcngggancccgggcctgcaacggggatnggggcgtttcctanacncanggccaaaatccggagccgcggacccgcaaatatttntaataaatagaccaanaangcnaacttttcctggatnattccaaaataaaaaatttnatnanctgcttcaaaaanccgcagttcctggtcancttcttctcccgcctgaaaaccaancgcancgggcgctaanaagccgctttccccttcctctcgccctgcngcaaaaaacgcaanttcctgcnctgcgangacnggncggtggtcttnaagcacctnctgaacgcngacnaanggaatanacacctctactaatgcagaggtggcgaagccctggacgtncccttaaaacggcgcgcctgctgcccctggccgccaacgggcgcctgtaccacccggcgccagancgtgcgggcngcgtgggcctggtgcgctccgccctggccttcganctcagcgcctgcntcgantacgggcccggcgcgcctgcactgccctcgcacgtgcgctggcagggccgccgcctcgccctcaccatggacctggccccgctgctgctcgcngctcggtcgccctgancggggccaagggaaangcggggggccgcgggcgcctctcgccccgctcccccgggactcc

SEQ ID NO: 726279 - DNA, 1007 bp, Homo sapiens
cgaacacgcttttgaaaccctaggcgaaggccggagcgctctgccagtcgaagcgctacacgtactcgtgccactgcattccagcctggggaacagagcaagtctttgtctcaaaaaaaaaaaaaaaaaaaagcactaatttcttgacgggttaagggaagccccatcacaacacacaacgccaaacactcgacacaaaacaacaacaagagacaaacatgaacacacacaccaaccaacacgcacagacagcagcacacaccaagacagcaacacaaaacgcgcacacaacagacacaaacgaccacgacaacgcgccgcgcaccagccgcacagagatgagtcgcagggagagggcgaccacacgccgcagcgacacacgccgcaggcagcgcacgcagaacggcggggagcgcgcgcgccgcagctcgccgccaaccccaggggcgcggcgcggcgggcgccccacaaggacagcccccagcagacggggggccgcggagacacgaaccccgcaagggcaaccgcccagggcgcgcgagcaacaccataacacagagccaagggcggcggggcaccagcacggcagggcgagcacagagagaaacacagagcgcacacaacagaaaagtcgcaggcggacgagagaaacaagcgcgacgcggtggtcgactctctgcgtagagtcagagggcattataggactgtgcgccttgtcggtacgtgtcgttaatgctaccttcgccttcatgtctgccatgagtggccctgtctcactccagatggcggcgcgtgcgttcccatggcactgaaccctcgcgcccgaactgtcaactcacaacgcgcgctctaccaaacggagaagggcggctgcaccagtggtgatcgcctgggtgacctctcagcactcgtgtgttctggggtgtcgtgtcaccaagatcataagccaccactatcgcggatcgacaacgagaacaacaaaccgtacctgcaccgaccatcgattg

SEQ ID NO: 726280 - DNA, 1230 bp, Homo sapiens
  misc_feature (768)..(768): n is a, c, g, or t
  misc_feature (778)..(778): n is a, c, g, or t
  misc_feature (790)..(790): n is a, c, g, or t
  misc_feature (792)..(792): n is a, c, g, or t
  misc_feature (808)..(808): n is a, c, g, or t
  misc_feature (814)..(814): n is a, c, g, or t
  misc_feature (817)..(817): n is a, c, g, or t
  misc_feature (838)..(838): n is a, c, g, or t
  misc_feature (866)..(866): n is a, c, g, or t
  misc_feature (875)..(875): n is a, c, g, or t
  misc_feature (878)..(878): n is a, c, g, or t
  misc_feature (882)..(882): n is a, c, g, or t
  misc_feature (905)..(905): n is a, c, g, or t
  misc_feature (925)..(926): n is a, c, g, or t
  misc_feature (963)..(963): n is a, c, g, or t
  misc_feature (979)..(979): n is a, c, g, or t
  misc_feature (991)..(991): n is a, c, g, or t
  misc_feature (1002)..(1002): n is a, c, g, or t
  misc_feature (1012)..(1012): n is a, c, g, or t
  misc_feature (1015)..(1015): n is a, c, g, or t
  misc_feature (1052)..(1052): n is a, c, g, or t
  misc_feature (1076)..(1076): n is a, c, g, or t
  misc_feature (1086)..(1086): n is a, c, g, or t
  misc_feature (1102)..(1102): n is a, c, g, or t
  misc_feature (1122)..(1122): n is a, c, g, or t
  misc_feature (1127)..(1128): n is a, c, g, or t
  misc_feature (1132)..(1132): n is a, c, g, or t
  misc_feature (1155)..(1155): n is a, c, g, or t
  misc_feature (1173)..(1173): n is a, c, g, or t
  misc_feature (1202)..(1203): n is a, c, g, or t
ccccccaggtgggatcggcctccgcggcccccgggaccttctggactccccgtgctccctggtcccccaggacctcccggaccccctggacacccaggagtcctccctgaaggcgctactgaccttcagtgcccaagtatctgcccgccaggtcccccagggccccctggaatgccagggttcaatgggacccactggctacaaaggcgagcatgggggaagtcggcaaggacggcgagaatgggtgaccctgagccccacctgggcccgccggactcccgggcagcgtggggctgcagggcccccggggattacgaggactgccagggccactcgggaccccctggggaccggggtcccatatgggattccgagggccgcctgggatcccaggagcgcctgggaaagcgggtgaccgacggcgagaggggcccagaagggttccgcaggccccaagggtgacctcggcagacctggtcccaagggaacccccggagtggcgggccaagccggagagccgggcatgccgggcaaggacggccagaatggcgtgccaggactcgatggccagaagggagaggctggtcgcaacggtgctccgggagagaagggccccaacgggctgccgggcctccctggacgagcgggtccaaaggcgagaagggagaacggggcagagctggggagctgggtgaggccggcccctctggagagccaggcgtccctggagatgctggcatgcctggggagctgcggtgaggctggcancggggctcancgggggccctcngnccacaaggccctcccnggagcnccntggtgtccgaggcttccagtngcagaagggcagcatgggagaccccggncttccaggnccncagngcctccgaggtgacgtgggcgancggggtccgggaggtgccgnnaggccctaagggagaccagggtattgcaggttccganggtcttcctggggatnaaggagaactgngtcccagcggnctggtcgganccnaaggagagtctggcagtcgaggggagctgggccccanaggcacccagggtcccaacggcancagcggtgtncagggtgtccccgggncccccggtcctctgggcctncaggnncgtnccgggtgttcctggcatcacggngaagccgggagttccggngaaggaggccagcgagcagcgcatcaggnngctgtgtggggggatgatcagggaaca

SEQ ID NO: 726281 - DNA, 731 bp, Homo sapiens
tgcctcagctactcaggaggcttgaaccctggaggcagaggttgtggtgagtcgagatcatcgcactccagcctgggcaataagagtgaaactctgtctccaggaaaaaaaaaatttattgggtgtataactttaaaagcagattttgggaagcatgtaattacattaaaagtatacttgtcccagctgcgtgtggtggctcatgcctgtaatcccaacacttggggaggccaaggcaggtggatcatgaggtcaggagttcaagaccatcttggccaagatggtgaaaccctgtctgtactaaaaatacaaaaattagccatgcatggtggccggcgcgtataatcccagctgcttgggaggctgaggcagagaatgggaatgctgtgaacgctgggaggtggaggttgcagtgagccgaggttgcaccatggtccaggctgggcaacagagcaagactccatctcaaaaagaaaaaagtgtattgtgtccttaaaaaaatttttctgaaaagtgggtaatggacataatacagctttcaaattactttatgctgttattttgatccgtaatgcgtattcacatgtgaaagcatgtgatcaattttgtgcatcagagatatcagagatagtttcaatgaatggggcattaatgaccttttctataaaagtaagggacattacaagtgtaagatgctggctgaaatatagtgggagaggctctttgcagta

SEQ ID NO: 726282 - DNA, 745 bp, Homo sapiens
taaagagccgttatgtgggggtcaaggaattccttgggtgggtgccaaatggggccgaaaacattgagtcaattcctggtaaagaccacgagagggaaatttcgggtttttcccagacaggggggactgtaaggtgacccaggattccttagagaatgttggccctcgttgtgaaagaagaacaggccctgggtgacttgtcacagttccatacgggccctggaatgtggtgtttgctgtttaggaggtatcccctctaaccgtacctggtggttcttgggccttcccctactctcgttcgtcatcttcgtatatgacgaagtcaggaaactcatcatcaggcgacgccctggcggctgggtggagaaggagaacctactatgtagccccccgtcctgcacgccgtggaggcactcaggccacacagcttctgcatccgacacccaccccctctttgtgtacttcagtcttggagatttggcagactctaaccctggtagggaagcacccgcaggcatgtggggaagccagacgtcctggaatgaagcatgtagctctatggggggaggggggagggctgcctggaaaccatccatctgtggaaatgacaacggggaaggtttttatgtgcctttttgcgttttgtatataaaaggaacacccggtatagactgaaagtaaaacattcttatatgctggatttttacaaataaagatggctattataatgaggaaagaaaaagaa

SEQ ID NO: 726283 - DNA, 166 bp, Homo sapiens
  misc_feature (1)..(1): n is a, c, g, or t
ntgctccagtaggtgctatagccctgaaaaggctgggacaaaataacagccataagaagtacctacttctttagcagttcttcaatttcctctgaggtctttataattccaagattgtctcttagccagcgaacaacagcaccagctatagctactgagcctagct

SEQ ID NO: 726284 - DNA, 995 bp, Homo sapiens
ctatccctctcgcctgtgtctcgtgccgcgtctcctggcgtctagcccgcggcgctgctctgccgctgctcttctgcgtttttgtcctcctgtgtttttctcctccttccctgctccgcctccttgcttcgcgctctctcctgtctgttcgcccctctgccccctcttcagcctcactcgccgtctcacgtcctcgctgcccttcccccactcttttctctgccgtcgcgtcctcatctgctctctcgtcatggctcgtgtctcttctcgggtctcgcgttgctccggcgtgtcctgtctgcgtctcgcgttctgttcttcggtcgcgggggctttcctgctgcccgccttgctgcgtctggtagggcgtgtgtcttctgtcgtctctgtctttgctgtgctgtgcctcgtgggtgtccgctttccccttctccgttttctcttacgcttcttcctgtccgtgccgtccggtctccccgtctcgggcttctcacttctttcctcgcccttccgttccctcttgccctcttctcgcgtggctcgtgttcttgctctcgtgtgtgtctccacccccgtctcccgctcttcgctcctcccgtcgcttttcgttttccctcccccttcgctctctgtcctttgttcctcttctctctcggctgtcgtcggcgtctgttcgtgcgctctgttgatgtctttgttgttttgtttttctgtagtatttgtgctggtgcaagtaaggagtcttgagttgatcatctttcttgtttgtgtgttatgttctctaggtgcttgctgtatgctcacgcggtaggatggggttgcgcgttgtagcaattgtttgtagtgtatcctttgcgtggtttccccgtagccatttcgttgttgactggttggtgactgcatggggataccccgtttgaagctggcctgcttcgtggaggatagccccgctcggtatttttgtgtaatgtaccctttcttcgcggatgttcaac

SEQ ID NO: 726285 - DNA, 317 bp, Homo sapiens
  misc_feature (61)..(61): n is a, c, g, or t
actccacaccacctgttcccaaaaacacctattgttattaaaaaattaaaaaaaaccatgnataagggaaattttggggcagtctgatcgtttgagcccaggacttcgagaccagcctgagaaacatggttaaaccccatttttccaaaacacacttccccccccttggttttgcccccccccccaataaaagggcttttgtttccttgtggggggaaaatgtagataaggatgggttaaataaaatattttggggaggcaataaacggggggggaacggagggtgggccctttttaaagggagggcctttaaacag

SEQ ID NO: 726286 - DNA, 1141 bp, Homo sapiens
ttcgccgtcagcatatggcgatgaccgcacggattattcgtatattgttattgattgtggtggccatttttgcacgctggatcgctccctatgacgccgaagaattatttgtcgattactgacaatctgaataatcggaccttctttgcagcactggtttggcgtcgattcactggggcgtgacattttcagccgtgtcctggttggtgcgcaagatctcgctggcggcgggcgtgttagccgtgtttatcggtgcggcgatcgggacgttgctgggcttgctcgctggatattcatgaaggctggtgggactcggctgatcatgcgcatttgcgatgtgctgtttgccttcccgggtattttactggtcgtatcgctgattgttgcggctgttgggaacgcggcattgctaacgtgattatcgctggtcgccattttttccatccccgtgtttgcccggctggtgcgcggtgacacgctggtgtcgaaacagcaaactttattgagtcagcatcgcatgtatggtgccagcgatgtgaccggattgtgcgtcatatcctagcctggggaaccggcctctttctatcgtgggtgttttttcaacaatggccgcaattggggtaccttccgattaatctcttgcggccaggctctcatttctcggctcggtgcgcagcgcggaacatgagtggagcaaggtcatgaggtcgaggtctaagtcgtgcggacaagtacctgactggcagtgcctacgttccgacccgttctgtcacaggtgaactcgggcccatggaggaaaattcaagcagtacgtccacacacaacacacaccaacaacccacacaaccacgccccgcaacacacaccgcaacacaccaacacaagtacaataagtacacagacaacaagggcgacaaggccacgcgcgcagaggcaggagagaagtgaccacgtttctcgcacaccgtgcgcacctcctcatagccacccccaccaatcacacctccgccaagacaggaacatgagtaagcagaccacgacaaccaagagaaaacaagcagaacagcaagaggaggacagcaaccagccagcacacaccacaatagacaagcacgaacacagcaacacaaaaaaaaaaaca

SEQ ID NO: 726287 - DNA, 312 bp, Homo sapiens
ttttttttttcctttttgagatagagtctcacttggtcacccaggctggagtgccgtggtgtgatcacagctcactgcagccttgacctccctgcaagcgatcctcccacctcagcctcccaagtcactgggactaaagacatgcgtcacttgcccagctaatttttctagagacagggtttggcaatgttgttcaggctggtctcaaactcctgagctcaagtgattcccctgcctcggcttcccaaagtgctgggataatgagagagagccagtgagcctggcctcggtttctatttttgattgaattat

SEQ ID NO: 726288 - DNA, 340 bp, Homo sapiens
aaaagttatttgctgggaaagtgtccaaaagcctgttttttaaacacaagctgggcttttggtagtgcctcatcacaacccaatatgggtgttcaatttttcccccctttttttccttcagcaaaggccagggtatggagcagggcccctgaatttgctgtaatctggagatgctttttactttcacccataaacggtaataacaaaggaaagggtgaagggagtttgggcaaccaaaacataaaaatggtggggtggtggtggggttgaaaaaacttgttggtataattgtcataggacttgcctaaaatattattaaaattacgggagcgttctccga

SEQ ID NO: 726289 - DNA, 134 bp, Homo sapiens
agcgtcaggtcatgcggatgtcacgtcacactacatgatggagtagaaggtagtttcgtggatgccacagagatccatgcccaggatggaaggctggaagagtgcctcagggcagcggaaccgctcatagccaa

SEQ ID NO: 726290 - DNA, 336 bp, Homo sapiens
ccccccccctttaaaccgggggggtttttttggggtaaaccaataaaactttcctggctaacccagccccctggttgggttttggccatttaaaccccccaacccccctttaaaaaggatgtttttggaaaaatttaattggttccccccccggcggccccccggggtttttttttttggtttttttggttttttttggttttttttttggttttaagcccgttttaatttttttggccctggaaagggctttttgtttttgggggttaggtaaggtttcccaaaaccttttttaggggcggcccttgggtttttaaaaaaaatttggggggccca

SEQ ID NO: 726291 - DNA, 655 bp, Homo sapiens
agcgcggagccacaccttacaactctcgcaccgtcatgaacggcgctctcgtgaaaccgacccacatcattgtggagaccatgatgtgagctctctcgggtcgacggggccggcggctttcctgctgtttactaacattagattctcataggaccaggtttacagagctttatatttgcactaggattttttttttttggtaatggtcacagaaaatgtaatgtgtgggtatgtgtgcgtgcgtgtgtgtgtgtgtgtgtgtgtatcgtgtgtgtgtgtttggtttaggattggggggatattttgtacaaaaagaaaacccaggggaagatgtccgtggagaggacagagctttcatactgaattagatgtattttatggggaattgggctaacatttttcttggtatcttttttttcacatataagtcatatatacccttagagatggtcatatactttccaccacttgacatggatcttctggccagaaatagatctcattttcaaaagcaattctacggcagcggtgtagctgggcacagaaagtcctggcccagtaaacgcaggagggaattcccggggactctacacccatctaaggggggtatcacctccaaatccgggtacacatgggaacgaaatagcaggagcag

SEQ ID NO: 726292 - DNA, 774 bp, Homo sapiens
  misc_feature (55)..(55): n is a, c, g, or t
  misc_feature (67)..(67): n is a, c, g, or t
  misc_feature (70)..(70): n is a, c, g, or t
  misc_feature (72)..(72): n is a, c, g, or t
  misc_feature (589)..(589): n is a, c, g, or t
  misc_feature (774)..(774): n is a, c, g, or t
ccccgcacttccgcgatctcttctctactgtttactgttcatcttccggcccccncctctaactccnccntnctcccctctctccttttatttttacattagagtcggtgagcatgaggcatgcgaacctctccaaatttaatgcagacagcttgtgtgtttctattaaacacatcgtcgctatttaggaggcgaaatattggtcagtcgccattctatatcaggagcagcaacaaggcactacatataatttgtgattggtggacagaaacatgaaaaccgtgttacacacaggtgcattgttcctgaaggaagaaatacacgtactgcacgcctaggcatgatgtgtgcttgcttaatcaagctacatcaaaaatcatttacggaaagttcactaaaaatttgcttgacttgagaatcacgctgtagattaatcaggctctcatatgtccgtgctactaatgaagctggcttaacaggaacgtgccaatgggatatttaaccccagcatttttgtaattctttacaaggaaggattttaacagaattaccgcggcaacccccttagtggctgtacaccgggcctgcntaaaactttatccaaccgtggaaataactttcgtcaaaagatcaccgagtggagggaaaccaacacagggtttcttttttttccaatgaggggccaaagttccaaatttattaaccacggtccgcgattttataaaaaaccggtaaccgagacacttttttcctctgctatgcactctcatttcn

SEQ ID NO: 726293 - DNA, 204 bp, Homo sapiens
ccttactccagacacgtgaccggatggctgattatggcatcagaaatggccatttactcttcctggcattcagctgcatgggggggtaatcgccggggacagaataccttatttccttttacttctcacttactaaccacaccctttgaaaatttcctaaagtcaatgataaagataaaaagaaagcggtcaacttgtctggag

SEQ ID NO: 726294 - DNA, 1480 bp, Homo sapiens
  misc_feature (763)..(763): n is a, c, g, or t
ttctcagtgagcgccgtggtgcatatccagccatggggggtttaataacaacaccacatggtgctcttgtcaaccaaggagttctcaccttgttgggttgaaaccaccatctagtgggggccttcctcgtagagtcttcttatctcacaagtggggtcgcagttggtccctctcctaccgccccaactattgtgcggaccaccaccggtttgtctcccaccgagggggggagttccccccagttggtggagcctttttgtttgaggctccctattccattccgacgggtcaccaccttttgtgtcttttcgtagcaaccattgtttggcccaccaggacacacgttcccgggggtgtcccttccgtcgctcgtcccccgaagtttgtgtgccgtgagactgtgggggctcctaaggaaccccagcggcaagaatgtctctccctcccccagttgtgtagatgttggcaccacaaaaggaagttttcttgccggaaactgggtgaattggagtacccaccgcccaacattgagggcccccacaataactgtttgagttggggaaaaaatttcccccgcggtgtttccccacagacgagtgtttgtcccgtaattccgccttgtagaggggttggttgtcacacccctgtgaagcgcccccttgggagattttttgtggcaaggcccccccaaacacctttttggtcctcgtttgttggtccacggtaaattctgctgtccccccaccccccacatggctgagcncacgtggagaacctgtggcacagcacatacacaggtccccgggtcccctcgtggcaaaaggaatttttgggccctaaactttttggttctccacacctgcttcgatgggaaactacacaggcttttcccacgcgccctctttttcttgaactctataaactttcaccaccccacggacccctcttctgaacacaattttctccctcgccactgtgtgaactccaccgcagaatattgagtcccctaaacaccacgccacttggtcctaattgggtataccccggagaacgcccctggccctccacgaattctgtcctggaagaaatttgctgtgtgtgtggcgctggccctttggcctgggtgtgtctgggcaatcacatcgctgggcacattgtttttcactcaatttaacttccggaaagccttgctcacgaactgaatttttccacgaaccacgaagtttgaatgccacgcaagcttcggccactcccaaccacgaggatgctcacgatttctcacacactcctgcccacggagtctcctccttagggtatgaaagaaagttctcttgggaacaatccctggggtgtgtgtgtaagaatttcccaccctggggaactctgctgttcctgggcttgcatccccgggatccccgagtggcctgcctatcaccaccacatcccttccccccaacaaggccaataaatctcatttctt

SEQ ID NO: 726295 - DNA, 163 bp, Homo sapiens
tggaggtggcagccagaggcggggggtagctgtctcagcgggtggtcttggtggactgctcgcggctaaaggagtttggatcagctcggtgccccctgtgagcctcctctgacgtagtcttggtccagtgtggctccctccatggctgcctcctctgtgctgt

SEQ ID NO: 726296 - DNA, 940 bp, Homo sapiens
gctcggcaagttctcccaggataaagccatgtccggttcgagcgccgaagatcgtgtaagcccaatggcgagaagccggacgagttcgagtccggcaatctcccgagggctcttctgggagctggagatgaactcgtgacctcataggctcagttcatggagctgacctattaggggcagtgcgtagagggaacattgcacagtgttgggtgggtgggtcgtgcatgagcgtatccatgaaatcttttcgcttcccgcttccgtcaacctgatgatccttgtccaagccaaagaaccaaagatccggtcgtagtctacgcgtgacatgggtgagcacataccggttgcccgacggagaagcggagtgtcgtcttagatcgcagtcaagccggtagtaatgcgtgccgtagagcctaacatcgaagaaagccgtacgcgaacagagtaacgccatgagagacggtacccagtgagccggtattctgacaggatgtgcacgatgccattcctgtgaggaacttggtcttccctgggtcgactattgtgggccctagagagtccgtgctctaattagattggcagccgtgttcataaagggttcagtttggacaatggtacagcgaagcaagtgtggaatacaaggtttgggaatgttttttcgtggtgtctataagaagctcacgggcgatgggatgtcaagtcctgaacttcccagaggtttttcactttggtaaagcgaacgaatgactaaataacataaacaatacctaggcagggacaccctaactccaatgcccttaattggaagcgccacacctaagccgtgttcctgcctttgggggggctctacaccctatcacctgggagcgtcgggggcaaaagacgttttctttttgtcggccacaaattccggggcggaacaacattttcccgggagggc

SEQ ID NO: 726297 - DNA, 822 bp, Homo sapiens
actagttctagaccgctttgtggccgccctttttttttgttttttcacatttcttactttatatttcaacattaaaaatattcacagagtggagtattatattcagacatctccagggaaaagtgtacgaaaacaaagcattacaagcatttccacaatttacagaatttacattattgggtgattagtggtgaatgtgtcaccctacagttaatctggaaaaacacttttaaaaaaaaaaaaaaaaaaaaaaaaaaaaaaaaaaaaaaaaaaaaaaaaaaaaaaaaaagagagggggggcgacaaaaaaaattactcccgaggaggggccaaatagacgcagcacaccacacttttatgaaaaaaagggcgcccatataagaggagagcaaaatatataaaagcagacgagaagcggagggcgcaagatattaaaacaaaaaatgaaaaagagggagaaacacaatggcgccacacgggcgcaaaacaatggggagaaagacaaaaatacatagggggggggacaaaaaaggagggaaacaaaacccacaaaaaaaaaaacaaaacagccaaaaagaaaaaaaaacaaacaatccaaaggaggaaaacagcgtgcaacaagacaaacagaaacaaaagcacgcaaaaaaagaacgaccacaccgcaagaaacaaaacaggcgaaaaacaaaaacaaagggaagaaagacataaaaaacaccaacaaaccacaaaaacacaacaaaacacaccacagaaaaaacacaccaaacaccaaacaagacccacagaacaaaagaaacaaaacagaaaaaaacacaa

SEQ ID NO: 726298 - DNA, 434 bp, Homo sapiens
ctgtttgttaaggcacagttcagagaagaacagaatctatatcaaatgttaatgtaatatatatagatgtatattaaatatgattgcttacatatctagtcataaatacagcaccagagttgggagaaatatttaatgtatataaaaattttgggccgggtgcggtggctcacgcctgtaatcccagcactttgggaggccaaggtgggcggatcttgaggtcaggagatcgagaccatcctggctaacatggtgaaaccccgtctctactaaacaaatacaaaaaaattagctgggcacggtggcgggcgcctgtagtcctagctactcaggaggctgaggcaggagaatggcatgaaaccgggaggcagagcttgcagtgagctgagattgcaccactgcactccagccagggtgacagagtgagactccgt

SEQ ID NO: 726299 - DNA, 161 bp, Homo sapiens
aacagcacccccgattccgtacgaacaactcatacacctcctatgaaaaaatttccttaccactctaccctagcattacttatatgacatgtctccatacccattacaattctccagcattcccgcatgcaaaccagtgagggtaccgcagctcgatattc

SEQ ID NO: 726300 - DNA, 546 bp, Homo sapiens
gttcaatttctacacagagcaagtatgaatcaggtatttgcaagttttacaagcttaagctgtttacctactaaaatataacaatagctagttgttatctgcatataagagttcattgaaatgatatgcccttatttgcaatacttttcccataaagtttcaagtgtgaaagaattgtaatttactagatatgtttggtatgggatatttggtgaggcaagtatgcttgattcttcttaaattgcaataggcttccaaaaagagtataattgtatcagaacaaatgaagtctgggtatgatacgtctcccttagtctttacagtattagtaaaaagaaaaatggtgcgcttactgagttggaacttcactaatgtaattactctctcaagaagcttttaaaatttagattaccatcacacaacctttgttatagtaaagccaacatttgttctctcaccaaatcccatgccagattcatcatgaagaaagctcagcataagtaattcagatactgcttataattttagaggggtgtagaaattgaa

SEQ ID NO: 726301 - DNA, 118 bp, Homo sapiens
tttcctctctactcctctgtattttcaggtttcacattctagaaaacatttattagttgaataaccatcacctttgaagacatttaacttgctccaatagaccccaagctagagtcta

SEQ ID NO: 726302 - DNA, 654 bp, Homo sapiens
  misc_feature (6)..(6): n is a, c, g, or t
  misc_feature (76)..(76): n is a, c, g, or t
  misc_feature (199)..(199): n is a, c, g, or t
  misc_feature (304)..(304): n is a, c, g, or t
  misc_feature (444)..(444): n is a, c, g, or t
  misc_feature (469)..(469): n is a, c, g, or t
  misc_feature (488)..(488): n is a, c, g, or t
  misc_feature (509)..(509): n is a, c, g, or t
  misc_feature (582)..(582): n is a, c, g, or t
  misc_feature (602)..(602): n is a, c, g, or t
  misc_feature (609)..(609): n is a, c, g, or t
  misc_feature (626)..(626): n is a, c, g, or t
aagggnattcctggcccccccaggacctcctgaatcccccctgggaggaagaaggaaattggtggcgggccctaanaccctttttcctttccccaaaacacccaaggagcagggttcctttcctggttacatcccatttgagggtcacattccttgaaggtggcattttggagggaaagtcatttattttttccgctancaggcaggggacctggattgtattcaggtcctatttagaatttccagaaaaaagtaagcaaaccaaaaaaaccggtggttgggaaatttattcctccttcctagncatttttggaaatggtaccaatgggttaaatggtttaactatagcccacccatggatggtaatttgaagacccaggtccttaattcctttttttatcctaaactggtaacattttggtacccccatttaaccctaaatgnctccataggcattcaagaaaagatncaatattttaagggtggancaaatatcccccaatttatgnctggattttggatttattatggaatggtggttggaatttattcatatggttacttccccaaaaattatggcancatgcttaaggatggttatncaattanaagaattaaaggaacanaagaatttaaaggctttttttaacaggt

SEQ ID NO: 726303 - DNA, 570 bp, Homo sapiens
ctcgcctagggagcagtgaggaggaggaagacgaagagatgcatggaagaaggggatgacgctggaagatcccaaggcgagagtgaggaagacagggcgtggagatagaaaagtgagtgatgatggtgtggtgatgacttctctagtgtcaaatgtttctgaggaagtggagaaaggaagagccgtgaagaatcagatagcagtgtgggaccagctcttggaagtgaaggatcaaacctagaataagagctctggtgaccaccaatcagtttcctcaagcagatgttttgcccatatgttcaaggacctagaggtggcccagaattttccagtgccctgaaaaatagtcacaaggcacttaaagcatggtagaggtcatttggtaggtcttcagtgaagagttgcttttgcagtacccagtagattagatatctagtagatgggacaaagccgattgcgggaagtgaggagatttctagtgaagatgatgagctggtagaagagaagaagcagaaaggaataagggtctctgcaaagaggaagctgtagatggaggatattgcagcttca

SEQ ID NO: 726304 - DNA, 226 bp, Homo sapiens
cgaaaaaccttggtgcccctcgaccagcgtccttgtgggtacaggttcaggacttaaggccaaaggacatgggcgtgagggtgtacgccggagcttgacccgtttgccttgttgaattgcaagcacccattatggcactgcaacatacggtttggcgaacgcttttcggcagtttgccaacgcgatgcgataatcagggtctttgccgcaagatgcatccagttac

SEQ ID NO: 726305 - DNA, 527 bp, Homo sapiens
ggtacccctcatgactattgatgaagactagtcgggggcaggagcaccttctgagtagatcccaccaggaacccttaataaattgaaggtgggacctgagggagaagtgacattttcggttgatactggggcagctcactcctccctaattcaccaaccaagggctacagaactctctaaggaaacattgaaagtatcaggggtcaaaggggagggatttcaggttccaatatttaagaaaattttaattacatcaggagcaaaacaaattgaggcgtcacttgttcctgaagtaggaactaacctcctgtgtcgagacctgattgtgagattgggtttaggattaggaatagaggaaggacaaataaaagtaatgatgggcctgggcttctgaggtggactcctggcctgatcagggaccctccccgctttcctggggctctcagttgaacaaagcagcaaaacaaaggcagttttatatgacagattagaagcctggcataatcaggcgtcttaaatgatgtaat

SEQ ID NO: 726306 - DNA, 402 bp, Homo sapiens
tgtttataatattttaatattttttttttttaaatatggccaaaaaaatgaaaaagtataccgcggaaacgagggacaaaaaagaaaaaacgccccccaccaaaaagcgggccgacccaaggggcccgaaacagcgccggccggggcccacccggaaaaaccccccccaaacccaaaggggaaccccccccggggccccagaaaaaggccggagaaagaaacccaacccgagccttctctagagggaaaaaaaacaacccccccccccccccgccaaaagagggccgaaaaaaggggggcggcctaccaacaaatcgaaaagaaaaacaagggggccggcccccaaaaagggcccggggtaaaaaaaaaccccccgaataaaaaaacgcccccggggccaca

SEQ ID NO: 726307 - DNA, 569 bp, Homo sapiens
gacaggatgaccactctcaccactccgattcaacatagtactggaagtcctaagcttaggtgatcaggcaagataaagatatgaaaggcatatataaataggaagaggggcaagtcagtttctcttgcagaagatataattctgtatatagaaaacctgtggtctctggccagagaggctcctagatctgatacacaagttcaaaaaagtgtcaggatacaaaagtctgtgtacgaaaattagttgcatttctatacaccgagtaatgtccacagctatgaaccaaatcaagaatggaagtcccattcacagtagccacaaaaagtataaagatacctaggaactacagcacaaacgcagggtacagctcgacacagaccactaccaaggacgaattacaaagcagtgcacaaagacctcagaaaacaaaaaaaactgaaaaatatctcatgctcatggataggaagaatcagtatagtacaaatactgaccaaagcaaatctacacgagccaatgctatcctatcaaactaccatggcatatatcacagaatcagaagaacacatctg

SEQ ID NO: 726308 - DNA, 111 bp, Homo sapiens
tcagtgctgtggcttgccttctccgttcatggtgttgctttctaagtgtgatctgccagtatccctcgacggtacatgtgcacccagttcagacttccagtgtggagagag

SEQ ID NO: 726309 - DNA, 190 bp, Homo sapiens
gtatccagtcaagaaaatgtatatctaaagatagccacattaaactatatggtattgagtttcaaatgagcgtactgcttatagcttatcgcatcctgctccgctgtctggctgtctctcttccaatgaactcttcatcccatcgtatttccatccaccagagagaatctgtcctcattacatgcactgt

SEQ ID NO: 726310 - DNA, 143 bp, Homo sapiens
gtccacttcatttctgagttcccagaggttacccaaagcacccctctgacatccggcctgcatcttctcacatgacaaaaactagccccctctcaatcatataccagatctctccctcactagacgtaagacataaccgcggg

SEQ ID NO: 726311 - DNA, 86 bp, Homo sapiens
agttgctattaaatggacttcgtgatttttgttttgccctaaagtttctgtgatttaacaataaacttttgttagccagatttgga

SEQ ID NO: 726312 - DNA, 493 bp, Homo sapiens
tactttgccacaggggaatggatatagcttgactaagcagatgagccttcaggcttgtaggtacgctattcttataactggctaccctccattagtaaaagatcagatcacttcaaagatatgatttgaagggataatggccaggcctcgattctatggctcgtggaaatgtcacgaatcgactccctagtttctggactttaggacattgactgaggtgccatttacaaaaatgaggccaattccaggagaaatagtatctgggaggaagagcaagcatttgttttttatacataaagctgacagctgaatatgtaagtctctagcaagagatcaaggctggagatataaatttggggactgtggcagtcagcacaagggcttccccaagacgtccatgtccttatctctggaacctgtgaatatgttacctttcattaataaaagggactttgcagatatgattaagttacgtatattgagatggggagat

SEQ ID NO: 726313 - DNA, 342 bp, Homo sapiens
  misc_feature (1)..(1): n is a, c, g, or t
  misc_feature (56)..(56): n is a, c, g, or t
ngggtttggtttccccccccaggccttttttttttttaggggttgggggggggggnaatttttccccccccccccccccccaaaaaagggggggcgggaaaaaaattttttccctttgggggggcccccccttgaatgggggttttttgggggggggtaagggccccctttttgggggggggcaatttttgttggggcgcccggtttttggtttttttcggggggtttttttcctttgggggctttggggggggggggccctgggccggtttccctttttccctggttgggggctccctgggcccccccccccccccttttttaaccctggttttccttgga

SEQ ID NO: 726314 - DNA, 476 bp, Homo sapiens
  misc_feature (15)..(15): n is a, c, g, or t
  misc_feature (39)..(40): n is a, c, g, or t
  misc_feature (76)..(76): n is a, c, g, or t
  misc_feature (82)..(82): n is a, c, g, or t
atgggtttttcccanaaggcccccaaaaggggccttaannaaattccggccccccattcccaggcccttggtgggngtgccnggggttttaaggcccttgttaagccccagggggtttagccccaattccccaagggggttacccccaaggttgtttgattttccttcattgcccccccccagcttggggagggggtttgtgcccgtttttcccagggggttaggtttttccggcccaaggccaaggccaaggccaaggcccagggttaaacccagggcccgggtggagcccccctttttttttccgttttgggttcccaagggtccccggccccccccaagggttttaggttaattttttttcccccattggggaagaaggggtggggggcccccccccccccccccctggggttcccttttgttggggggggggttcttttttttttttttttcaaattaaccttgggggggga

SEQ ID NO: 726315 - DNA, 147 bp, Homo sapiens
ccgttcaacttctacgcctaactaaccatgtcaccagtttcacacagcccttaaagtgtagaagggaatctcttattttatatcactataaccatatggggaggataatattatgatatacaatatactatcactatttgtgtaaaa

SEQ ID NO: 726316 - DNA, 404 bp, Homo sapiens
  misc_feature (20)..(20): n is a, c, g, or t
gcccccaaggccaaaaccangttttttgcctccttcaaaagggagggggagggcaagtaccgcgctgagtgcaaactggaccccaaaacaggctttaggcccgacccccggcccgaccccaagcttggtgccaaaacccagccccggctgctggtggtgccccagaacgagaacaggatggaggacaggctggccgagccctccagggccaaagaccctcccatttccggagttgaggtggggaaagcaagcccctagcatgccaatggccccgttgtgtgtggtgggggtcggggttggggggcatggtgcagtcggccttcccgtaaactaagtaggcaggtaggtttttaaaaaggcccaggggcaagtaaaatttgtcaattaaacccctttttttatta

SEQ ID NO: 726317 - DNA, 355 bp, Homo sapiens
gtgaaaactacatgcaggtatatgcacactttctgtgaaggtgaggccaatcttgattcaaactgcgcttgttgtgctcgtgacacacaagccctaggcatcaaatgtgcatctgacagctgatattgatgatttctcagcttgtgtaaagaagtgctgcaaggctgacgatgatgagacctcgcttgccgaggagggtaaaaatcttgctggtcattgttagctggcttaggcttataacatcacattgataagcatctgagcctaccattgtgtttacaggtgtcgagcatatgctgattcatctgtttgtctttgtcgatggtgtgaagccgacaccctgtcttacatatgg

SEQ ID NO: 726318 - DNA, 183 bp, Homo sapiens
agtttgcctttctatatgagtgcagtacatggcacctgtattagtccattttcatggtgctgataaagacatacccgagactgggaagaaaaagaagtttaattggacctacagttccacatggcgggggaggcctcagaatcatggcgggaggtgaaaggtacttgcttacatggctgcagc

SEQ ID NO: 726319 - DNA, 967 bp, Homo sapiens
gtttctttgccagagagtagtacttaaagatgaagagcgcaacaaaaagagaaaaagatcgagcgaagagagggattaatctcagtcgttgctggttcccgaagagatcatccttacgagcttcatatgcgccactgtgtatcacgcggggttcccctaggctatttgtcagccaagaggggtcgataatattgccggattccagttaacccgacgactctgggggaactaacgagaacgaataagcccgctaaccacgctccttaaccgcctcgaattcgtcaccgcccgctccctcccgggttgttccgacccactctgcggttataatgagaagcgctccctcaaggagctctttaaagcaccggcacaatgaagccccattctcggcaaaggtcctatccagcctccttttcgaaaaattctacagcccgaggtgttctcccacctcagaccgaaagtgtttgttaccccacccgccgggaccattcatacagttgcatggtggccccacctgtggctccagagccaccacaagggggccacaagacgctcctgaggcagtctcgtggcgttgtataaaataagcatcgctcacaaacctcggggtagaaaatgcggacttttccccgatactcggacacaagaagcgtacaggtgcccattaggtaagacggccagacaaatgttttaagagggccaacggggtatgttacaacttcgtcactgggaaaatccagtaaacctggagaccattaagttattgaggaaccattaacgttatgtgcaactcgagtcggaccacagccggttaggcagtacgatgaaaaagtatgattaggccagctagacacgactgtgcgcaactagtgcggcgatccagtaaacgacagcgtagctctagttttcactaaaagaaaccctgggtataattttttaatattaaaagaattcccccatcataaca

SEQ ID NO: 726320 - DNA, 104 bp, Homo sapiens
gatgcccagaaggaataatactatcgctgatcattatagctactctcataaccctgaacacccactccctcttagccaatatggagcctattgccatactagac

SEQ ID NO: 726321 - DNA, 431 bp, Homo sapiens
  misc_feature (20)..(20): n is a, c, g, or t
  misc_feature (53)..(53): n is a, c, g, or t
  misc_feature (204)..(204): n is a, c, g, or t
tctggaagcccctccctaanacatggccccccaagtaagggactgtggtggtncaagcccttggggaatacctgcaccccctggcagccctcaggaagtgcctcggccctgtccctgcatgtgtccccagcaccctgctgctgaaagtggctctggagggtcgctgagagcttcctttgtagcaagacctgtcagtgtctgcgnccctggggctgtggtacccaaatcacccacacacgggtggcccagaacaacagacatggattatctcatgtttggggggcagtagtctgaaatcaaagtgtcagctggggctgggtgcagtgtctcatgcttgtaatcccagcactttgggactccgaggcaggcagattacttgaggtcaggagttcaagaccagcctagccaacatggtgaaaccgtctagtact

SEQ ID NO: 726322 - DNA, 366 bp, Homo sapiens
cttaccatttcctaaattaggtattttacttaactctgaaatcagttatttcacttatttttttcttcatatcatgaacgttctaaaaatattccttataaatttgcatcactttttctcttgtggcttttgaagttactatattctaaacttgagaagatggtataaatcaataatagaagagtcactggggagctggtgagatggctcagtgggtaagagcactgacttcttttccaaaggtactgaattcaaatcccagcaaccacatggtggctcacagcctcccatagtgagatctgatgccctattctgatgtgtttgaagacagctacggtgaacttataataataaataaatcttaaa

SEQ ID NO: 726323 - DNA, 1426 bp, Homo sapiens
tctggaaaatgaaaggttccccatcataggggattcttaagaagcacgtttcctccaggtatatgtgcgggggtgctagcgtggagtgctctttgggcaataagtgtggtcacccgttgtgggcagtggaatagcacacagggtggggtgttcttcaaaaaggccaaccagaattaggccctcacgtgggccctccgtggcaaagccacgcggagtagccgtggcgcctcgtggaaagcgccaaactcgggttataaaaagagcccgtggagccaaattttcgctcgcccacacagaacgccgggaagaggggaaggtgtgggcaacattcacaaagtatctcagagtggcacttctctgtgtaaatacgcgcctctataatttctccacgggagagcgcgccccacaacagttatcacacgaggcggctgtgtatacacgtatatgagagtgagtatctcttctcccacctccctctccgagaatagagagaggtgcgcaacactctctgtgtgtgcgaagcgagtgtctctttgtgtgtgtgagggcgcgaagatgtgagctctttcgcgtggggtgtgtggcatatcaacacacacgcgagtgtccagaactgtggggcgagacgacagaatcagtgctatgtgtgtgtcagagatagcacccgtagtggtatcacaaagagagaaacgctctctctatatacatctcaccccgcccgccactattctctttctctatgatcgagctgcgttgaaaagctcactcgggtgacgcaagcgcgaaaagaagagggcgtgcacgctcgtgagcgccgttttgtgacatgggttagccagagagcggggaagcacacatttagagtctctcagagaagaactatatagtaaaagatttactgataaatatataatgaaacaaaaacaaactaaactacaaaacaagaagatgagcataagctgaggacccacaccccccacacagaaaaacgaggtgagcaggccaacaaaccccccttatccaccagagcacgcgggcggccaaaaaatggtgccacgactacatcagagaaagccacccccatcaagagaaactaggggagtaatagccagccagccattaattactgacccaacgaacaacagagcgggatctccttgctgcggcttcacatcagtcagatgtagagtggtaaccccccccctggtagatgcatgaagggtcgaggacgggccacaattaaaaaaaccgtctaacaggaggcgaatcacggtcgagagcgtgatgagacgaaacaacttttggaagacaacaaacatatccacacccccccgatgattgtagtgaagtatattctcctacatctcccttccgccctacacagataagagttgtgtgaccacaatacggtcgtatttgatggaca

SEQ ID NO: 726324 - DNA, 413 bp, Homo sapiens
accagtactcaaaggcaaggcacatggggcacagcaagcacaaagggcagcgtggccaagtctgcagctcttgggcagtgggtcgtggcactctgtgcaccattcatcccatctgctcaccccacgcttccttcaggctccccaccctcgtggctcagcttgcagcaggcaaagcacgatggtccaaggtcacatgtctctctctccatctgcacttagggcacatgagcatttttctcactccccacaggcttgggactctcccttcatcaggcagtgtctcccaccatgcccaccatccagcaggaagtccagcaatacaacctccccaaggctgcaaaactcacagctggcagcgtcagtcacatggtccagtcaacatgtctttcagagtggctggcagcgtgcacagg

SEQ ID NO: 726325 - DNA, 196 bp, Homo sapiens
cacgaggagtgctgggaccatcccgtaattttgcataggaggctacatttgatgttaagaaatgtgtccttcaccgggtggaataacggcctcatgtcacaatagtgctcaccatggaagatgggctcaagtactacaggatgatggagactgcaggccgaatggaggtgaaaggatatcagctgtatcaacagaa

SEQ ID NO: 726326 - DNA, 277 bp, Homo sapiens
gggtttttttcccccccccccccccccaaaaagggggggggtccccccccaattttttttttaccccccccgggggccccggggtttgggcccccccctttttttcccccccccccaaatggggcccccggtttttttttttttttccccccccggggggggggggcgccccccccccccccccccccgggtttttttttttttttggggggggggggggggggggggggggggcctctccccttttttttttttccccaaaatttttcccctttta

SEQ ID NO: 726327 - DNA, 233 bp, Homo sapiens
gtggcaggtgctgtaatcccagctacttgggaggctgaggcacgagaatcacttgaactcgggaggtggagattgcagtgagccaagactgcacaattgcactgccgcctggatgacaagagcgagactccgtctcaaaaagaacaaaaaacaaaacaaaaaagatggggagattacttgcgcctaggtgttcaagaccagctgggcaacatcacaggaccctattgctacca

SEQ ID NO: 726328 - DNA, 235 bp, Homo sapiens
ttagaggatccccttgggctctttcagggaagacagagacacatgcagaaacagttagggccggaaaggaacccccgggtgccatgagatccacaacctcacagaagccgggtagtaaccaagggagaccagagggttcccgggggggaccagcacctttaatcttgccagactcaaagaatgtacctccagggggcatcatgggccccgtgaggcaaaccccgagaggctgaag

SEQ ID NO: 726329 - DNA, 153 bp, Homo sapiens
  misc_feature (37)..(37): n is a, c, g, or t
cgtagtgtcttctctttctcctctctcatatatgatntcatacaaacagaaaatacaaatgacttctctagccaggcttccttgggcactcttttggcttacctgggtcacaatggaagaagatgaattgtcttgtgccacatataaaaatac

SEQ ID NO: 726330 - DNA, 149 bp, Homo sapiens
  misc_feature (127)..(127): n is a, c, g, or t
atagactctgtcaggcagccttggacctggtaccagcccagcagagacgactgtttttgggcactgtcacttcccctctgcagggatcggtcatggatgaggcgctgggagctctagggcttcctgnggtcccttcttgggcctgcagc

SEQ ID NO: 726331 - DNA, 444 bp, Homo sapiens
gagctggcccgccttgtggggctggcgctgatgaaaactgcttcggttgccatggggcctcctggatagggagagcgggccatggcacccaatcggggcgacatggccccagtgggttgatgaatggtgcgggtctaccgagtcagttctcggaagccagcacgatgtgggtggcactgcgatccgcttcggtgaagatgcggatgcgctggccattggttgcgacatagaacgattcgagcttggcctcggattggattcccgcgatgttcgcttcccattggtcagcgggaacatcgccccaatcgccgcgggcgtgacgccgcagaaactggaacggttcttcggtgccggcacgaatcaggcgatcgacgcctttgctgatgatcagcgccccgatggggaactgcagttggtggatgtaggtgtcaatcctgatcgacg

SEQ ID NO: 726332 - DNA, 501 bp, Homo sapiens
attcgcggccgcgtcgactacagtggtgtgagctcctgagctcagacaatcctcctgtctcagcctcccaagtacctggaacaacaggcatgcacctccatgcctggctaattagagatgagggtctcactctgttgcccaggcttgtcttgaactctggggttcaaacaatctgcctgccttggactcccaaagtgctgaaattacaggcatgagccacctcatttgactttgttcacattctttactaatctgtttgtttgtttgttttttgaaacagagctgcactctgtcacccaggctggagtgcagtgacacaatcttggctcactgcagcctccacctcccaggttcaagcaattctcccatctcagcctcccgagtagctgggattacaggcgcccggcaccatgctggctaatttttgcgtgtttagtagaaatggggtttcaccacgttgacctggctggtcttgaactcctgacctcaggtgatccaccg

SEQ ID NO: 726333 - DNA, 440 bp, Homo sapiens
ccattatggccggccaggtagggattggtccattaatttaatcggcaaaggatattaaatccttggtaataataacggtccaaaagtggggcctatgaataatcggaccagcctatggccccagtaaaggtaaggatccaggaaccacagtttgtaaatgaccaactttccttggttaagttttagttttagcaaccaccacaaatatgttttaggtaccatcgttcaggtttaagtaccatcgttcaagtggataatctctggataggctctgttgttgccattttgcagggatccaccagttccattcatagattaaacctttaattttaactaatctgggccataagtggccattctttaacattccacatgatttaaaggcctacgtttggaaattttcctttcctaaatggcccagagttatcagccggattata

SEQ ID NO: 726334 - DNA, 184 bp, Homo sapiens
  misc_feature (170)..(170): n is a, c, g, or t
ggtcgttgaatggcccgggctcctcaaattgctggctactgcaggagggtcctatagggaacatgccgtctccgggaccacgcgacgccttccgtccaagcccctgtgctgggctgcagcattctcagagaccacgcgtcactcgagattcttgcgcgtcttgtaccacngtccagtattctgg

SEQ ID NO: 726335 - DNA, 625 bp, Homo sapiens
gagaaagcaggcaaccaccatgtcatttgaaaacagtttcatcgggatataattcgggggcatacagtgaatccatttaagatactctgacccatggatcccctgggtgcagccaagccacaatggccatggcgccgctgtctggccgcactgctatttcagcgtgctggtggctgtgtgtttcttctcctacctgcgtgtgtcccgagacgatgccactggatcccctagggctcccagtgggtcctcccgacaggacaccactgggagccgccgcgagacttcatggtcctgggtatggagcgatggacgtaggaaatcaccatgaggctctgtggccgctagtcagagatggtgcccgggacagagactggcaatcgtgacgaccgcgaaggtgtacccacaggcagacacgggacatcgtgcaccgacgtgggactatcatgtgcgcaaaccctaagtcagcgcctacaacaccgttacacccgaggccgacagggggccagccgctggactctggtggtcaaactatggagccacgcacccttaactgccaagccacctggaaggcccctggaaagatacctttcactctcaccatggctccttagccgcaggcgactcc

SEQ ID NO: 726336 - DNA, 1037 bp, Homo sapiens
acttctacccgttggcaaattttttacacactgtttttttccctttaatcaactgtaaactcgtaaatttcttgtttcaaacattgttggtcttctctactagtattaatttcttttcagctttcgtaagaataccgaatttttgtcgtaatttgccatatcttgtaactcacttttacggactactttctataaaacgcttcaagaatattcaccattgaaaattactattctatacagctaaaattgatctacttttagatctaaggaaatactacagagatatcttcatgggttcagtaacttttcatcagtataacattgggcacggtacagagtgattgtcacataaggtactcgaagatttatttagattaattctattatttacagtaaccttgaattcttctgagttttgcatgtattaaattcaattgaatgcttgaacagtgaagagtaaagtatttatctgaaagaagtttctgggttaggagacagtaatgaatgtatccatttgtacatggtttacatgcttgctggatgcttctgtaaacattttcctgtatgtctctaaacttgtcgtttcagcaggactgtaattgcccttgtgtcgtagttataaatgagtcatcatctggtcctttgtgaaatggaattcatggtattcttctgtcaacgttttcctgaagctgtttctcggacgagccacacatttagaatacagacagctttcctgatcattcgatgttattgtcgcacctgatgttcttggtctaaaaggaacttattggccacaagtatattttatcttacttcttgtagatgtttagccttgtatacgttagaagtgctcttacatgatgactgtcgataagctgttggtcccatttactgggtttggggggcttgttataagatataggatatgaagaatgcaaaatggttgatcgttcaaactgtccagctctgatccaataccatgttactgatagtacttccctagtatgatattataccgtagcatacaatgtcaccgg

SEQ ID NO: 726337 - DNA, 275 bp, Homo sapiens
aatccccagggcctcaaagtgaagggtccgttgtccaatgatttttaaagttatgttttcaaagaaaaaaaaattccttttttcctttttagcccatttaatattttgagggggcctaatccctcctttgccttcgcccctttaaaaaaggtgttttgtttaaaaactggacggccgcttaatttaaatttgccttggctaagttttaggggatttataaaagggggaccccggttttgaaaattaactttttttttgcccttttcaaaaacaca

SEQ ID NO: 726338 - DNA, 525 bp, Homo sapiens
acagcataaactatttatgaaataataactcagatacagagattacttcctattggccttacatatgaatataaagaaatacatattatgaacatgagcatacttattttataattatgtaaatgtttgtgtaatgttatatataagtgcaataaagtcatgcttatacatggtctcaattcatgcttctaaaaaccactcaatgtagtcattatcatatgttaataaataatctctgaaaatgtgcttctagtagttgcacaatatcccatcataaagattgtcatgctgtttttaagtcatacttttgagtatataagttatatctgatatttttctgctacatatatactattataaatctaatagtagctgattttttgtcaacacatatgattgtttcctcacaatagtacaagagttggttgtaactttatttccttccaacatttatttaggttcagcgggtacatgtgcaggtttattatatgggaaaaatgtgtgtcaatgggatttggtgtacag

SEQ ID NO: 726339 - DNA, 147 bp, Homo sapiens
gtaccgcttcacacatccctgagctgacccttgtcattcttagacagcttcagtccactggccaggcaccctgtatatgccaattcaagaagagggccaagaaatcagacccaagtgattgttccccgctaagtgattgttcccgct

SEQ ID NO: 726340 - DNA, 112 bp, Homo sapiens
gtgccttctgctgctggaactccgaaaatgcggggaaccacaggccatactgtttactgatgataaggaaactattggtatatagacgagccccatatcacgtggcaccgcc

SEQ ID NO: 726341 - DNA, 387 bp, Homo sapiens
cgcatcaaatactagagagcactgagttactggtgactcgtggtggaccgcagctcatctagatggttgttggtcatagctgcataggctctgtgttgtagctttacgaaggaggtaccatagaacacaatgccagagatgtgtgacttagttggagcaataatatacttgcagcctagagcaaaaggccaagctgtcctgagagatagaacagtattcccaaattctaactagactacaagttaagcatatatgttgcttgtaggaatatattgacaattgcaggcacagtattccagtcacgtcatataaatgcaagggcctcagcttggggactctgaagaactgcagtgcgtgtgcaagctctcaatctcacatgtcgcttcc

SEQ ID NO: 726342 - DNA, 294 bp, Homo sapiens
tctttccccttttaaagggaaagctgcaaatccccttaatttgccataataatggcaaaaggagggaagggggttttttttgaaaaaccattggggtatacaggatggcttggcaggtaacaaccctttttctacaaaatctacttataaaaaaaattttatgtaaaaaccccattctcctcaccataatcaccataagggccaaattttaatttggtatccatttggaagggtggcttggaaaaacccaactaattttttatttaaacattaaccctattttttttaaagcaa

SEQ ID NO: 726343 - DNA, 335 bp, Homo sapiens
  misc_feature (69)..(69): n is a, c, g, or t
  misc_feature (335)..(335): n is a, c, g, or t
cccctgaaactccagtttttatatgtgctacggcgggggttgttgttctcctggacaaacagggtgtangaggtttgtgtgaaggcgggggcgttgtcgttgacgtcagacacctgcacagttatggtgtgctgggttgtgagcctgggtgtgcccaggtcggtgactgtgatggtaatgttgtactctgctgttgtctctcttgtccaacggtttttgtgataatagggtgtaaaagttttacccataaagtccttagaagaacggcataattgtcttggatggaaccaggtatttttccaattttttctgatttaagatttaatactcgggan

SEQ ID NO: 726344 - DNA, 816 bp, Homo sapiens
ttatttctatgttttaatgtaggataattctgggtaaatgtgtatgaaatgtcctggtacccgttttagtaagatatctggatactggcacgtgtgtcactgcgtcagtcctaatctgttaatttaacatacttcaattacatcacgacacaacacacacacgcgatattgtgccatactacgcgaatgactacggcacagaacttagaaacatggtacaaaccactttgcccttgtgggggttgaaacttggaaggcccccagtcggtcctccacctcacatccgtgccccagaggcttggatggaccttgtctagtgtcagttacagtgtcccttcctgggaatgtgacatgaggtgccggactggggccaggctcagggggcagaggtctggacacaagggacctggcgaggtgctgcgaggccagggaagccttgagtttctggcaggtggctgagcagtgggggagcatttgttttgtgggtgtctgtgtgtgaggtcaccctcaaactgcaccgccggccagataccctcctgacctccgaggacttgctctggtctctctggtggctacaaccccagagttttaaggacttggaaaggaaagcacaatcagagaagaaaacagcccccaaaccagcaggagtggcataggcacatggacacggcctggagcgactgtgcactccacccaagcaaggctacccagggggcctgaatttctctctcactgtctcattttgataaaactgcctgcagcggctctgaccccatggggggcctttttacatactgcgaggcccagctttctagg

SEQ ID NO: 726345 - DNA, 82 bp, Homo sapiens
gacattcggattgctcctgctgccccacacacactaacccaaccatcttggggtgtactccctgccagaccaacaaatccct

SEQ ID NO: 726346 - DNA, 192 bp, Homo sapiens
aaataatgggctatttctctccccgagtctttttttttaaaacccaccgtggttcctcagctaactgcattccctacccaggcagagactgtcctatgcctcgagcttcccaacgagactcagaccgcgacccagcccccgtatttatggaatggcaaaataaataaagccccaacccctcggtttttgtga

SEQ ID NO: 726347 - DNA, 750 bp, Homo sapiens
tttctccacatccccccccacgcggcatggtcgcggcttcgcatgacaccctccaccccgcgggtcaagacgtttctccgcccggggacaccccttctcccatgtccacttctccccctcccgcccccccacgggaggttacgctgcgggggggggccggggggtgggtcgcctcctctccactcccgggggtgttgagttcccccccctcccccacacaccaaaaaaacggggggtgtgccccgggcccgcacgtgggttgggggcgcctccacattggccccctcttctccctccagggggggggcaaaccacatacaacaacacgcaggggcccctttttaggcccaggcgggggatgtggtttttttaaaaaaaaacccccgaaaaaccttctgcttttatttctttcacaagcgggcgaatttacaaccccctccccccgggaaaacagtttttttttgggttttccccccccaacccccccccccgggggggttggccccccccattgccccgggctctaacattaagaggggttccccgtccaaggccctttccgggtaaaatttcccccatctcccctccctttttttttcccccccccccgcccctgggataaaaacaaccggggtttgttttttttttggaaaccccccccggccctttttttttttttttttttttaaggtttcccccccccgggttttttttttccccccaaacccttttttttttttttggggggga

SEQ ID NO: 726348 - DNA, 310 bp, Homo sapiens
agtgaggctgtagttccttcccctggagcacctgtgtggtcaggcccctgctgggtgcctggcttggtgggtgtgcggtgtgctttcctctctgggatgctcgtttttgcgtgtgggcttggctggtgtggtccgggacccctgcgtgttgcttccctctcctgcctggctgtctcgccccctttcttctccatccctagctctgagccctgggcctgggggctgtgggcggcgctgtctctggtgctgggctggcccgtccctttgcgcctctctctttgccccttcccctctctcttcccagctctgg

SEQ ID NO: 726349 - DNA, 500 bp, Homo sapiens
gctcgacagacaattctgtgaaggcaactgcgatgtctgtggactgtcttgggcagcatgagtgctttctggacggagctctctgtcacccaggctggagtgcagtggcatgatctctgctcactacaacctctgcctcccgggttcaagcaattctgcctcaacctcccgagtagctgggactacaggtgcacgctgccatgcctggctaattttttgtattttagtagaaacggggtttcaccatgttgcccaggctggtcttgatctcctgaactcagacaatccacccacctcggccttcccaaagtgcaaggattacaggcatgagccaccgtacctggccatatctttataatagagtaatttagattcctctgggtacataccctataatgggattgctgggtcaaatggtatttctgcctctaggtctttcaggaatctctcacctctcctactcaacatagtattgaaagttctggccagggcaatcaggc

SEQ ID NO: 726350 - DNA, 433 bp, Homo sapiens
  misc_feature (121)..(121): n is a, c, g, or t
  misc_feature (169)..(169): n is a, c, g, or t
  misc_feature (183)..(183): n is a, c, g, or t
  misc_feature (196)..(196): n is a, c, g, or t
  misc_feature (230)..(230): n is a, c, g, or t
  misc_feature (233)..(233): n is a, c, g, or t
  misc_feature (263)..(263): n is a, c, g, or t
  misc_feature (285)..(285): n is a, c, g, or t
  misc_feature (303)..(303): n is a, c, g, or t
  misc_feature (341)..(341): n is a, c, g, or t
  misc_feature (387)..(387): n is a, c, g, or t
  misc_feature (412)..(412): n is a, c, g, or t
tcacttatgtttattttatgaaagtgaagacaagcttattttatggaaatgttaccctactttcttgaactgattaagaaaaaagtgatttctttctcattagtatagtggtattaaaatnaaaagaagaaaaaagaaaattaaattatttttcaagggatctcctcantaaataaaaatgcnaagtatttcctgntcagtgcagagaaagacctcttaaagtatattgnccnaaaggaggagaaaactttttacctctaggnttcccctttggggaattctcgntggttcaggtcactggcncttaccgtggcttctttagaggaaggcttctttctttnaaactttgccccaaagtgccacccttctcccctaggtatgctctgngcccatgtagtggacctatcccccnccattacccccaccctttttt

SEQ ID NO: 726351 - DNA, 915 bp, Homo sapiens
aggttcctggacctacttccccgggaggaggatcagcgctgaggagcggcctcaagcatgagtattgccgcgagagccccctccccatcgaacccgtccgatgttccgcacgtggccgccaatagcgacgcaggagtgtgtgaagcgttggcaccgagccccggaggccccgctgcaggggaggtctgggctcatccgccgagtctgttggtgaactacgagcttgtgatggagacggggcttcccactcctttccaaccaactgaagactctcgtgcggccgtctgcctgctgggtccccaggtttcagcgctcaacgttcgtgagatggtctgcgtggatcccccgctcactgggagagtagactcgagccctggcgcacccacaaggcggtggcctactggcgggtatgcgacgcgtgccgatgagactcgcaaactccttcgggcttcacttctttgcctccaatgtagcgctaatgcgtactattccgtgtgtgtacaatcctgtactagattgtgctcatctcccgctatgtatgtcgaggaaagagctggtgctattctcctgtgaacgttgccctgggcttcttcgggtgtgccctaccgttgggtgcacgccctgaacctcccagaccccgctctcccaactcctcggatccgcaccggggctgggtggttccgtgatgtgtacacggcacgctgggaacccggcgggggagaatgaccttcacggactggacgaccgggtatgtgtggccatgaacgacgaccgctggccaacccgcgcaccagaacaaccctgcagagagcccgcgccaaaccgcgcgaccgcggcccaactgcaaggaaaacccttctaagggggacacaagaacgacaacacaaacacacacaggaacacgtctgctacaat

SEQ ID NO: 726352 - DNA, 828 bp, Homo sapiens
  misc_feature (28)..(28): n is a, c, g, or t
gcgccggactcggtttctcctgcggcangggcgctccggtttcctctccgcatgacatgctccgaggagtcatcttcttgcgtgatctcctgacttctggtgacctggtctgaacgtgttggtggttagctcgttctaggcaaccaggcatgagctcccagattcgtcagaattgttcgattccgatgtggaggctggcgtgaacagactggtcaatttgtacctgcaggcctcctacattgctacctctctctgggcttctattacgaccgtgatgagtgtggctctggaaggcgtgagccacgttcgtatccgacgaactgtatcgtaggagaagcgcgatggcgctatcgagcgtctcctgaagatgcaaacatcagtgtgaggagcggctctcttccaggacatcaaggaagccagctgaagagtgatgtggtggtaaaaccgccagacggccattgaaacgcttgcatgggcctggagagaaaagctgaatcagggcctttttggatcttcatgccctgtggcttctggccgcaatggaaaccccatctctgtgaactttcctgggagactcatatctcaatgaggaaagtgacatttcatcacgaagatcggggttgaccagcttgatcgaaccttgcagaggtttggtggcctggaggcttggatgtgcaagtatgtcttcgagagggctcactcttcaggcggagttagagccttttgagccaaggaattttgagggcctgcaaataaaggggaaagcaaaggcatactccagcaaaggaggaatttaaaatctaaaactggccaaggaaaagcttgaga

SEQ ID NO: 726353 - DNA, 1369 bp, Homo sapiens
ggtggcggcgtgacctgtacagtcccagcgtattcgggaggctgacgggcagaaggacaacgggttgagactaggaaaggcggacgtggcggtgacgctgagaatcgacgaccaggtgcgctcatgagcctgagtcaacactggcagacaacgttcgctctcgagaagagaccaaccgagcacgcagaccaacaagcgaaacgaacaagaaaagcctagcgagcggagagagagacatgcgtaagtagcagacccgtccaagacaatgaagaacacacaatcgtgtacctccaatagagattcctgggtgtataccatcagtcgggcaacgttgatcagttcagcggacaacacttcttgtacacagggccaagggtcggcgtgctagtgaaatcactggcactggtcacatcgtctggagacctttggggaagcgggtgaaggcgcgggggacgggaatcctaggcatggaagaagctcccgtggtgcataacccagatgctgggccacgccaatggactgaacaacaccactaatctactaacataaaaggacatcaacaaaacgcaagggcacccagaggccagtcatgtgagacaaacatgacccatgataaattcacccaggaataacatctgagagaaaacgactagaagcgcgattgacgaacctggccatcgacaccccgggaatcggtgaaacgggattgcaaggcagaggcccaaaaattcggcgacacacagggcaaacttcgcagctcatgggaatggagaagcacggggataaacttcccactagacatcaagaaaacaaccaaccaaaagacaagggaagggaaacaaacaaaccagagtacgacgacgccgcaggggtacacgcagagagaagggcacacaaaaaacaaacacaagaggggcagaagcagacgccaacaacagagaaagaagaaacacacacacaggaggtggatcaaaacagagaaaacaaaacgaacaaacaagacaactgtagcacgggataaacacagccaaaaaaacaaaaagcaacgcagggcaaagcaaacgagagctcagacaacccacacaagagatagatcatgggcaccactggagaacaaaaactacgaacgccaaagaccagagccagcagaaaacagccccacgacacggtcaagagcaacagcgcaacaaaagacgaacagaaataagagacgcactaccacacgaagcaaaagaatccaaagaagacatagaacgcattacaacaccacactaagtagatgcaccgaagacaaaaatcacaacaacaacccaaactgcaagatgacaaagacaaagaaaaaggacgaaaaaacacactacaacaaaaa

SEQ ID NO: 726354 - DNA, 781 bp, Homo sapiens
  misc_feature (598)..(598): n is a, c, g, or t
gaggtctagtgggagatcatgaaaatggcatgaatagtgtgggatttctctaagattgttgatattaattccattagactcttatgtgagtgaagacgaagacttcccctgagtaagttcagacagcttgtgataacatttctacgtcgattcctcaggatttaactatatattcttgaaaacatctcaattttaaatgtttctttcaagatggtgaattaaacagagatagcccttcaacaggttgaactcagcatatgctgagtctgaaatggaaatgatgaagttagagaaccatacaacaatggtaatgatttcagaaacatggtgttgagcagaacaaagcagacacaaaagagtacctatggcatggcatgcatctgtatacgcgaaattccagaataagcaagctaacctatgataagaaagagactggctgggaagactgagagttcactttctggggtgacataatagtgtagatcttggctgggcatggtggttcacgcctgtaatcccaacgctttgggaggccgaggcgggcggatcacctgaggtcgggagttcaaaaccagcctgaccaacatggagaaacccnatctctactaaaaatacaaaattagctgggagtggtggcacatgtctgtaatcccagccacccgggaggctgaggcaggagaatcgctcgaacctgggaagcagaggttgcggtgagccgatattgccccattgcactccagcctggtacacagggagaaaccgtcgattcgagtatcctgga

SEQ ID NO: 726355 - DNA, 174 bp, Homo sapiens
ttgcggggtctcatatactgccatgcttgcatgatatggaccaaagaggaacgaagacgtgattatagcgggagtttcgttgctggctctagcagagtattgattaccactgacctgctgttcagaggatagctgtgcagcaggtttctatagtcatcaactatgagacccgca

SEQ ID NO: 726356 - DNA, 880 bp, Homo sapiens
  misc_feature (801)..(801): n is a, c, g, or t
  misc_feature (803)..(805): n is a, c, g, or t
  misc_feature (807)..(808): n is a, c, g, or t
gaggtctagtgggagatcatgaaaatggcatgaatagtgtgggatttctctaagattgttgatattaattccattagactcttatgtgagtgaagacgaagacttcccctgagtaagttcagacagcttgtgataacatttctacgtcgattcctcaggatttaactatatattcttgaaaacatctcaattttaaatgtttctttcaagatggtgaattaaacagagatagcccttcaacaggttgaactcagcatatgctgagtctgaaatggaaatgatgaagttagagaaccatacaacaatggtaatgatttcagaaacatggtgttgagcagaacaaagcagacacaaaagagtacctatggcatggcatgcatctgtatacgcgaaattccagaataagcaagctaacctatgataagaaagagactggctgggaagactgagagttcactttctggggtgacataatagtgtagatcttggctgggcatggtggttcacgcctgtaatcccaacgctttgggattacacgcatgagccactgtacctggccaaaatctcctaatgttttaagaaagtttacaaatttgtgttgaactgcattcaaaactgtcctgggccacatgcagcccgtcactcatgggtaagacaagctaagtataaagtaattatcttttcttttctttttgttttgagacaaagttttgctctgtcacccaggctagattgcagtggcatgatctcaactcactgcaacctccgcctcccgggtgacagagcgagactctgtctcanannnannaactgggattacaggcgcctgccaccacgctcggccaatttttgtatttttagtagacaggcctcaaatctg

SEQ ID NO: 726357 - DNA, 443 bp, Homo sapiens
  misc_feature (50)..(50): n is a, c, g, or t
  misc_feature (63)..(63): n is a, c, g, or t
  misc_feature (164)..(164): n is a, c, g, or t
  misc_feature (301)..(301): n is a, c, g, or t
  misc_feature (356)..(356): n is a, c, g, or t
  misc_feature (387)..(388): n is a, c, g, or t
  misc_feature (391)..(391): n is a, c, g, or t
  misc_feature (401)..(401): n is a, c, g, or t
cccctctgcacgcccagcctcccgaaggcgggatacaagtgtgagccacngtgcccagctccnattttgtttctttataataacatatacattagaatagcctgggagtataacctcatatcaatcaacaaccaattttaacctgacagaactaacactatgcnaaatccaaaaacctaagaatttgtaactcataatttcaattattcacaggacagcaaaacagtcaaatgcttatactctattttttacaaaactaccactgcctaatagtaatttatcttaataataaaagcagacnacacttgttttccgggcataaaaaaggatagaaatggtctaagttcgtttatccnataggccttattttataaatagcacacctcnntanatctcagccntaatggatatataacctacgcacaaggctgggcgtgcagtgg

SEQ ID NO: 726358 - DNA, 517 bp, Homo sapiens
  misc_feature (277)..(277): n is a, c, g, or t
gctctgttttccagagaaatttagttctgacccgcacttgcagactccaactagaaaaacaaacaaacaagcaaacaacaatcagaggtgattaactggacccattctcgattaactggacccattctcgattaactggacccattctcgattaactggacccattctcgattaactggacccattctcgattaactggacccattctcgattaactggacccattctctttcgaaggcagagcaagtatatcccttggggctctcaacccataccntgagggtcctatcaaaatatcctttccattcacttacaatagaacgaattccaagggaagttgttacaaacacaatttcccagtgacaccagcttcccaatgatgtttttgggtccctaggtgccccaggcacctatctctatctgcctttgcttcctgtagatatctgcatcctaccgtggtttttctatacctaaaggacaaaaattgtattcctgtgttggattaaataggcataat

SEQ ID NO: 726359 - DNA, 555 bp, Homo sapiens
gaggtctagtgggagatcatgaaaatggcatgaatagtgtgggatttctctaagattgttgatattaattccattagactcttatgtgagtgaagacgaagacttcccctgagtaagttcagacagcttgtgataacatttctacgtcgattcctcaggatttaactatatattcttgaaaacatctcaattttaaatgtttctttcaagatggtgaattaaacagagatagcccttcaacaggttgaactcagcatatgctgagtctgaaatggaaatgatgaagttagagaaccatacaacaatggtaatgatttcagaaacatggtgttgagcagaacaaagcagacacaaaagagtacctatggcatggcatgcatctgtatacgcgaaattccagaataagcaagctaacctatgataagaaagagactggctgggaagactgagagttcactttctggggtgacataatagtgtagatcttggcaatttctacaccatagagaaagttctaacactttgtagccacagtgttggctttcatttaatcat

SEQ ID NO: 726360 - DNA, 971 bp, Homo sapiens
  misc_feature (892)..(892): n is a, c, g, or t
  misc_feature (894)..(896): n is a, c, g, or t
  misc_feature (898)..(899): n is a, c, g, or t
gaggtctagtgggagatcatgaaaatggcatgaatagtgtgggatttctctaagattgttgatattaattccattagactcttatgtgagtgaagacgaagacttcccctgagtaagttcagacagcttgtgataacatttctacgtcgattcctcaggatttaactatatattcttgaaaacatctcaattttaaatgtttctttcaagatggtgaattaaacagagatagcccttcaacaggttgaactcagcatatgctgagtctgaaatggaaatgatgaagttagagaaccatacaacaatggtaatgatttcagaaacatggtgttgagcagaacaaagcagacacaaaagagtacctatggcatggcatgcatctgtatacgcgaaattccagaataagcaagctaacctatgataagaaagagactggctgggaagactgagagttcactttctggggtgacataatagtgtagatcttggctgggcatggtggttcacgcctgtaatcccaacgctttgggaggccgaggcgggcggatcacctgaggtcgggagttcaaaaccagcctgacctcaggtaatctgcccgcctcagcctcccaaagtgctgggattacacgcatgagccactgtacctggccaaaatctcctaatgttttaagaaagtttacaaatttgtgttgaactgcattcaaaactgtcctgggccacatgcagcccgtcactcatgggtaagacaagctaagtataaagtaattatcttttcttttctttttgttttgagacaaagttttgctctgtcacccaggctagattgcagtggcatgatctcaactcactgcaacctccgcctcccgggtgacagagcgagactctgtctcanannnannaactgggattacaggcgcctgccaccacgctcggccaatttttgtatttttagtagacaggcctcaaatctg

SEQ ID NO: 726361 - DNA, 131 bp, Homo sapiens
acgtgaggatccggcacgaggttgatcctcactgaaatagacacttactgcagatatgcatgcaatgcttctgccaagactaccatctgtggagtcatggaatgccttatccactgtcacagtattccata

SEQ ID NO: 726362 - DNA, 277 bp, Homo sapiens
tcgcccagcatcaggccgtggcgatagagcagcacgccgccgttcgaccagatatcgaaatggcccagccagacctgttcgttgatgagcgccatgacctcgaagaccgcgcccttcttgtcatcgggcacgcgaatatcgggcaggcagagaatctgcagaacgtggtcctcggcgcgccagatcgaacgaatctggtaattggcccagctgccctggatctcgcccagtatctcgtcgtccgaaacgaattcgaacgcccagccgcgcgcctcga

SEQ ID NO: 726363 - DNA, 608 bp, Homo sapiens
gaggtctagtgggagatcatgaaaatggcatgaatagtgtgggatttctctaagattgttgatattaattccattagactcttatgtgagtgaagacgaagacttcccctgagtaagttcagacagcttgtgataacatttctacgtcgattcctcaggatttaactatatattcttgaaaacatctcaattttaaatgtttctttcaagatggtgaattaaacagagatagcccttcaacaggttgaactcagcatatgctgagtctgaaatggaaatgatgaagttagagaaccatacaacaatggtaatgatttcagaaacatggtgttgagcagaacaaagcagacacaaaagagtacctatggcatggcatgcatctgtatacgcgaaattccagaataagcaagctaacctatgataagaaagagactggctgggaagactgagagttcactttctggggtgacataatagtgtagatcttggcaagaggaccgcttgtggccaggagttcaagaccagtgtgggcaacataacaagatactgtctctacaaataataataataattcatgttgaggtttatgatgagcttgcttctctcat

SEQ ID NO: 726364 - DNA, 1360 bp, Homo sapiens
  misc_feature (1007)..(1007): n is a, c, g, or t
gattcttttcacacctggcgagaatataaccactgtgatcacacactgttggtgtgacccgcagaaacgtcgtgggtgcaacccggcggggtgtagtgtctcacccgtccatcattagttgtttccaccacagtagccatcggtgttgaccatcttccacgtgctgggggtgttggagattttttttagtcgcgtccccccccaccaacggtggaggtgttcctggcatgtaccgccccgctcgggtttgtttcctctacgtttgtgggggtggtgacaccacgaccgttgtgtgatgcgagtctgtcccactccagagtgaggccaacgaccgtcgtctgtctttgttttcgcagaggcgctgtctctcttcgttgggtaataatacacccacacagtaggatgtttctgtggttggggtgccaccaccaccctgtgggagagctagaacaatggtctccgacccccccccctgctccctccttgttaagacatcgggcacccacgtttggggggcgcatctcctcctgatgattattccccggcgcaggctgacgatagaagggttctcaacagtgtgcggtcttatttgtgcgccctcaacactaaagatcaggggtgtggaccacccccctcctgtgggtgcccaccccgcccgttgttcgagacgccacgctttctcggggtgttgccactcctccctctcatctcttgctctcgtctccccccctgtcgcccccaaagagtgagggtgagacccactgttgcccgccccgcccccctctcttttttcgtcctcgccccccccattgtgggggggttctctgtggggggcaccacatttatggaaatagagggggagcgcccctccctccccccccgccccctttatggaaggggatattcttgtgtgaccatgatataatgcgcgccttcttctggagatttctgtaggttaatgcacaggggcgcacacgatatcacccccaatggggcacctatgtggntctccccgagaggggagtctctcccaatatttaagggggccacacccacagagttttatgtgtgcagccccacggcgcaccagcgcggcccaagcacactcacgcggagggagtgtccctcgggtctcgcccatctcttcccaaaaggccatcgggtgccccaccccaggcgggggcactccagacaaggaggcttctctccaccttccccggcatgtgccgcccctgtcccccgcacgccatttctcgcactactgcccctggtagtgataatcactttttaaaaattttggaaaacccggccctttttcccaaaaaaacacccaaaaccccccacaaaaaaaaccggggga

SEQ ID NO: 726365 - DNA, 1495 bp, Homo sapiens
cccatcgcgtcggatcgagcggcggtggcggtggcggctgagagggcggtcggcgggaagcggagcggtgacgagggaacgggaggaagcgagcgaggagcgcgcagaagcgctgcttttcgcgtcgcgcctgacggagcctgaatgcatgcccacgtgcaccccagtacgggcagccgcttggcctgctcggagaacaaatgcctgagatgcctcggtggcctcgacgaggccaattgtcgcgtcgtcaatgtcaggcaggcgagcgcaacctatgtccccaagaccaagaagcctgggcacattccgccgagcctcgccacgctgttgggcctattcgagctgaacagcccctgcggcaatgccttatccccgttcagttgaaccttattttggacaagccaatggacactctggtggggtgtgggaatctgccttccttttcttccaagaagcaagaaagcgcgggggacaggtgaaaaccttcggaaaatttcaatttttatttgcacccaaggacaacagggtttgtgcggtgggttaggggaacattcaggcttacggggcaaaacgtttcatttcgacacaattttggggccgttccaaggaagccgcccgtcgagtgcccattgtgtacaatattcagttgtggcccccaaagaagttagttcccgcgagggggacactttcacgcattaaggccgccaggtgggtggcccgtacgcgcagtattgtataaggatttttggggagaatggagaagctttcccgcaaagtgaaggggttatcagggacaccgtggttttacgaagacgactcagaaatagttatttagtggaaagcacagagaggtgagtttgttagtgaaagagtcaccagagatagtttaggtagtgaggggctaacatcatgtgtggggaacagaacgaacgagtagtttttgagacagatgaagtggagttgtgggggagtgagggcacaattttggtaagcattatgtggcgtgattgccaaagcggcttttttactcagggaacaggaaaaacatgttggggtgggaacacacataactatttccgtttggataaagacggattatcagcgtattccaccacctggttgttagtggacgacacataagtggggggagaaaagtttttcgaaagcgcagaagtcagtgttggtatacaaaaagtactaactagcgggcagataaagagggtaacgcgaagaataagtaatcagtgatgagcgtgttttgggaggacattttcttaaacgcgtttttgtagtatatcatgaagtcgatttatggggccgacacgtcgtcgcacgatatttgtggtggaaaacatttttttcagtgtggggcgagccgcccaccgaaagactggattatcaaagtaggtgggagaagcttttctagcatagcgaacggtcggagtaagtgagttatgtgagtaacatataatatgatacataggtcgataatacc

SEQ ID NO: 726366 - DNA, 262 bp, Homo sapiens
gaaattggcctaccacgccgcagtactgagtcatctattgccccctctattgatccccactccaaatatctcatcaagcaactgactagtcaccacccaacaatgactcatcaaactaacctctaaaacaaatgataaccatacacaacactaaaggacgtaacctgatctcttatactagtatccttaatcattctttacttgccacaactaatttctctcggcaccaatgccggtatcctcttacacgtcgacctgcagg

SEQ ID NO: 726367 - DNA, 140 bp, Homo sapiens
gtctgcccttacgattcacaccgtctgacattggtaatatctcatgtggccatatctagataaaaagaagaacaattacttttcacttctaattgttaaaacttccattttaaattagaatgccgttgttcttcgacgaa

SEQ ID NO: 726368 - DNA, 790 bp, Homo sapiens
gctttccgtggagctgtcgccatgaaagtcgagtctgtgcagttttatcgggtacaagatctagcccggacacgggaggcgctacgccaggaccgacgggaaggttgaccagtaatcttaatgcgaaatgcgagtctggcttgtcctttaccaagaggaagtcctcgcgcagataagactggactgtcctctacagaaggaacgtcacaagaacagggacagtcggaagaccattcaccagagaagaacccgccgatgcagtcgaattccagagggccatgactggtgcatctcttgctgatataatggccaagaggaatcagagacctgaagttagaaaggctcaacgagaacaagctatcagggcatgctaagtgaagcaaaaataggctaatgcaagctatctaaataggattgcaatgggtgctgctaaggcacctgcaaaggtcagcaccttaggcaaaagattgtgatgcctgtgacagtttcagctccccgagtgggtggagaaacgctaaagactggcgagatgagcatttttgagataacagattggcacttttatagtcctggaagcagcagacatcaaatgtccgagagtgtcatagcgatcagggtgccgcgaaaagcagcccggtccttggcgaacgggtgccctgtggcacatgcgcagtttctcaccggacccgaattgcgtatggatccgcatgtctgggacaatccgccccggtgacccctcattcggcccgcggcagtggccttgcacggaaaaccacggtttagcgtgaac

SEQ ID NO: 726369 - DNA, 300 bp, Homo sapiens
ctggattaaatacctcacatctgtttaccaaatcatatctccctttatgaactgtgtcttatactgcttaaccagagaaaatgtttaacctgtttgtagacttatacatatacaataaaagtattttccacatttttctttctctctctcttttattagagatggggtcccattatattgctcaggtagatcttgaactcctggactcaagtgatcctcccaactttacctccaaagtgctgggattacaggcgtgaaccctagggtgttaagagtataaattagtgcaaagagtaaggg

SEQ ID NO: 726370 - DNA, 1457 bp, Homo sapiens
  misc_feature (286)..(286): n is a, c, g, or t
  misc_feature (296)..(296): n is a, c, g, or t
  misc_feature (1012)..(1012): n is a, c, g, or t
  misc_feature (1266)..(1266): n is a, c, g, or t
gtgcagggcgtgggacagtgttggcggagcaagaagcgggtagcgggagacctcaaggcctgtgaggttgtggtctcggaagacagctcgtgtgcaggctagagacggatgtgtgccgatggatcggcgagagatgtcgtgcgtagcggacttgtcgacgcgttacgaaggtgttgctgccctgtacttaacgtgtataacttcgttctgcgtgccagcatctagcctctgcatatacaccattgtgtccttgtgcaccatatgagtgatgtaccggtggcgaagntagcacaggnctgatgcacgtagaccacggctccatgcgccgtacgcgtactcgtggaagacttgagatacgccgtggacatagtccgtagcgccgtgccatatcggcacagcataggggctaaactgccccgtggtggcccatgccggaaactacatattggtaacgtgggccatttgtgatttggaggcggtgggtcggccagcccatcaagcagacacagggccgtgatttgcctgctaatgcacaaggcgactaacacacttcgacttggggggaccccaaggggagctcagtaacgcggcagtggccactgccgcttgagacacggcgaggcgctcaggatagagcgacgaacgccaggctggagcgacactgtggccttgtgggatgtgcgacctatgcacttggtgcgcggaaaggggcacgcataaaaggggcctcttatacctagactgtcgatggttaatccccttgcgagaattggtggtaagaagaacggagaaactttccaatccattgaattgggcatacccagcaattcgtaggcaatttccaggagggaaagggagttaaggaggggaaacaaacttggggcgtaggaaaaggaggagaggttccattatcccaaacgataggggccatgaatttgaatcgggcggtggagacgttttgcataagcggtagggagcccgggggtgaaagaagcattggcacgccgcaacngggccctaaatctcaggggagaggggggccgccgaaaagattggcacccctgtggggggtcgcgacatgggagaaagtctttgacacaccgcaaagggtccaatcacatttacattgacgacaccctggaaaaaggggtcccgcaacccacaggtaggctaggttcgaggcggtgcatcagaacggcacggggctagaaaaggctcggggctttaattcatgccagcagaaagtaggagggtccacacaaagtnccaagggggggctgaatcgcgctattaccgccatgcaaaggacgcttggacacgctggcactcggacatggcacacattattggccattgtgaggacacaaagtgaaggagataacagctcgttaggggcgagagaattggtcgactaaaaccgacacgcaaccctcgtagcaacaggtatttgcgcgacc

SEQ ID NO: 726371 - DNA, 227 bp, Homo sapiens
  misc_feature (46)..(46): n is a, c, g, or t
  misc_feature (79)..(80): n is a, c, g, or t
  misc_feature (85)..(85): n is a, c, g, or t
  misc_feature (107)..(107): n is a, c, g, or t
  misc_feature (111)..(111): n is a, c, g, or t
  misc_feature (147)..(147): n is a, c, g, or t
ctgggcttaagcgttccatgcgccttggcctcccaaggcctcccangtgctgggatttttggtatgggccacctatgcnnagccncccatctccctcctcttgccancagntgccctgcggcaacttaagtcttcatgactttctcnccaattacaaaaaggctttattatattttgccaaatgttaatgcgctttcattattgtctcctaacattatttccccact

SEQ ID NO: 726372 - DNA, 1144 bp, Homo sapiens
gcgacagttaggcgcatcttctgtgcgtcgccagccgagccacatcgctgagacaccatggggaacggtgaaggtcggagtcgacggattgggtgcgtattgggcgcctggtcaccaggggactgctttcaacctctggtaaagatggatattgtggcccagtctagagtgaccccgttcgatatgacctcgaagcgtacatggtcttacaattgttccaaagtcatggattccacccaattggacgagaagttatccataggacgagccgctccaggacttgaagaacgggaagccttgtcaggtcgaatggaaaatgcccagtcaccccaatcttaccaaggagcgggagatccgcgtccgagaaatcagatgtggtggacgatagctggccgactggacgtgacgtcgctggaagtgccacttgtgcggtcgttactaaccgaagccagtgggaagagaggcctgggagcctacatgtgtgcatgggtggagagccgaaacacaagggatcaggtcatactcgtagcccccgtacatgtctagatgcgctcgccctagtgttctgatcaagtggcgatgtagaacccagtggacgaacgtatagacaacaaggcgcttcaaagatccatcggcgaatagcctccgggggccaccaaacttgtcttagcaggccctgggcaaaggggtcaatccatgacgaaaccttttggatatgcgtggaaagggacgtcatgaccacaagtcacaatgtgctatcaagcatggtcactccaagaaagactgttgtgataggacccctccggggcaacactagttgtgcggtggaataggccaggcggggcgctcgtccagtaaacgatgcactaccctgaccgcgtatcttggcaggctgccaagggcttgttgaggcagggtcattcccctgaggctgaactggggaaagcatcagcgtggacatgggcctttccgggagtccccaacgtgacaaccgtgtcacggggtgggactgacccttgccgtgtagcaaagaagttggcatgtatgatgacatcagtaaggtggtgaagcaggaggtcggagggccctctcaggggatcctgtgaaactggggcacactgggctcgttgattcacacgaaccg

SEQ ID NO: 726373 - DNA, 99 bp, Homo sapiens
aggctccaagcattaacgatatttgcgaggtcagcacggtgctcacgtgtcagaaggaacttgtacaaggaaggcatgcaccgccaatggtgaaataca

SEQ ID NO: 726374 - DNA, 423 bp, Homo sapiens
  misc_feature (42)..(42): n is a, c, g, or t
  misc_feature (47)..(47): n is a, c, g, or t
  misc_feature (175)..(175): n is a, c, g, or t
  misc_feature (227)..(227): n is a, c, g, or t
  misc_feature (270)..(270): n is a, c, g, or t
  misc_feature (335)..(335): n is a, c, g, or t
ttttttttgagttagggtctcgctctgttgcccaggctaaantgcantggtgccatctcagctcactgcaacctccacctccagggttcaagcaattcttgtgcctgaacctcccaagttgctgggattacaggtgtgagccaccacgcctggctaattttttgtatttgagtanacagggtttcaccatgttggccaggctggtcttgaactcctaacctcaagtnatccacccacctcagcctcccatgctgggattacatgcatganccactgctcctggcccgctctgtccttaaatagtgttattttaatttccatcccaaccatagganacactaatgtctaaacacctcattagggcaggcagtctactctgaaagtggaattgccttgtctaaggtctccttaatcaggattatt

SEQ ID NO: 726375 - DNA, 254 bp, Homo sapiens
gacatctattaaagggaaactgactggcatcaatatcaataaagccgtccagaggaccctgggaacaagctttttgcttgagcagctcgtgcaatttgttgccaaattggtaaacccatgcctgatgctccagatgtttatatccttcacaaggaatacttggctcagatggcctgttgctgtaagtttgcctgctggccactgggagccaactccaattgctggccgcttcacctcctggaaccgttcactaa

SEQ ID NO: 726376 - DNA, 685 bp, Homo sapiens
  misc_feature (79)..(79): n is a, c, g, or t
  misc_feature (107)..(107): n is a, c, g, or t
  misc_feature (638)..(638): n is a, c, g, or t
ggcagtgaatcgaactcgtgtacccaccactcctatagatcagtcaccactcctacgacctggcacccccttggatttnagcctctaggacttgtgcaagccaaccntcatccatgtctgatagcattcacatccgtgcccaatagagggacctgccccagcctctgtgtcccctccacacagtggggcctcttcactggcagtggaactgcatgcctgccatactgcttaacatcatccagttaggggccttggactgtgaatgcaccatacagatccctggctgtgatcaaacaaatcacattccctcacatgtgtttcaccccataaggcagaaactaccacccatccaaccctctggccttaccccatgaaacttccctttgaccttcgacctttcctcctaccccctctcaccttgccattgatagagattatatcccaaagccctctaaccatctaatcctgcctggtgtagtcactgactcctggcccctttgatccctgttctaattccttgaatctgtaatactgaccttctaacctccctctccccttacatattaaaaccgtgattccttaaagctttgacacttaccacctcccatgcctcctgactatttcctccccatcatccncaaccccaaaccttgctcttccagtatgagatgttctgacaactgcc

SEQ ID NO: 726377 - DNA, 721 bp, Homo sapiens
ggcggatagcggaccctagagagccctgagcaatgccccatccgccgtcctgcctgtgccatagttactcgatcctacaccccgggtaggagccgctaaggctgcctgcaagccggcaccctagatcaccatctaccgacaaaccatgatcagcgaggccgagacccatcagccgcctcggctgacccacctgcgaacgggcttcactgtgcgtcacgagactccgagcggagtgcggaacgacggacactagcggttccgccgagtgaccaggagagctgtcgttgccgccagtggcctgtcgttcggcgtgctcactgccgtgcggggtccttgctggttcctccgaccaagagaggaacctgggaggaaacacgataagaggtagagatatccacgtgtcagtggatccggcgattagtggtactgccatacatcttgagacgttttacctcgcaacttgagtaattttgtaacagaaaccaccgagagatagccatattaccatggaacttgacctgcagtgacatgatagccggtcccttcgaaccgtcctgagcaatgccaaaagaagcatgcctgagcgagtaaggtccggcacgaacgtaatggcaaatatctcttctatacagaaagactgaataatccgatcagtagtgctcggtaagaaagagcccattagaataggagaagtgtaagagcacctaggacgaaagaaacc

SEQ ID NO: 726378 - DNA, 161 bp, Homo sapiens
  misc_feature (1)..(1): n is a, c, g, or t
ngagagctgtacacaagcaactccaccttttattaacaaggtttgaatttgatttctatcacttgcatttaaaagagccatacctgagttccctagtggcctagatggttaaggatctggcattgtcactgctgtagtgtgggttcaatccctagtcaggg

SEQ ID NO: 726379 - DNA, 114 bp, Homo sapiens
ttgtagccttacggaaggcctgatctgtgtgcgtcttatcaccaatcagttcagaccgggttgatttgtacttgggaactgtaccttggctggttttgtttattaaaagagaaa

SEQ ID NO: 726380 - DNA, 541 bp, Homo sapiens
ttaccgtttgtaaagctatgctttcatacaaaatactacattcaattatttttaaagttgataatgcacaaattgaacactgttacagcaatcaagcacaaagttattacgaatcacacagcataagaaaactctgcaaataaacaaccccagagaaaactgtttttttttaacgtcacaacacttttaaccctgttttctacaggagagttaaattaaatcaaatcagttttctaaatgaagtctctaaagacaaaaccatcatacatatcccaacatagcttctacaactaatcacacaaaggtaataaaaaaaccaattcttatcacagaaaaacaatagcatataaaggttcttaatctataaatttaagtatttcaatcccataccacttcaaattcaaattatgttatgggagaatttactgtgttcagaaattacagattgctatttttctgtcagttatcatactgctacctttgcacattgctatttgacaaaagttaacaaactgatgaagcggtaatatctatgctgctg

SEQ ID NO: 726381 - DNA, 257 bp, Homo sapiens
ttctcgtacatgtctagggtgtagcctgagaattaggggacatccagtgaactgatagcctcctatggatggcacctacagctcctattgatagcgacatagtcggaagtgagctacaacgtattacgtgtcgtgtattacgatgtctatgtgcgtgagtttgctattacaatgccagtcgaggccacctacggtgaacagaaagatgaatcctacggctcagagcactgcagcagatcatttcatattgcttccgt

SEQ ID NO: 726382 - DNA, 153 bp, Homo sapiens
aggctaggtgggaggatgacttgagctggtgagttaacaaattagccaggagctggtttgcacactcccattatcttgctatcactgtaaccaactaatgccaaaagaacggttttgtaataaaattatagctgtatctacaacaacaaaaac

SEQ ID NO: 726383 - DNA, 566 bp, Homo sapiens
  misc_feature (15)..(15): n is a, c, g, or t
  misc_feature (28)..(28): n is a, c, g, or t
  misc_feature (62)..(62): n is a, c, g, or t
catccactggtgctnccaaggctttggncaaggtcatccccagagctgaacgggaagctcantggcatggccttccgtttcctacccccaatgtgtccgtcgtggatctgacgtgccgcctggagaaacctgcccaagtatgatgacattcaagaaggtggtgaagcaggcatctgagggcccactgaagggcatcttgggctacactgaggaccaggttgtctcctgcgacttcaacagcaactcccactcttccaccttcgatgccggggctggcattgctctcaatgacaactttgtcaagctcatttcctggtatgacaatgaatacggctacagcaacagggtggtggacctcattgcctacatggcctccaaggagtaagaaaccctggaccacccaccccagcaaggacactgagcaagagaggccctatcccaactcggcccccaacactgagcatctccctcacaatttccatcccagacccccataataacaggaggggcctagggagccctccctactctcttgaataccatcaataaagttcgctgcacccacc

SEQ ID NO: 726384 - DNA, 1697 bp, Homo sapiens
  misc_feature (3)..(3): n is a, c, g, or t
  misc_feature (135)..(135): n is a, c, g, or t
  misc_feature (210)..(210): n is a, c, g, or t
  misc_feature (378)..(378): n is a, c, g, or t
agngggggggctccgccaccacctcagctgcggaccgaggcgagatggcggccaccgagggggtcggggaggctgcgcaagggggcgagcccgggcagccggcgcaacccccgccccagccgcacccaccgtcgnccccagcagcagcacaaggaagagatggcggccgaggctggggaagccgtggcgtcccccatggacgacgggttngtgagcctggactcgccctcctatgtcctgtacagggacagagcagaatgggctgatatagatccggtgccgcagaatgatggcccaatcccgtggtccagatcatttatagtgacaaatttagagatgtttatgattacttccgagctgtcctgcagcgtgatgaangaagtgaacgagcttttaagctaacccgggatgctattgagttaaatgcagccaattatacagtgtggcatttccggagagttcttttgaagtcacttcagaaggatctacatgaggaaatgaactacatcactgcaataattgaggagcagcccaaaaactatcaagtttggcatcataggcgagtattagtggaatggctaagagatccatctcaggagcttgaatttattgctgatattcttaatcaggatgcaaagaattatcatgcctggcagcatcgacaatgggttattcaggaatttaaactttggggataatgagctgcagtatgtggaccaacttctgaaagaggatgtgagaaataactctgtctggaaccaaagatacttcgttatttctaacaccactggctacaatgatcgtgctgtattggagagagaagtccaatacactctggaaatgattaaactagtaccacataatgaaagtgcatggaactatttgaaagggattttgcaggatcgtggtctttccaaatatcctaatctgttaaatcaattacttgatttacaaccaagtcatagttccccctacctaattgcctttcttgtggatatctatgaagacatgctagaaaatcagtgtgacaataaggaagacattcttaataaagcattagagttatgtgaaatcctagctaaagaaaaggacactataagaaaggaatattggagatacattggaagatcccttcaaagcaaacacagcacagaaaatgactcaccaacaaatgtacagcaataacaccatccagaagaacttgatggaatgcttttattttttattaagggaccctgcaggagtttcacacgagagtggtccttccctttgcctgtggtgtaaaagtgcatcacacaggtattgctttttaacaagaactgatgctccttgggtgctgctgctactcagactagctctaagtaatgtgattcttctaaagcaaagtcattggatgggaggaggaagaaaaagtcccataaaggaacttttgtagtcttatcaacatataatctaatcccttagcatcagctcctccctcagtggtacatgcgtcaagatttgtagcagtaataactgcaggtcacttgtatgtaatggatgtgaggtagccgaagtttggttcagtaagcagggaatacagtcgttccatcagagctggtctgcacactcacattatcttgctatcactgtaaccaactaatgccaaaagaacggttttgtaataaaattatagctgtatctacaacaacaaaaac

SEQ ID NO: 726385 - DNA, 274 bp, Homo sapiens
ggggggggggcccccccccccccccttttttttttgggggggcccccgcccccccctttttggggggggggggggccccgcccccccctttttttgggggggcccccagggttttttaaaacccccccccaacggggggggcccccctttttttccccccccccccccccccccccggggcccaaaatgggggggggggttttttttttgttttttttttttttccggggggcccaaattttttttttgggggttaaaaagggggttttcccca

SEQ ID NO: 726386 - DNA, 1539 bp, Homo sapiens
  misc_feature (220)..(220): n is a, c, g, or t
tccagcgagcccaatgacgcgcgtgtgcgcgcttccggccccggcgcgccaggccgaagttcccgtggcgccgtgtgggtcggtgcatggcgctgggcccgggcggctgccgggacgtcgccgcttcccagggcggcgccggcgcgagaccgcggggacgcgaagcagagagttagagatgtttatgattacttccgagctgtcctgcagcgtgatgaangaagtgaacgagcttttaagctaacccgggatgctattgagttaaatgcagccaattatacagtgtggcatttccggagagttcttttgaagtcacttcagaaggatctacatgaggaaatgaactacatcactgcaataattgaggagcagcccaaaaactatcaagtttggcatcataggcgagtattagtggaatggctaagagatccatctcaggagcttgaatttattgctgatattcttaatcaggatgcaaagaattatcatgcctggcagcatcgacaatgggttattcaggaatttaaactttggggataatgagctgcagtatgtggaccaacttctgaaagaggatgtgagaaataactctgtctggaaccaaagatacttcgttatttctaacaccactggctacaatgatcgtgctgtattggagagagaagtccaatacactctggaaatgattaaactagtaccacataatgaaagtgcatggaactatttgaaagggattttgcaggatcgtggtctttccaaatatcctaatctgttaaatcaattacttgatttacaaccaagtcatagttccccctacctaattgcctttcttgtggatatctatgaagacatgctagaaaatcagtgtgacaataaggaagacattcttaataaagcattagagttatgtgaaatcctagctaaagaaaaggacactataagaaaggaatattggagatacattggaagatcccttcaaagcaaacacagcacagaaaatgactcaccaacaaatgtacagcaataacaccatccagaagaacttgatggaatgcttttattttttattaagggaccctgcaggagtttcacacgagagtggtccttccctttgcctgtggtgtaaaagtgcatcacacaggtattgctttttaacaagaactgatgctccttgggtgctgctgctactcagactagctctaagtaatgtgattcttctaaagcaaagtcattggatgggaggaggaagaaaaagtcccataaaggaacttttgtagtcttatcaacatataatctaatcccttagcatcagctcctccctcagtggtacatgcgtcaagatttgtagcagtaataactgcaggtcacttgtatgtaatggatgtgaggtagccgaagtttggttcagtaagcagggaatacagtcgttccatcagagctggtctgcacactcacattatcttgctatcactgtaaccaactaatgccaaaagaacggttttgtaataaaattatagctgtatctacaacaacaaaaac

SEQ ID NO: 726387 - DNA, 118 bp, Homo sapiens
  misc_feature (25)..(25): n is a, c, g, or t
caacccttttgtgatgacagcttgncgggtacggttgaatgtcaatgtcaatttgtcaatcatctcagaagcattcttgctggcattgtccatggctgtcatcctagggtttcgatga

SEQ ID NO: 726388 - DNA, 1612 bp, Homo sapiens
  misc_feature (3)..(3): n is a, c, g, or t
  misc_feature (135)..(135): n is a, c, g, or t
  misc_feature (210)..(210): n is a, c, g, or t
  misc_feature (293)..(293): n is a, c, g, or t
agngggggggctccgccaccacctcagctgcggaccgaggcgagatggcggccaccgagggggtcggggaggctgcgcaagggggcgagcccgggcagccggcgcaacccccgccccagccgcacccaccgtcgnccccagcagcagcacaaggaagagatggcggccgaggctggggaagccgtggcgtcccccatggacgacgggttngtgagcctggactcgccctcctatgtcctgtacagttagagatgtttatgattacttccgagctgtcctgcagcgtgatgaangaagtgaacgagcttttaagctaacccgggatgctattgagttaaatgcagccaattatacagtgtggcatttccggagagttcttttgaagtcacttcagaaggatctacatgaggaaatgaactacatcactgcaataattgaggagcagcccaaaaactatcaagtttggcatcataggcgagtattagtggaatggctaagagatccatctcaggagcttgaatttattgctgatattcttaatcaggatgcaaagaattatcatgcctggcagcatcgacaatgggttattcaggaatttaaactttggggataatgagctgcagtatgtggaccaacttctgaaagaggatgtgagaaataactctgtctggaaccaaagatacttcgttatttctaacaccactggctacaatgatcgtgctgtattggagagagaagtccaatacactctggaaatgattaaactagtaccacataatgaaagtgcatggaactatttgaaagggattttgcaggatcgtggtctttccaaatatcctaatctgttaaatcaattacttgatttacaaccaagtcatagttccccctacctaattgcctttcttgtggatatctatgaagacatgctagaaaatcagtgtgacaataaggaagacattcttaataaagcattagagttatgtgaaatcctagctaaagaaaaggacactataagaaaggaatattggagatacattggaagatcccttcaaagcaaacacagcacagaaaatgactcaccaacaaatgtacagcaataacaccatccagaagaacttgatggaatgcttttattttttattaagggaccctgcaggagtttcacacgagagtggtccttccctttgcctgtggtgtaaaagtgcatcacacaggtattgctttttaacaagaactgatgctccttgggtgctgctgctactcagactagctctaagtaatgtgattcttctaaagcaaagtcattggatgggaggaggaagaaaaagtcccataaaggaacttttgtagtcttatcaacatataatctaatcccttagcatcagctcctccctcagtggtacatgcgtcaagatttgtagcagtaataactgcaggtcacttgtatgtaatggatgtgaggtagccgaagtttggttcagtaagcagggaatacagtcgttccatcagagctggtctgcacactcacattatcttgctatcactgtaaccaactaatgccaaaagaacggttttgtaataaaattatagctgtatctacaacaacaaaaac

SEQ ID NO: 726389 - DNA, 474 bp, Homo sapiens
agtgtccacagcgggcggtcggtctgcgcctattctcggagtctggggtgcggacgacgcttcgactaaagatgtttaggccacagccctgtcattatataaatccagaaacaccgggctatgttggatttgcaaacctccccaatcaagttcaccgaaaatcagtgaaacaaggttttgcgttcacagctgatggtggtcggtgactcaggtctaagaaacctcgatctctcatagacagcctattcctaactgatctgtacccagacagcgtcgtacctggagcagtacaaaccattgacagaactgtccagattgaggcttcagccgttgaaattgaagagcgaggggtcaagctacgcctgacagtggtagatacccctggctatggtgatgctatcaactgccgagattgtttagagacaattatctcctatattgatgagcaatttcacaggtacctgcgtgatgaga

SEQ ID NO: 726390 - DNA, 301 bp, Homo sapiens
tgagatggagtcttgctctgtcgcccaggctggcgtgcagtggcgcgatctcagctcactgaggcctctgcctcctggtttccagtgattctcctgtctcaccctaagtagtatttaaggctgcagtgagccatgattgcgccactgcattccagcctgggcaacagggagggagaccctatctcaacacatacatacacagacacacatctataaaatctggcatgcctaagattcatgagtgaaatacactggtatagcagtccccatccagaaactgagcatcaccaggaccctggag

SEQ ID NO: 726391 - DNA, 442 bp, Homo sapiens
tgtcggtaggactcgttctacaaaaaatataaaatagcggcgtgtgcatgtctgtgtctcagctactcaggaggctgggtggaggacacttgtccggagtgaggctgcggagctatgtgtgcatgacccagctggtgcagagtgagacctgtctcaaaataaactaagtattgagggtgactttacacaatagaacaccacaccttgtctcatgccgtttcttaactccctaatagctccctagtccacacagttggctcaagccagattctgcaagtcatccttgataccgtcctcttcctcattcccttcaatctgtcatcaagacttgtcagttctacttctgaaacacttcttgaattcatctatttatcttcatctccatcactaccacctgagtcctggccaccatcttctcacctctggacttttggcacaggtt

SEQ ID NO: 726392 - DNA, 1304 bp, Homo sapiens
ttgatcagatgaggagtcgcttcttatggatgagcaaaagaagtggtttctcaagatggaatctaatcctggcaacgacgttgtgaaatgacattgttgaaatgacaacaaaggattttaaatattgtaaatattacctgaacttagttgataaagcagcaggatatatgagaggattgactccagttttgaaaagttttactgtgagtaaaatgctatcagacagcatcacatgctacagagaaatcttttattgttgtcttattttaagaaatgccacagccatctcatccttcagcacccagcaccctaccctgatcagtcagcagccatcaacatggaggccagaccctccaccagcagaaagattacgacttgctgaaggctcagatgatcattagcattttttagcaataaagtattttttaattgagatacactctggaaatgattaaactagtaccacataatgaaagtgcatggaactatttgaaagggattttgcaggatcgtggtctttccaaatatcctaatctgttaaatcaattacttgatttacaaccaagtcatagttccccctacctaattgcctttcttgtggatatctatgaagacatgctagaaaatcagtgtgacaataaggaagacattcttaataaagcattagagttatgtgaaatcctagctaaagaaaaggacactataagaaaggaatattggagatacattggaagatcccttcaaagcaaacacagcacagaaaatgactcaccaacaaatgtacagcaataacaccatccagaagaacttgatggaatgcttttattttttattaagggaccctgcaggagtttcacacgagagtggtccttccctttgcctgtggtgtaaaagtgcatcacacaggtattgctttttaacaagaactgatgctccttgggtgctgctgctactcagactagctctaagtaatgtgattcttctaaagcaaagtcattggatgggaggaggaagaaaaagtcccataaaggaacttttgtagtcttatcaacatataatctaatcccttagcatcagctcctccctcagtggtacatgcgtcaagatttgtagcagtaataactgcaggtcacttgtatgtaatggatgtgaggtagccgaagtttggttcagtaagcagggaatacagtcgttccatcagagctggtctgcacactcacattatcttgctatcactgtaaccaactaatgccaaaagaacggttttgtaataaaattatagctgtatctacaacaacaaaaac

SEQ ID NO: 726393 - DNA, 214 bp, Homo sapiens
aattgtcatataggctggccgtggtggctcacacacataatcttagcactttgggaagttgagtcaggagggccacttgagcccaggagtttgaaaccagactgggcaacacagtgagaccccacctctacaaaatattttaaaattagccaggcgtggtggtgcatgcttgtagtcccagctactcaggaggctgaggtgggaggataggagg

SEQ ID NO: 726394 - DNA, 2072 bp, Homo sapiens
  misc_feature (3)..(3): n is a, c, g, or t
  misc_feature (135)..(135): n is a, c, g, or t
  misc_feature (210)..(210): n is a, c, g, or t
  misc_feature (378)..(378): n is a, c, g, or t
agngggggggctccgccaccacctcagctgcggaccgaggcgagatggcggccaccgagggggtcggggaggctgcgcaagggggcgagcccgggcagccggcgcaacccccgccccagccgcacccaccgtcgnccccagcagcagcacaaggaagagatggcggccgaggctggggaagccgtggcgtcccccatggacgacgggttngtgagcctggactcgccctcctatgtcctgtacagggacagagcagaatgggctgatatagatccggtgccgcagaatgatggcccaatcccgtggtccagatcatttatagtgacaaatttagagatgtttatgattacttccgagctgtcctgcagcgtgatgaangaagtgaacgagcttttaagctaacccgggatgctattgagttaaatgcagccaattatacagtgtggcatttccggagagttcttttgaagtcacttcagaaggatctacatgaggaaatgaactacatcactgcaataattgaggagcagcccaaaaactatcaagtttggcatcataggcgagtattagtggaatggctaagagatccatctcaggagcttgaatttattgctgatattcttaatcaggatgcaaagaattatcatgcctggcagcatcgacaatgggttattcaggaatttaaactttggggataatgagctgcagtatgtggaccaacttctgaaagaggatgtgagaaataactctgtctggaaccaaagatacttcgttatttctaacaccactggctacaatgatcgtgctgtattggagagagaagtccaatacactctggaaatgattaaactagtaccacataatgaaagtgcatggaactatttgaaagggattttgcaggatcgtggtctttccaaatatcctaatctgttaaatcaattacttgatttacaaccaagtcatagttccccctacctaattgcctttcttgtggatatctatgaagacatgctagaaaatcagtgtgacaataaggaagacattcttaataaagcattagagttatgtgaaatcctagctaaagaaaaggacactataagaaaggaatattggagatacattggaagatcccttcaaagcaaacacagcacagaaaatgactcaccaacaaatgtacagcaataacaccatccagaagaacttgatggaatgcttttattttttattaagggaccctgcaggagtttcacacgagagtggtccttccctttgcctgtggtgtaaaagtgcatcacacaggtattgctttttaacaagaactgatgctccttgggtgctgctgctactcagactagctctaagtaatgtgattcttctaaagcaaagtcattggatgggaggaggaagaaaaagtcccataaaggaacttttgtagtcttatcaacatataatctaatcccttagcatcagctcctccctcagtggtacatgcgtcaagatttgtagcagtaataactgcaggtcacttgtatgtaatggatgtgaggtagccgaagtttggttcagtaagcagggaatacagtcgttccatcagagctggtctgcacactcacattatcttgctatcactgtaaccaactaatgccaaaaaaaataaaaaacaaaaaaaaaaaaaactgttgttgcgcccccccgcggcccccgagaagaagagctttttgagaaaccctatgagatgtgggggcgccgaggggacccccacaggaggaataagagagaacaagtggggcaaaaaagagcggaaatccactaaggaaagaactccggggagcacgaagcaacaagaggagaggaggaaatgaatgacgcacccaacaagtacaaacacaaacacgcccccgcgggcacaaacacgcacggagacgacgttatacgtgagaaccacgaagctcccaaagagagtgaggacataacgcgaagacacaatacgaacgggggctgtctattcaagcaagggaactaccaagagacagaacggagataactacaaatatagcccccccccgcgggtc

SEQ ID NO: 726395 - DNA, 1691 bp, Homo sapiens
  misc_feature (3)..(3): n is a, c, g, or t
  misc_feature (135)..(135): n is a, c, g, or t
  misc_feature (210)..(210): n is a, c, g, or t
  misc_feature (378)..(378): n is a, c, g, or t
agngggggggctccgccaccacctcagctgcggaccgaggcgagatggcggccaccgagggggtcggggaggctgcgcaagggggcgagcccgggcagccggcgcaacccccgccccagccgcacccaccgtcgnccccagcagcagcacaaggaagagatggcggccgaggctggggaagccgtggcgtcccccatggacgacgggttngtgagcctggactcgccctcctatgtcctgtacagggacagagcagaatgggctgatatagatccggtgccgcagaatgatggcccaatcccgtggtccagatcatttatagtgacaaatttagagatgtttatgattacttccgagctgtcctgcagcgtgatgaangaagtgaacgagcttttaagctaacccgggatgctattgagttaaatgcagccaattatacagtgtggcatttccggagagttcttttgaagtcacttcagaaggatctacatgaggaaatgaactacatcactgcaataattgaggagcagcccaaaaactatcaagtttggcatcataggcgagtattagtggaatggctaagagatccatctcaggagcttgaatttattgctgatattcttaatcaggatgcaaagaattatcatgcctggcagcatcgacaatgggttattcaggaatttaaactttggggataatgagctgcagtatgtggaccaacttctgaaagaggatgtgagaaataactctgtctggaaccaaagatacttcgttatttctaacaccactggctacaatgatcgtgctgtattggagagagaagtccaatacactctggaaatgattaaactagtaccacataatgaaagtgcatggaactatttgaaagggattttgcaggatcgtggtctttccaaatatcctaatctgttaaatcaattacttgatttacaaccaagtcatagttccccctacctaattgcctttcttgtggatatctatgaagacatgctagaaaatcagtgtgacaataaggaagacattcttaataaagcattagagttatgtgaaatcctagctaaagaaaaggacactataagaaaggaatattggagatacattggaagatcccttcaaagcaaacacagcacagaaaatgactcaccaacaaatgtacagcaataacaccatccagaagaacttgatggaatgcttttattttttattaagggaccctgcaggagtttcacacgagagtggtccttccctttgcctgtggtgtaaaagtgcatcacacaggtattgctttttaacaagaactgatgctccttgggtgctgctgctactcagactagctctaagtaatgtgattcttctaaagcaaagtcattggatgggaggaggaagaaaaagtcccataaaggaacttttgtagtcttatcaacatataatctaatcccttagcatcagctcctccctcagtggtacatgcgtcaagatttgtagcagtaataactgcaggtcacttgtatgtaatggatgtgaggtagccgaagtttggttcagtaagcagggaatacagtcgttccatcagagctggtctgcacactcaccctctccttccatcagagcatccatctaagccctaatgtgcgcctctgtatttgttttaaatctgtttatgtcctcaa

SEQ ID NO: 726396 - DNA, 580 bp, Homo sapiens
  misc_feature (25)..(25): n is a, c, g, or t
  misc_feature (65)..(65): n is a, c, g, or t
  misc_feature (78)..(78): n is a, c, g, or t
  misc_feature (81)..(82): n is a, c, g, or t
  misc_feature (105)..(106): n is a, c, g, or t
  misc_feature (128)..(128): n is a, c, g, or t
  misc_feature (158)..(158): n is a, c, g, or t
  misc_feature (167)..(167): n is a, c, g, or t
  misc_feature (171)..(171): n is a, c, g, or t
  misc_feature (184)..(184): n is a, c, g, or t
  misc_feature (236)..(236): n is a, c, g, or t
  misc_feature (239)..(239): n is a, c, g, or t
  misc_feature (246)..(246): n is a, c, g, or t
  misc_feature (249)..(249): n is a, c, g, or t
  misc_feature (260)..(261): n is a, c, g, or t
  misc_feature (271)..(271): n is a, c, g, or t
  misc_feature (275)..(275): n is a, c, g, or t
  misc_feature (281)..(281): n is a, c, g, or t
  misc_feature (291)..(291): n is a, c, g, or t
  misc_feature (294)..(294): n is a, c, g, or t
  misc_feature (302)..(302): n is a, c, g, or t
  misc_feature (308)..(308): n is a, c, g, or t
  misc_feature (341)..(342): n is a, c, g, or t
  misc_feature (356)..(356): n is a, c, g, or t
  misc_feature (358)..(358): n is a, c, g, or t
  misc_feature (378)..(378): n is a, c, g, or t
  misc_feature (390)..(390): n is a, c, g, or t
  misc_feature (395)..(395): n is a, c, g, or t
  misc_feature (432)..(432): n is a, c, g, or t
  misc_feature (473)..(474): n is a, c, g, or t
  misc_feature (480)..(480): n is a, c, g, or t
  misc_feature (488)..(488): n is a, c, g, or t
  misc_feature (491)..(492): n is a, c, g, or t
  misc_feature (500)..(500): n is a, c, g, or t
  misc_feature (512)..(512): n is a, c, g, or t
  misc_feature (516)..(516): n is a, c, g, or t
  misc_feature (568)..(568): n is a, c, g, or t
ttgttactaatctgtaaacaagtantgttcaagtagtatttagcactttttaagctattaagaanttgaagcatgcancanntcctgtggcgacccagcttttgnntcttgccttagtgtctaagtcngttaaaggcacttcatatgtgttgtttctngcattaacnattnttggtttaaaaanaaaaagttaatatagatgactggggtgagctttttttgttgtttctttttgntcnttcgttnttnttgtttatttnnttttgttttngtgntttttntgatgtgganttngggtgggngttgtngcgggtggctgtggtcctggcgctttgggaggnnaggacgggcggatnanggggtcaggagattgggacnattctggttaanatggnggaaccccgtttgggctaggatttggttggaatttgncgggggtggtggtgggcgcctgtagtcccagctagtcgggnngctgangcaggagnatnncgtgaacntgggaggcggancttncagtgagccgagatcgcaccactgcactccggccttggtgacagagcgagantccgtctcaaaa

SEQ ID NO: 726397 - DNA, 316 bp, Homo sapiens
  misc_feature (90)..(90): n is a, c, g, or t
  misc_feature (130)..(130): n is a, c, g, or t
ccccaggcccttcaggaaatggggccttgccttgcagccacatggccccctcccagttggggaagccaggtgagcttttccccttggggntggggctttgcccctcccaaaccaggcccttgtttccctngaaaggggccctggtgttttcccccccgcggtcccccccccccgaaatgccccgggggccctgggccctgccccgtccatgggcctttgcggggcggggcctttctggttttgttccctgcgggaccccaatgcccccccccctccctgccccatacggggggcccataaacccttgtagggccga

SEQ ID NO: 726398 - DNA, 1031 bp, Homo sapiens
tatgtgtctggtgctattatccggctctccgctttttctcgtgtccctagtttttgttttgtctttgtctgcccgagcctctctgtttgtttttgttgtgtcgcccttatctgattccgcgcactgcctcttcttcgcctgtcgtcgtgtcctggcgtgtggggcctagtcgttctgtgcctgtacgtccttgtgtcggttgtgtcaatcatcttttcacgtgtcttggcttagtgtttcttctttatggatctctagttacgtccagtttccttgtctcttgcaggtttagccgctttgctgtattgttgtgcatgtgatctcagcttcacgacttcacccttacaacgggtgctgaaggagtgctcccttcctctttggtggatacgtctttttgtgttattcctgtcattctgactttttttaacgtgtttggctcatcttccagcttatgttatgaatgtgacatatattattttctaccttggagcttgaagagggcagaattccgcagctctctgtcattgtgatgctgtagcatgtctgccctctgactggtacatcattgccattaactttcttctgggcatcacggcaaatgtcacgatgcccagactgtggagcaaggcaaccttggagtcagtccactctataaaatatggtaacacccattttacgaatttatagttttgtccgttatagacaacttcagtggttatattatataagttgtgttacttcgtcctagtaattaaattcgatcgtacaagatttgaaaatgtgttttgtttctactattcagaaactgcgcaactagggtaaggttggtatgaatgaatgtctttccttgtttctatgtacatagttcaactctttcgtttgttacatgtagacaatatccatgatatcagtggctgtgactcctctgtaccgctactggatgaataacctatcgcgtgggggtggcgggtgggtgcgggttgtgggtgggggtgtcgtggtgcggggggtgttgtggtcgtgtgggttgt

SEQ ID NO: 726399 - DNA, 1156 bp, Homo sapiens
  misc_feature (3)..(3): n is a, c, g, or t
  misc_feature (135)..(135): n is a, c, g, or t
  misc_feature (210)..(210): n is a, c, g, or t
  misc_feature (378)..(378): n is a, c, g, or t
agngggggggctccgccaccacctcagctgcggaccgaggcgagatggcggccaccgagggggtcggggaggctgcgcaagggggcgagcccgggcagccggcgcaacccccgccccagccgcacccaccgtcgnccccagcagcagcacaaggaagagatggcggccgaggctggggaagccgtggcgtcccccatggacgacgggttngtgagcctggactcgccctcctatgtcctgtacagggacagagcagaatgggctgatatagatccggtgccgcagaatgatggcccaatcccgtggtccagatcatttatagtgacaaatttagagatgtttatgattacttccgagctgtcctgcagcgtgatgaangaagtgaacgagcttttaagctaacccgggatgctattgagttaaatgcagccaattatacagtgtggcatttccggagagttcttttgaagtcacttcagaaggatctacatgaggaaatgaactacatcactgcaataattgaggagcagcccaaaaactatcaagtttggcatcataggcgagtattagtggaatggctaagagatccatctcaggagcttgaatttattgctgatattcttaatcaggatgcaaagaattatcatgcctggcagcatcgacaatgggttattcaggaatttaaactttggggataatgagctgcagtatgtggaccaacttctgaaagaggatgtgagaaataactctgtctggaaccaaagatacttcgttatttctaacaccactggctacaatgatcgtgctgtattggagagagaagtccaatacactctggaaatgattaaactagtaccacataatgaaagtgcatggaactatttgaaagggattttgcaggatcgtggtctttccaaatatcgttatgtgttaaatccaggagttgatgtacagccaagtcatagtgccgcccgacctgatgagcttttgagtgaggatatgtacggcgacaggataggatatcattatgacaagaaggtggacatgattaagtcaggcagttatgagaatatgagtgatactattgttcaagacaacaacactatgagtgagggagaattggacagaccacaggtcgatccgggtagggcgaaca

SEQ ID NO: 726400 - DNA, 425 bp, Homo sapiens
  misc_feature (33)..(33): n is a, c, g, or t
  misc_feature (398)..(398): n is a, c, g, or t
tatttttcccgtaagaagatgggggtttccctnaatgttgggcccaggctgggccttaaaaaccctggcctcaaggtgatcccatcccagtctcggcctccccagaatgctgggattaacaagacatggagccacccatgccctggctttttatttattattattatttttattttttatttttttattttttttgagacggagtcacgctctgtcgcccaggctggagtgcagtggcgtgatctcggctcactgcaagctctgcctcctgggttcgtgccattctcctacctcagcctcctgagtagctgggactacaggtgcccaccaccacgccaggctaatttttttaattttttttatttatttttatttatttatttatttttagtagattnttgggttcaccgtgttagccaggatgg

SEQ ID NO: 726401 - DNA, 182 bp, Homo sapiens
gagctggaccggcactctagtcaggaactgttgaaatgcccttggctatctaagaaatctaaatcaggctaggcactaccatgcctgtaatctcagcactttgggagggcaaggtgagaggactgcttgagctcaggaattcaagaccagcctaggcaacatagggagaatctgtctctact

SEQ ID NO: 726402 - DNA, 911 bp, Homo sapiens
  misc_feature (3)..(3): n is a, c, g, or t
  misc_feature (135)..(135): n is a, c, g, or t
  misc_feature (210)..(210): n is a, c, g, or t
  misc_feature (378)..(378): n is a, c, g, or t
agngggggggctccgccaccacctcagctgcggaccgaggcgagatggcggccaccgagggggtcggggaggctgcgcaagggggcgagcccgggcagccggcgcaacccccgccccagccgcacccaccgtcgnccccagcagcagcacaaggaagagatggcggccgaggctggggaagccgtggcgtcccccatggacgacgggttngtgagcctggactcgccctcctatgtcctgtacagggacagagcagaatgggctgatatagatccggtgccgcagaatgatggcccaatcccgtggtccagatcatttatagtgacaaatttagagatgtttatgattacttccgagctgtcctgcagcgtgatgaangaagtgaacgagcttttaagctaacccgggatgctattgagttaaatgcagccaattatacagtgtggcatttccggagagttcttttgaagtcacttcagaaggatctacatgaggaaatgaactacatcactgcaataattgaggagcagcccaaaaactatcaagtttggcatcataggcgagtattagtggaatggctaagagatccatctcaggagcttgaatttattgctgatattcttaatcaggatgcaaagaattatcatgcctggcagcatcgacaatgggttattcaggaatttaaactttggggataatgagctgcagtatgtggaccaacttctgaaagaggatgtgagaaataactctgtctggaaccaaagatacttcgttatttctaacaccactggctacaatgatcgtgctgtattggagagagaagtccatacactctagcatgtcttcatagatatccacagaaagcaattaggttggggaactatgacttggttgtaatcaagtagtatacg

SEQ ID NO: 726403 - DNA, 563 bp, Homo sapiens
  misc_feature (3)..(3): n is a, c, g, or t
  misc_feature (135)..(135): n is a, c, g, or t
  misc_feature (210)..(210): n is a, c, g, or t
  misc_feature (293)..(293): n is a, c, g, or t
agngggggggctccgccaccacctcagctgcggaccgaggcgagatggcggccaccgagggggtcggggaggctgcgcaagggggcgagcccgggcagccggcgcaacccccgccccagccgcacccaccgtcgnccccagcagcagcacaaggaagagatggcggccgaggctggggaagccgtggcgtcccccatggacgacgggttngtgagcctggactcgccctcctatgtcctgtacagttagagatgtttatgattacttccgagctgtcctgcagcgtgatgaangaagtgaacgagcttttaagctaacccgggatgctattgagttaaatgcagccaattatacagtgtggcatttccggagagttcttttgaagtcacttcagaaggatctacatgaggaaatgaactacatcactgcaataattgaggagcagcccaaaaactatcaagtttggcatcataggcgagtattagtggaatggctaagagatccatctcagagaaatgatgtttgctgtacatgcatgggcttagacaccatttagggggatc

SEQ ID NO: 726404 - DNA, 285 bp, Homo sapiens
taggctggagttgcagtagctctctcaaaatgaatgagatgaatgaaagaaggagagggaagggaagctcctctctcttcgtattcccagtctagcacccgcaaaaataagttatccataaacccccaacgtatattactgttctgttaactagttctgaacagaatgtacagtgtagggtgggcatggtgtgtcacgcctggtaatcctagcacatcgggaccgcagccgtgatcgcatcacaacccggccaggttttcttttccttttttttttttttttttt

SEQ ID NO: 726405 - DNA, 214 bp, Homo sapiens
gatctgaacatttaaaacctgcgcataatcagtcacatcgagtgccttgacactgactttaatcgtcggactatcggctaacaggtttgctttgagttgttctaggcgttcggtgcggcgcgcacaaattgccaggttatagcccatgcgagcaaaatgggtcgccatgcctgcccccaaccccgagcttgcgccagtaatcaaaatggtttta

SEQ ID NO: 726406 - DNA, 323 bp, Homo sapiens
tggtgcaccaactaggaagggtccccaggattggggagagccccaagattgagaacaataatgaacaattagtgtatgaagcagttgttagagacagcgtaatcacaaagcaaactgcgggcacaatgacctcattccacacgtagcagccttcagcaggaccctataaaactttcctccagcccttgcctcttggcaggtagccccttctctgctgagctgcccactgcaacatattttcacaatgtgctctaataaagtatgcccttctttacctacactatctggtggatggctttaccacctgcaaaactgaccctagg

SEQ ID NO: 726407 - DNA, 168 bp, Homo sapiens
aacagagaaaaagcctgagaacttgacattgttgagccatggcaccaaaacaaaatttgcttctcaaactttaataagcataaagaatcacctggagaatcttgttaaagtgcagattttgattcaataggtctgaggtggggcctgaaaggctgtagttccaataag

SEQ ID NO: 726408 - DNA, 493 bp, Homo sapiens
tcccccgtgcaaaaaaaacaacacagtgtaggggccccccccctcccgtgccccttcaggccccgggcagggaaggagggggcccttttttcccttaaccccctccttgagggggtgaaaacaaaaggggtttttgatgtttttccacctttccaaaaccctcgggttcaaaggccccccctgggtcccaccctgggacaggtttagttttttttccaaggggggccgggggaaatttatgccttttccaaattttcccccctccagttaacggcccccagggggcctgggcccggagggttgcccttaaaaatttggaaaaatttggtttggttaaaaaccccccaatgggggtaaattttttaaccggttttaaaaatggggccaagggctttttttcccctttggggggaaatttttatggtaaaggggttgccccgaaaggcccttttcccaaggttttttgggggatttaaaaggggggtgtttggga

SEQ ID NO: 726409 - DNA, 775 bp, Homo sapiens
tagcacaatagtgggaagatttataggtagaggcgacgaacctaccgagcctggtgatagcgtggttgtccaggatagaatcttagtgtcaactttaaagtttgcccgacagaaccgctcgtaaatcccgctgtaaagtttaactgtttagtccaacagaggaacagctctttggacacgtaggagaaaaacctgtagagagagtaagaaaatttaagacccatagtaggcctaaaagcagcctaccaatgaagaaagcgttcaagctcgaacacccactacctaaaaaatcccaaaacatataagctgaactcctcaacacccaattggaccaatctatcaccctagtagaagaactaagtgttaggtataagtaacatgaaaacattctcctccgcataagcctgcgtcgagattagaacacactgaactgacaattaacagcccaaatatctacagatcaaccaacaagtcattattacccgtcactgtcaacgcaacgacaggcatgctcataaggaaaggttaagaaagaagtatcaaggaactcggctagatcttaccccgcctgtgtaccaaaaacatcactctagcatcaccagtattagaggcaccgccgtgcccaggtgacacattgttttcacggcgcgggaccccttaccgtgcaaaggtagcatatcaacttgtccttaataaggggaccggttgaatgctcacgagggtcaggcggctcttactttaaccagtggaattggccggccgtgaaaagggggca

SEQ ID NO: 726410 - DNA, 1129 bp, Homo sapiens
ttccagaacttcagtctgccaaaaaacaggtcatggcctcgcatcaatagtgccacaggccagtaccagaggatgaacaagcctcttctagactgggaaagaaactttgctgcagtcctggatggagcaaaaggccacagtgatgatgactatgatgaccctgagcttcggatggaagagacatggcagtcgattaaaattttaccagcccggcctataaaggaatctgaatatgcagatacacactatttcaaggttgcaatggacactccccttccgttagacaccaggacctctatctccattggacagccgacctggaacacacagacgaggttggaaagagtggacaaacccatttccagggacgtcagaagccaaaacattaaaggagatgcatccgtaagaaagaacaagattcctttaccacctcctcggcctctcataacacttccgaagaagtaccaacccttgccccctgagccggagagcagcaggccacctttatctcagagacacacctttccagaagtccagggaatgcccagtcagataagcttaagggacttaagtgaggtccttgaagcagaaaaagttcctcataaccagaggaagcctgaatcaactcatctgttagaaaaccaaaatactcaagagattccacttgccattagcagttcttcattcacgacaagcaaccacagtgtgcaaaacagagatcatagaggaggcatgcagccctgttctcctcagagatgccagcctccagccagctgcagccctcacgaaaatatactgccctataaatacacaagctggagaccacctttccccaaaaggtctgatagaaaggatgtccagcacaatgaatggtacattggagaatacagccgccaggcagtggaagaggcattcatgaaggagaacaaggatggtagtttcttggtccgagattgttccacaaaatccaaggaagagccctatgttttggctgtgttttatgagaacaaagtctacaatgtaaaaatccgcttcctggagaggaatcagcagtttgccctggggacaggactcagaggagatgagaagtttgattcagtagaagacatcatcgaacactacaagaatt

SEQ ID NO: 726411 - DNA, 798 bp, Homo sapiens
gggaggcgacatggagacaggtgcggccgagctgtatgaccatggccctttggggcatcctgtcagcacgtgggtcacaggtccaggatttcctgtcgcgttctctgtggcttcctctatcggaagacagacttcgtatcgcttgctgcgccacccatcggagcgcatgggcttcccggccggggccgcgcaggccttggtgctgcaggtattcaaaaccttggaccacatggcccgtcaggatgatgagaatgagaaggcaggaacttgaagagaacagatcagaatgacacaggaagaggaagaggccgcgactgtgtcagctgctgcagctgagaaggagccggtcccagttccaggccatggacatagcagattgacgtccgaccagtagaattgggatgggcatcaggaagtagagaaagtgcagcctccaggccctgtgaaggaaatggccctatggttcacaggaggctagaagctccaggagcagttgctggatgctgctgaagtccctagggaaccacgcaattcttcccaggattcaggagcggttccagaaaattcccgacgagttacgatggtgctgtccgagagaactacagctggtcacaggactatactgacctggaggtcagggtgccagtacccaagcacgtggtgaagggacaacgcaggtctcagtgggccttagcagcagctccattacgtgtggacatgactggaggaagatgggggagcgcggtctcatggaagggcacgctcaccgacaaggatcaacactgagagttctctctg

SEQ ID NO: 726412 - DNA, 163 bp, Homo sapiens
atatatcatacaaagtgaaggaagtcagaaggagaaagacaaataccatatgatatcacttatatatggaagtctaaaatatgatacacacgaacttatctacgaaaaagaaacagacacacacagagaatcaacctgtggctgggtggtggcgggagagccg

SEQ ID NO: 726413 - DNA, 444 bp, Homo sapiens
gttcgatcggctcggacccctccataatgtgtgcccatggctggaatgcagcggcatgatcacagctcactgcaaacttcaactgccaggctcaggcaaccctcccacctcagcctcttgaatagctgggactgcaggctcataccaccacaaccagctaacttgtatttttggtagagacaaggtttcgccatgttgctcaggctagtctcgaactcctggactcaagtgatccacctgtcttggctgcctacattgctgggattacaggcatgagccaccatgcccagccaaatttttttttttttttaagggaagggatcttgctatgttgcccaggctggtctaaaactcctaagctcaagcaatctgcccacctaagcctctgaaagtgctgggattacaggcatgagccaccatgtccagcacactttaatattcact

SEQ ID NO: 726414 - DNA, 629 bp, Homo sapiens
  misc_feature (234)..(234): n is a, c, g, or t
cgtcgacgaaagaacaagaaagtttcattagagtaagcttattacaggcttaaccatctgacttcctgacagtcgcttaaccatctgacttcctgaatgtcacacaccgtagaggaagatgaatttttatctggtgctgcatatcgaaaaaaggtccgacttgtccacagacactgggctcacttgctcccagccatttactctcacttgcagttgatgaatccggaggtcatnggtgtgtctgtcaggcagaacaaagaaaaagatattaggcacaatctccagaagggatgaaaagtagaagcaaagacacaaatctgatttagtacatatgatgtaaaaacccagttagctaaaccttttggagattacctaatgcaagggaaatcaggagcacagtttaactgggttttacacttacaacacaaactgcaagatctgtaaaggcttgactgagtaagagtggcatttatcctccattgtacaaaccacgcaaaatctaaacacgagccaaggtctttcccccaccaatcctcaccccaagctatattatgatgtcactggggtggtaaaaatgcagtagcgatttaatcatattaccatactcttgggaatgcgttaaaaattat

SEQ ID NO: 726415 - DNA, 255 bp, Homo sapiens
tccgcagggtgactctaccaggatccccactctcgcacttccgtattgatgccccagggacacagagactttatcatgtacgtgattactggcacatctcaggctgcctgtgctgtccggattgttgctgctggtgttggttactttgaggctggtctctccatgaatgggcagacccccagagcagtgcccttctggcgttctccccgcggtgtgagaccactcattgtcagtgttaactcaaatggattccac

SEQ ID NO: 726416 - DNA, 664 bp, Homo sapiens
  misc_feature (313)..(313): n is a, c, g, or t
  misc_feature (361)..(361): n is a, c, g, or t
ctactgtcttagtcttttacacagaagatgttaaaggtggaaatagctatatgcctgttgtgtatcaccactctaacgcttagcctgcattgtttcgagcataatttgcttatttacaattgctctatctcagacttcccaccaatactttgatactgtgtactttgtcactactttgatgccatcattgatattgctcactggcggatgagaatatctgcaagttgtttataactttttaatcataaccgccttgacgtcctgttacatatgtctttaacaggctctgtgcccaagtagtctttatttcggntaccctaaacatatctaaactatccgaccaagactgtgtaagttggcnttttctttttcctccccctgatcattcatttagcatgttatatttcattcttaatgttttgggtggtgcctcttatactatgttgtattcctagacaaggaaatgtatatcaaaatatgttagatgatggatgttgttatctccttgatgatagcaccgtcttatactgctttagcagaatcaggaaaaagtaaactgcattttacatagtggttttaaatattgatcgattgatattctaaacctggtttcctatataaagttgtaagttcaagataaagagagcagattctttattaaaaa

SEQ ID NO: 726417 - DNA, 1651 bp, Homo sapiens
  misc_feature (371)..(371): n is a, c, g, or t
  misc_feature (375)..(375): n is a, c, g, or t
gagtgaactaggccttagagaaggaacattgacaagcaaaggaatccatcggactgacagtgaagattgtcctcttggaaggtctgactgagtggcatcaccacaaaagcagtgagagactcgtcgtcatgttcgtatgctgattgggcaagacatacgctatgaaagatgagctgcatgctctagtgggctcgttctcgacccatagatcttgcttcggactcgatctgcagccaagactcgctgaggcactacatgtggtcagaacaaacgcggacgccagcattgtctggagatagcatggacggaaggcctggtatctctgagctggtagagcttcgacagggttgtgtcaagtactgcgtaggcgngcgntgagtaccctaggaacgtagagtgattccgcacgattcgacggaatgggtagctaccctgtggtaggcaagtatacctgcgtgcgtagacagatggtccacacgcattttacgaggcatgccaaaggaagccggtgtccttccaaggggtctgcatggcaagggtacgaagtccgaataggaaactaccgagtcaagtgtggtaccccatgcgcatgtgcagagtgggaacgaacactcatcttgtatgccctggttgtacatgtacagtaccctcgtatgcatgataccaacttgtagccataggtcatggtctgcatgaaagtcattcagttcctatgtatgtctccccagagttctgaatgcctatcatcgaagggcatcatgtgctccggcgcgattcatgctggggcattctcctttgttaagttccttccccggttcctggtgtatgtagcggttgctcgcccccgtcaaagatacctcacgcgcatgagtagtcgctggtcccttagtatgctgtatttgccctattccatgtctttagacgcgttgcctagcgagacttttccagcggcactccccggttggtaataattctccatgcactaaggtacgggaggacaagtgggcggaaagtccatttccaccctcaattgttccattatatatcgtaaagacacgtgggcacattcattggctacaccctaatgtagtaccgccaatggtaagctcttgcaacaaaattgtgtcgggggacaggctttgccatggtgtggcccatgttttgcttgtgagtaccccttcacacattacaggttctcagaaaggaagcgatggaaaccacatgggtgttcccaaagtggcttatcgccacccaatagttgtgagcccccgggggagcccctaatacccaaggagaggccccacatatggggagccccccaagcgaaaagactcctccaatgtgggaacccctacggcgggggaagaacaacacaggaggccacaaaaaagcaacaacaggagcgtggacacacctaagaaaacccacagaggtgcgcacacaaacaacagcacgggcaccgactgtgaacacacactggtgattacaaaatcgaagacgagcggtaacacacaacgacacgacaatacacagacgtaaagactacgcaactagagacacaaacatgggaggaggggcacgcacaaagacgacaaaccagcaagactgggcttgtgtcacaacacaacaacagaccaggagattgagctac

SEQ ID NO: 726418 - DNA, 270 bp, Homo sapiens
taaccagcttatttttctgaggattttacccctcagcaattgatgtgattcaagactgcactaaagtactctttagcaaggtactctacacaaacaacagccacccctggttaaaggataaactaaggacattataaactgttttactaatccctggaactgtgtttcaatgtttagcacctgtaacaggagagtcaaagtggcaaatagggcagtttggctaccttgcaaactcatgtgctgacctagggcaccagggcaatgggctaa

SEQ ID NO: 726419 - DNA, 378 bp, Homo sapiens
  misc_feature (371)..(371): n is a, c, g, or t
tccccaccgccaaagccgctccccacccggatgctaacacccaggaaggccttcagaacctgctccaaggcgtcggggcttgcggaaaccgagaacttccggcagactcacaccttgcccccgggtcttgctttattgaatgggcttttgttgccacgcgaacaggaaacccgggaaggaagacctgcggttccgtaaaaggcgtccaggcctccaggccacggcgacaggctccggggaacatggggctttccctgtcaactcccaaggagtgtgggcctcaacgcattggcaggggacggccgtgtgccctctccagaccccacccccagatgcatttattagaaataataaagttctttcttagctanaaaaaaa

SEQ ID NO: 726420 - DNA, 780 bp, Homo sapiens
gacactacaggaagtcgtgctacccccgcggagtgtcgtgtgttctggcattcattccggcaccaccactgtctgaaggtttcctttaaggatcacgctgacgtcggatccacggctgccgtacaaagtatctcagatgttcctgaaagtacaccattatcacagcagtcattaaagtttgcaagcagaagaatttaaagttcctgcgtgccaacaagatgcaattatttaccaatgagtggaataggaaattaaatcctgcacagactgctggaacatgttttctaaaacatggttcagaactgcggatgtattcctagagatcgtgtgggacgttgttaatatctgctacttggaacatacgattgcctttcagaatagatattggtatatcttggtgtagtaaaattgacatcaggcgtttacacatactatgacataacaccaggagtcaatgattaatgaaaggtgactcatctgtcccttttggtgtccatactcttcctatgacagagggactgcgtatgaattacggctactactgtctacggaagatcatagtctcttgatgctatctccataacacaaacgaggtacgttcgcttgggggtcacatggatttagcctcactgtctaacgtgggaagccttctggctcaatcttgtcttttcagacgctatatctgggtcaccttcacactgttctctgtaattcgctatatttccctcctgctcattgcaacttctactcgacttatggccccggatgggacatgctcgc

SEQ ID NO: 726421 - DNA, 117 bp, Homo sapiens
gtgatgatgctgcacgtcgggtgagacacgtcagagcgtattcctgtgcccctcatcctgccagacctgcggcgagagagaggccgtccagcagatggtcggatgcccatgcagtac

SEQ ID NO: 726422 - DNA, 998 bp, Homo sapiens
gagcgggtgcgtgggcgcggggcctgtgccatgctgcagctaaggcccgcgttgacagcctgggtgaaggggagcggggcagaggagtgccttgggctgttttcggcggcgggtgggggctgaggggctggctgggtcagagtccctggtgtccagggccggggctcttgactctgctgtgttgtgtgttcccccgtaccccgctatgcgcagtgtgtgtgtccttgtccgtcgctcgatgtagtgcctgtccatggcatgtgctgcactggtgtcccgtgagaaaggttgttcacttcaggcgatgaactacatgtcgatgtggcatcactgtctgccatggttcctagatccaacgttctcctgcgagatgcttgtgagacactcggagttgactatgtgctagcagattttgcaagaagaacagcttctgacacgtctaagataaaccgtttaatgccaagaacgcgcagagacagctccggctgtgcccagttccatatcgtcgaaacgtgttgctctggcgtctgtcttaagcagctagtatacgcaggtcttccttatgcgatgtgaagactcagttatgacgaagggttcctgagagacaatgtctccagaatacgattcacagagcgagaactgagcacagagtctagtgctaacactaagtgccttccttccttgacagaaccgctaattgaggcgaaggagcctgcggagttagttgacacagcttaccgatttcatgcacagaacatgacgtgcatgatgcaacgtggacaggaatacaacgcgaacgaaattcataagagtacccacgttcctagctcggtgcccgctccattggtatccacatgggcctgatcgcgaggaggttgtccgcttaacctcgcttcttccaagaagcattcattcgcttttctaatactgcatgcccaagaagccgacgtgttgccagtttaactccaagggaactctactttctaaaaaattccacg

SEQ ID NO: 726423 - DNA, 673 bp, Homo sapiens
  misc_feature (43)..(43): n is a, c, g, or t
  misc_feature (67)..(67): n is a, c, g, or t
  misc_feature (83)..(83): n is a, c, g, or t
  misc_feature (98)..(98): n is a, c, g, or t
  misc_feature (112)..(112): n is a, c, g, or t
  misc_feature (157)..(157): n is a, c, g, or t
  misc_feature (175)..(175): n is a, c, g, or t
  misc_feature (197)..(197): n is a, c, g, or t
  misc_feature (206)..(206): n is a, c, g, or t
  misc_feature (216)..(216): n is a, c, g, or t
  misc_feature (221)..(221): n is a, c, g, or t
  misc_feature (223)..(223): n is a, c, g, or t
  misc_feature (232)..(232): n is a, c, g, or t
  misc_feature (242)..(242): n is a, c, g, or t
  misc_feature (259)..(259): n is a, c, g, or t
  misc_feature (275)..(275): n is a, c, g, or t
  misc_feature (299)..(299): n is a, c, g, or t
  misc_feature (324)..(324): n is a, c, g, or t
  misc_feature (328)..(328): n is a, c, g, or t
  misc_feature (346)..(347): n is a, c, g, or t
  misc_feature (349)..(349): n is a, c, g, or t
  misc_feature (372)..(373): n is a, c, g, or t
  misc_feature (376)..(376): n is a, c, g, or t
  misc_feature (383)..(383): n is a, c, g, or t
  misc_feature (387)..(387): n is a, c, g, or t
  misc_feature (391)..(391): n is a, c, g, or t
  misc_feature (414)..(415): n is a, c, g, or t
  misc_feature (425)..(425): n is a, c, g, or t
  misc_feature (433)..(433): n is a, c, g, or t
  misc_feature (469)..(469): n is a, c, g, or t
  misc_feature (476)..(476): n is a, c, g, or t
  misc_feature (481)..(481): n is a, c, g, or t
  misc_feature (537)..(537): n is a, c, g, or t
  misc_feature (541)..(541): n is a, c, g, or t
  misc_feature (668)..(668): n is a, c, g, or t
caacaaacaaactacacggtaagtattcggtgtaatactttantttctattgtattaaacgaaagcnaggaaaataccaagtnatttaaaggcaaatntttactccttaaanaaaaaatacaaactgtggtatttttaagaaatcgttatattttanataatataaacaaaatcnctaatgcatctatatgcttggnttccttaanctacaatganccccngnctgggtganaatgcatttnctttttggtggccaatnaccctcctgggaaccncccgtcacacatagcatgcctttntttccttcctgtctacccccagggnctgncataccccagtttttttnncngccgcctccccctccctgtcccnngtngcccggnccanaggnccccctgccacctccgcgcgggnntcccccagancctctgtngcctccactaggccctctgtagtctcctccagagtngcctctnaagcnacctcgggaaactcctctatagcctccaccaacacctgcaccatatcctgcccganaggngttggcgctgccaccatagcctccgctaccatagcctccactgctatagccaccgccatagcctccaccactgttactagaacctccccttctatatccgcttccattgtcgtatcgggccatctcnggagg

SEQ ID NO: 726424 - DNA, 384 bp, Homo sapiens
tcaaataaaatctctacctcattggcatattgtcatgtacacaatgactatctaatgaaaccaagtgtgtaccagttgtgactttcaaatatatctgctcagccacagctttctcacaggtgcttaatggtaggacaagtgaataaattgtggaagacaaatgcataggtatagtatgatcacaacacgctacaaaatgatacatccacttttcttggctagttatataaaatagattccattttagagaatactgagatgatacagtatattcagaaatacaacttggagcaaaccttacttgccagaccttgatcctggagatttgattaaggatatagaaataaaatctgaatgagacgagaggaaggttaaaaaaaaaaa

SEQ ID NO: 726425 - DNA, 418 bp, Homo sapiens
  misc_feature (4)..(4): n is a, c, g, or t
  misc_feature (42)..(42): n is a, c, g, or t
aggnaagtggatgatcttttcaaggaaagcaggcattgaccnaaacggcccaagtgaaatatgacacggtttatcccagaggatcaccattcctgtgcgagactactaagggagccaagatcaagagagcagatgagagcttcggggcctgaaaacctagactgattcctttttgtaagggaagtctagagatgacacaaccactgcatggcataagtaccaataaatgatgtagccatggcattggataactgtaataaggtctgtcttgatttcggtactaacattagtctagccatttgcagcatagtctagccctatgatttgtagtcagggttgtgtgccagtgctgcctctgcaacatcatcccctcacccattgtacttctcaaagcctttggacctcataaggatgaaga

SEQ ID NO: 726426 - DNA, 882 bp, Homo sapiens
agctgttaggatattcgtacattttggtaaattttggaaatgctagtactgtgtttcaccagcacgtatttgtgcacattaatgtcattttccttaagatggttacagtatgtaacctgtattattctggacggacttattacaatacaaacagacaaaaaataaaaaaaacttgagttctatttaccttgcacatttttggttgttcacagtgaaaaaactggtccacgaccctgttggccatttttgcattgtttcgtttttaatgaaccatttagaacgacggacatgaatgtgcattttatcaattccttaggggcacaaggaggacaataatagctgatctttgaactttgacaaacgtctttagatgaccaagcaaaacgactttaaaaaactggtactgcacctggcctgcagctactgcagtaatacaaaacttttagatcgcaatgtgttacaacatatgcctttaattagtagactagacttatgatagcctgagtttctacattctattattttcctccctttctcatgtttatccatcggtcatccacaatgtttgctgccatgactgattcgtcgctgacgtaccaccttcaggtttctgtcgcattacttgtcgacactggcgtggtcctactggagaacctctcgtgttgtctaaatagcagcaaggatggcgtgtcgatctctgatttaattctcgcacctaagcatgacttacacgcttcccctgctccacctggctactgtcctccctttacaacatttccgtcacacaaaccaacacccacaacgaccacccacacccaccacaaccacacaccaccccctcgccccccccctccttcccccccttctctctccctcgccgca

SEQ ID NO: 726427 - DNA, 1382 bp, Homo sapiens
  misc_feature (1218)..(1218): n is a, c, g, or t
cgccccgtactctttctggtgttagatcgagcaaccctctaaaagcagtttagagtggtaagaaagaaaatacaaaagacccaccaaacgctcgcgagtgcacaaagagggtatgaaatttgcttctggacatcctcctgcttctcccgtgacagatctgctctagctgccctagaagtccttcgatgaaggctatttctaattgcctataggaggcagaaaaattcatgtcaccggtggtaattatcgtggctcgatcacagggagccagggcattggaattggaagactgactggcgcatatggaatttcggcataagaagtctagaaagccaagtcgtggtcctcatgggaatatataacactaaagccattgtggacctggtagcgacataccatgccatgaccaaacagtgcatagtgcggacctggtgatgtccaaacggcttcaatacccccttatggtgcgttacccagcgtgcacggtcaaacctcgtagcaaaagcatttacttcagcaggccctctgcgcacacagagaaccgtgttgtaccgggtggcaaggacaaaattttggggccaagcagtgtttgtcagagtaattgtctgtaaggatacacactcacatggctgtgggcgtgcttaggctctattcaatagcgactcacagagaatccggggtaatttggcgctcacgacccaaagggaagtcgccttccagacaattgtgcaagagacaggcaccttttcttcgtgcaaagaggtcttacacgttgtgtcaccttgtggcccaacgaagtttctccgttggggaaccttaccctacacatggggcctcttttttccttatccaccgtgaccacatgttgcactcgggaacacagacataatttaaaatcgccatgtggtgtgccccaagatcatcttggtttcacagccatagaatggggtggccttactccgagagcaaggatcagtggagacaagccatagttgtcttctctccggcgaatccctccgcgtgtgtgcggttataaccatggggccttataacctgggttattccaaaggacaagaagggctatatgtggctgatggcgagtagcttccggggcaattgtttggcatctaaaatcacaacttatattgtggaaccagaggcatattgaaaacgaatgcgcgtgtggcgcatttttatctagacacaatttaacgcttnggtatagggctacaacacataccagaacccatatggctcctagtatagattcccagtaacatatatccgtgattaacacatcggcgtgagggagctttcccattccaaacaaagaattcccaaatagggataaacacaaggtattagtgggaggcaccacccca

SEQ ID NO: 726428 - DNA, 241 bp, Homo sapiens
  misc_feature (48)..(49): n is a, c, g, or t
cggggcccgaggggggtttccccccttttccccattttcatttttttnnggggcaaaaccccggggccccgggggggggagtttttttttggggggggggggggccccccaacccccccccgggtttttgggttttgccccccccggccccccttttttttttttgggaaatttttttttttggggggggggtttcctttttttttttaaaaaaaaggggaaattcctttgggggggccca

SEQ ID NO: 726429 - DNA, 150 bp, Homo sapiens
gctatacaccaagtcagacccgttcacaccctatagttaaggtggccattaaggggccaggggtggcaatcagtaagctgcctcctgcctcactctctttctccaaccattctctataggctccagcgtaattagcgagccccagatgta

SEQ ID NO: 726430 - DNA, 220 bp, Homo sapiens
ggttgggcgcgggcgcatggttgtgggcgcgtggttgtggcgcgatgtaacagagaaagccatacaagtcacacaaccacctgtcaaaaaggcttcgatacgggataatcctatttattacctcagaagttttttcttcgcaggatttttctgagccttttaccactccagccgcgcccacaacccaggcgcccacaacgcatgcgccccgtgcccacaa

SEQ ID NO: 726431 - DNA, 375 bp, Homo sapiens
cataaaactcacagggcctataaaacaataacacaatgaaaaaagaggtattcaggcaataactagcttgatgaattgaacagtacctcacattgcaatattaacattgaatgtaaatggcctaaatactccacttaaaagatacagaatggcagaatggataaaaatccatcaaccaagtagctgctgtcttcaagggactcatctaacacataaggactcacataaatataagttaaaaagtggaaaaagatattccatgcaaatggaaaccaaaagggaacaggagtagctattcttatatcagacaaaaaacagattttaaagcaagacaaagaggaacattacataattataaaatgattagtccaacag

SEQ ID NO: 726432 - DNA, 100 bp, Homo sapiens
ggatccagctgctgattgtaatcacctctccctgatcaccgctgagccctgcaggataacctatctcctgacctattacaccactgattgcttatgctgt

SEQ ID NO: 726433 - DNA, 1159 bp, Homo sapiens
tcctttcccgccgccgcccagccgccgtctggcctcctcgtggcccgagcgcagaccagggtccagcctgcgctggcgcctggcagcctcgctgctccctctcgggtctctctcggtgcctcgtggcaccgctgtcctgtggggctggcctgcctgcctgcccgcccgcccgagccccttcgctgcttcggccccttgggctggcctgttgccattggggggcctgacagcctgcgcggccaaggcgctcctggcgcgggcccgaccctgcacctgcagacggggaacctgctgaactgtgggccgcttgcggaagaatgtgccccgtccacgcacagcgaggagcttcattgattgtgtatccaaaaaaacctttgacctgacttgggagttcccaaattcaagcccagatttggggtcagggcagtttcccagatgtcttgggaattgcacgtggtatctcattgcacgtagacaacggatcaattcctgcattgacgggagacagaattgaacagtttctggcaaaaccggtccattggtagaatcaaaacttctttcatcattcaattagaagttgcagttgacattggccttgtccagtccttggagttgcacagctggattctggtgactcattggcttcacctcctatttgacgatggcagttaatcttacttgagagcatttaccagccttaactgcggcaggaaattacgaaaacttaagtcagaagcaaaaacgatttgttgccataaggtacctctgatcttagaacacaacacaggttggaaccagctgtatccgtggggccacgggtaaaccgaaatatgttaaccaaggttaatcttggcgtctcgggttgtggtgtttgcccccagaatttgcattggccttttgccgaacccaatttggacccacacgagcgggttgaagctcccacaggtgttccccaaagaaccgcctgtttctgttcaagcacagggtttcccgcagaccctttcggagaaagacgttcttagaattaaacccccgcaagtgagtttcgcccgggagatgatcgcgcggaaaagcccacgtgtgaacaagaggaagtctacacacacggcaccacataatgcaccacacagcggcgtcacatagagaaaacacatgtaga

SEQ ID NO: 726434 - DNA, 776 bp, Homo sapiens
  misc_feature (294)..(294): n is a, c, g, or t
taacccttcccttatgagacatgcctgtgtggggttgacagtgagggtaataatgactgtgtgggttgatggtaaatttggggctgttaatggtcagtccagggtttataatctcttgaccgcaggcttattgcggaggaaaatgtgtttccagtgtttactttattactaacatttagttctctctcatattaggggtgatagaatgtggctccaatgtggggtggtgagggagtctcagttaatattgtttgaggaacttttctataggatagtgtgggtgtgttgtgcagncttgtaaaccgctttctcttatacactgtgaggtggcgtgctttttagagccatactatatgtgggtgtgtttaacattgttgttatactctctctcctcttacagagggtttttgtctcctatagtgtgctcccaagagaagcgtggtcccctcttttggggaacttaacgagttataaatttcttacacgaggggggaattattaatagaagggggctccgtggggggggccaaaaatttttacaacgtctgtggacacctaaagataattccttactcttggggacacacaccccaagtctatttccaccccgagggtctcccgcgaaacgtgttttgtggtgccgcctttctaaaccttattaaatattcttgcccccccatttaaatattttggggctcaacataaagaaccgggggtgggtggccccctttaaagactgagtcccttagaagggtaagcccccgaccgaggataac

SEQ ID NO: 726435 - DNA, 721 bp, Homo sapiens
tcggacatgttccggatcccccgttgggggacgcggtcccccactcgggttaccccgcgcctgattgttatacgccccctcttatgggcgtatctcgcctacgctaagtacggggccgcccgaattctttggcgagggagccggtccccgcatacttctgttgccgcgaccacgtataactcgagtgtttccaagcttgcctgggtctcgggaaaaaaatattgccccgggaattttgcgccacattacgactccgggggtactacctccgctccagccacaaccgtactttcttgggggaacacgcttcgcgcgcaccctcacacgccccatggcacgaagaaaccacaatgcggcccggtgtgatcacccgcccaaagaagaatatcatgacctgaggcggccgagtcaaccgccgactcttgttccacctcgggggcgcccccggcgtctagaacacgttggcagtcccgtccctcgggaaggtgcgggcacacacgtgtgggctggcaaggtgccatgttttatgcagtccttgtgccatggggcctggttcaactttgtttcgccccctttagtttcgcacctccccctcgtggcgccccccggtgctgatatacaccaagcgcccccgggtgtgtccctgcccccggggcctcctcttgatcgcttctgggttttctttttttttttttggcccgaggtacccccccacataaca

SEQ ID NO: 726436 - DNA, 267 bp, Homo sapiens
  misc_feature (5)..(5): n is a, c, g, or t
ggttnaacagtccccattagcagaagtcatgttccagcttagactgatgaggatttaaaaatctgcatcttccactattttcaatatattaggagagataggtgcagcatttgtgcatctgacatttacctaaaaaaaagacaccaacttggcagagaggtggaaatcagtcatgattacaacctacagaggtggcgagtatgtacacaagagcttataggccctcatagggcttgattctggtatattgatggtgtcttttcttcc

SEQ ID NO: 726437 - DNA, 134 bp, Homo sapiens
ggtggggttgggggtgaggtgtgcttgttggtaagaagtgggctaggtgtattagtatgttctcgcactgctatatatcccgaggatgggtgtggtggctcacgtctgtaatcccagcactggcgcggcttgga

SEQ ID NO: 726438 - DNA, 161 bp, Homo sapiens
cgcataatcggactcgctatcatcggcacctcgctatcatcggcacccatacgtaacctgagcagtatacactgaatttaatttgtagtcttttatccctcacccacttcctacactttcccactgagtccccaaagtccttgtgtcggtgccgatgaata

SEQ ID NO: 726439 - DNA, 255 bp, Homo sapiens
tggcagaactatgcgcacgggaaccaaccgcttacgcccgcaccacaggcgatcctcgtagaagcgcgaagccgattaacagcgcctcgttcatgctgatgcttcccgatccgtctaaatcggctaacgtcggcctttttaaaatttgaatgacaattccaagtcgcttcagatgaacgcgccatattcgcattgttgctatcgggcgaggcgcaacgtcttccagttcatcttctcgtttcttcacattcggtg

SEQ ID NO: 726440 - DNA, 252 bp, Homo sapiens
tcgacttggtacacattcagctgggcgggcgtcagcacatcaatgacattgaatggccttcgccacagggaccgcagcttcctctccagcaggtctatgaaccatgtgcaggtatgtcagcggccctcaccgccgtcctggttggctgccaccgggctgcttgaatgtaggatagggatgttccatggtggctggcgtgagcctgctgcgaatgccgtctgcttgagtgctttctcctgccgcagtccgggc

SEQ ID NO: 726441 - DNA, 154 bp, Homo sapiens
tagaacattctatagctcacatcgggaactgcccgtagaggtgttatccctacccctgtgaactctgttcacagcttacatagggtttcccccttactataactctagcatccccatacccattatgacactaaggggcacgggttcttcttgt

SEQ ID NO: 726442 - DNA, 916 bp, Homo sapiens
  misc_feature (23)..(23): n is a, c, g, or t
  misc_feature (61)..(62): n is a, c, g, or t
  misc_feature (70)..(70): n is a, c, g, or t
  misc_feature (83)..(83): n is a, c, g, or t
  misc_feature (93)..(93): n is a, c, g, or t
  misc_feature (106)..(106): n is a, c, g, or t
  misc_feature (128)..(129): n is a, c, g, or t
  misc_feature (131)..(131): n is a, c, g, or t
  misc_feature (135)..(135): n is a, c, g, or t
  misc_feature (173)..(173): n is a, c, g, or t
  misc_feature (180)..(180): n is a, c, g, or t
  misc_feature (344)..(344): n is a, c, g, or t
  misc_feature (358)..(358): n is a, c, g, or t
  misc_feature (361)..(361): n is a, c, g, or t
  misc_feature (363)..(363): n is a, c, g, or t
  misc_feature (365)..(365): n is a, c, g, or t
  misc_feature (370)..(370): n is a, c, g, or t
  misc_feature (372)..(373): n is a, c, g, or t
  misc_feature (378)..(378): n is a, c, g, or t
  misc_feature (383)..(383): n is a, c, g, or t
  misc_feature (416)..(416): n is a, c, g, or t
  misc_feature (447)..(447): n is a, c, g, or t
  misc_feature (464)..(464): n is a, c, g, or t
  misc_feature (467)..(468): n is a, c, g, or t
  misc_feature (471)..(471): n is a, c, g, or t
  misc_feature (473)..(473): n is a, c, g, or t
  misc_feature (486)..(486): n is a, c, g, or t
  misc_feature (490)..(490): n is a, c, g, or t
  misc_feature (492)..(492): n is a, c, g, or t
  misc_feature (495)..(495): n is a, c, g, or t
  misc_feature (497)..(497): n is a, c, g, or t
  misc_feature (500)..(500): n is a, c, g, or t
  misc_feature (504)..(505): n is a, c, g, or t
  misc_feature (512)..(512): n is a, c, g, or t
  misc_feature (515)..(515): n is a, c, g, or t
  misc_feature (537)..(537): n is a, c, g, or t
  misc_feature (542)..(542): n is a, c, g, or t
  misc_feature (550)..(550): n is a, c, g, or t
  misc_feature (562)..(562): n is a, c, g, or t
  misc_feature (566)..(566): n is a, c, g, or t
  misc_feature (570)..(570): n is a, c, g, or t
  misc_feature (572)..(572): n is a, c, g, or t
  misc_feature (697)..(697): n is a, c, g, or t
  misc_feature (701)..(701): n is a, c, g, or t
  misc_feature (706)..(706): n is a, c, g, or t
  misc_feature (711)..(712): n is a, c, g, or t
  misc_feature (716)..(716): n is a, c, g, or t
  misc_feature (749)..(749): n is a, c, g, or t
  misc_feature (786)..(786): n is a, c, g, or t
  misc_feature (812)..(812): n is a, c, g, or t
  misc_feature (830)..(830): n is a, c, g, or t
  misc_feature (858)..(858): n is a, c, g, or t
agactcgccagccagatgccaangatggggattcatacgacccctatgacttcagtgacanngaggaggnaaatgcctcaagnacacactccnaaagacggcagantcacaggagaccaaggaatccnngnaagnggagttgagtgaatccaggttgaaggcattcaaggtgnccctctnggatgtgttccgggaagctcatgcgcagtcaatcggcatgaatcgcctcacagaatccatcaaccgggacagcgaagagcccttctcttcagttgagatccaggctgctctgagcaagatgcaggatgacaatcaggtcatggtgtctgagggcatcatctggngggtggggggaggngtngngngtggngnngggtngtgcngagagagtttgttctgtgtttcccacgcctctncgtgacccaagtctttgcctcgactcccttnacagtgttgaattcaantgnnggngnggaatgttggtgntgangntgngntcngganncggtggnccntttgggaatgggtcatgaaggntgccntggggtgnggaaaggggggncagngggngnggacaatgactattgcatcttcattgcaaaagcactggctcatccgccctacttcccatcccacacaaacccaattgtaaataacatatgacttctgagtacttttgggggcacaactgttttcngttngctgnttttnngttntgttttttttctccagagcactttggtctagantaggctttgggtggttccaattggtggagagaagctntgaggcacgtcatgcaggtcaagaangctttctttgcagtagcnccagttaaggtgaatatgtattgtatcncaaaacaaacccaatatcagatgatatccgagatgttgaataaacttagccatttcgt

SEQ ID NO: 726443 - DNA, 396 bp, Homo sapiens
  misc_feature (196)..(196): n is a, c, g, or t
  misc_feature (396)..(396): n is a, c, g, or t
aattggacgcgcgcggcggagctgtgcgcgagacgcgggggggccacacgcgcgcgcgcggtgttttatactgcgtggtgttcgcctgtgcgtgcgttggttcggggctgtggtatacgcgcgccgcggggcctcgggttatatcgcgcacagagagttaacgtgacagggcgcggggagagctgagagacaccgngggtggcgcccttagagtccagacacggaataggttctctcctctcaaatgtgtcctgtgaggcacggacacattacacggggcacaccctgtgagaggtgtggcacacggccaagagtggaggcattaagacacggaaagcgccgcgagtgtgttgcgcctctgtgcggggacattggagggctcaactgtgtgggcgn

SEQ ID NO: 726444 - DNA, 126 bp, Homo sapiens
tgagtaatagccgcacgtgctacatgctccacggtctattggagtactggaatagcgatgaatgcagctcttccggaatccagcttgaagcacattatctccgaagttgggaaatatagggagtgg

SEQ ID NO: 726445 - DNA, 98 bp, Homo sapiens
  misc_feature (55)..(55): n is a, c, g, or t
  misc_feature (61)..(61): n is a, c, g, or t
ccttgtcttgggtctgaaaaagctgagaagaataaaggaaacattgctcaacttntttcancccccttccccctgacacctgttttctcatttgccct

SEQ ID NO: 726446 - DNA, 595 bp, Homo sapiens
  misc_feature (12)..(12): n is a, c, g, or t
  misc_feature (104)..(104): n is a, c, g, or t
  misc_feature (125)..(125): n is a, c, g, or t
  misc_feature (144)..(144): n is a, c, g, or t
  misc_feature (171)..(171): n is a, c, g, or t
  misc_feature (182)..(182): n is a, c, g, or t
  misc_feature (226)..(226): n is a, c, g, or t
  misc_feature (228)..(229): n is a, c, g, or t
  misc_feature (231)..(231): n is a, c, g, or t
  misc_feature (236)..(236): n is a, c, g, or t
  misc_feature (253)..(253): n is a, c, g, or t
  misc_feature (265)..(266): n is a, c, g, or t
  misc_feature (268)..(268): n is a, c, g, or t
  misc_feature (275)..(276): n is a, c, g, or t
  misc_feature (287)..(289): n is a, c, g, or t
  misc_feature (292)..(292): n is a, c, g, or t
  misc_feature (297)..(297): n is a, c, g, or t
  misc_feature (301)..(301): n is a, c, g, or t
  misc_feature (307)..(307): n is a, c, g, or t
  misc_feature (314)..(314): n is a, c, g, or t
  misc_feature (316)..(316): n is a, c, g, or t
  misc_feature (318)..(322): n is a, c, g, or t
  misc_feature (324)..(324): n is a, c, g, or t
  misc_feature (326)..(327): n is a, c, g, or t
  misc_feature (329)..(342): n is a, c, g, or t
  misc_feature (347)..(347): n is a, c, g, or t
  misc_feature (350)..(350): n is a, c, g, or t
  misc_feature (352)..(352): n is a, c, g, or t
  misc_feature (360)..(360): n is a, c, g, or t
  misc_feature (363)..(365): n is a, c, g, or t
  misc_feature (368)..(370): n is a, c, g, or t
  misc_feature (372)..(375): n is a, c, g, or t
  misc_feature (382)..(383): n is a, c, g, or t
  misc_feature (393)..(393): n is a, c, g, or t
  misc_feature (400)..(400): n is a, c, g, or t
  misc_feature (404)..(405): n is a, c, g, or t
  misc_feature (407)..(409): n is a, c, g, or t
  misc_feature (412)..(412): n is a, c, g, or t
  misc_feature (414)..(414): n is a, c, g, or t
  misc_feature (416)..(417): n is a, c, g, or t
  misc_feature (421)..(421): n is a, c, g, or t
  misc_feature (423)..(426): n is a, c, g, or t
  misc_feature (430)..(432): n is a, c, g, or t
  misc_feature (434)..(434): n is a, c, g, or t
  misc_feature (437)..(437): n is a, c, g, or t
  misc_feature (440)..(440): n is a, c, g, or t
  misc_feature (454)..(454): n is a, c, g, or t
  misc_feature (475)..(475): n is a, c, g, or t
  misc_feature (486)..(486): n is a, c, g, or t
  misc_feature (578)..(578): n is a, c, g, or t
aagttgggagangccccctcctcagctccctccttccccaacaactcttctacagcccagcccccagggcccagaggcagggctggcgtcaggcagactgtacngcataaatacgtggaggccanagcccgaatcagcagcgtnagggggcagggaaactgggtttgggangagaagtgggnggctctgggggcacgtcccccagtgcttgtccagagcccagggncnnanagagnaagagaggggaaaagtnggccagcttggnntntggctcnngcccgccctgnnnagngaggntggnaggtgnatatggntntnnnnngngnngnnnnnnnnnnnnnnaagtnaanangcaaagangcnnnagnnntnnnntaggcgnnatgttcaaangataagntganncnnntgnantnnaatnannnnttannngnaanggnaaataaagaaaganatggaggaagaggtggtgaangtaatatatgngaatagagatgaaagtatgggaaaggtagagatgaagaagagaaggataaaaagaaagaagataatgaagaatggagaagtggaaggaatanatagtaaatagtatagt

SEQ ID NO: 726447 - DNA, 125 bp, Homo sapiens
ccactggttgactatattctcttactgtatccgtgtataatggcgcttaagccctgactatgagggactgtcagccgtagttatcacgcctgccaggtttctaccaccttggattctcatgtgca

SEQ ID NO: 726448 - DNA, 400 bp, Homo sapiens
cgttactggcatttgaagggcaagtaatatttaggttgcagaagaaggctaatgcagcctctgaagggaactgttctaattattacctaataaatatagttacacaactatattcgaggacatgagatatagcactgcttgataaccagaatgactgaacagttaggttacaaggaacagctgtaaattggatcggggaaatggatctgccgaactaatttgactcgggacagtgatccatcagtcctagatgcttctggtatgtaaatctcttgaatcacattgttccctttcttctgaaatctccaaggagaattctcacagcactacattcaggttgccatttagttaggattcaacatttccatccagtagccatcaggatcttgaataattgcca

SEQ ID NO: 726449 - DNA, 263 bp, Homo sapiens
ataatatatctcacgagaaatggtaaaattatgaaaaaatttataaggaaatagaatgtatgcatagctagagcacataataaaattgctgatgtgctagaacagcaaattcttcaagcaaaacgaatacgacaaaatcgccaagaatataatgctttggcaaaagtgattcagcaccatccagacaggcatgagacattgaaggaactagaggctctgggaaaagaattagagtcatctttcacacatagttcagcgtctga

SEQ ID NO: 726450 - DNA, 834 bp, Homo sapiens
ttttatttttgagacggagttccactctgtcgccaggctgagtgaagtggtacaatcttggctcactgcaacctccacctcccgggttcaagcaattctcctggctcagcctcctgagtgctgggactacaggcgcgtaccttctttagtagagactaggtttcaccatgttggccaggatggtctctatctcctgaccttgtgatctggcctgcctcagttcccaaagtgctgagatgacaggtgtgagccatcagacccagcattttttttttaaatttaaatttaaattttttccattttttgggagaggtttcttggttcggtcggtcgtgtgtcgtgtggtgtggttttcgagacagtcttgctctgtcacccaggctgggagtgcatgtggcttgatctcttgaacctctacctcccaggttcaagcaattcttgtgcctcagcctcccaagtacctgggactacggggtgcccgctaccacacctgggtgatttttcattgttagtagagacaggctttccaccattgttgcccaggttggtctcaaaacttcctggagctcaggcaatccaccgcctggcttcccaagttgcaggattcacgctgtgagccacacacgcaggtaattttcttccggtttaatttaacagtgggggggctcaatttgttcccctggtggccgacccgataacagaccttgtcacccaacagtcaggttttcaaagaacaactttttccttatgcaggagatgtgccacgcagaggtgccccccgagagttttctacttttttaaaattttccacaaaattggtgccgagaatgcgga

SEQ ID NO: 726451 - DNA, 157 bp, Homo sapiens
gtacatatttaaatcgacatgatatattaataattaattgctgtacactatacagctgaagaatttcacgacatacagacagcaaagaggacagaagggatcatgaaaagtttctggaaaaagcaagacctaaactgtaacctggaatttaaggggt

SEQ ID NO: 726452 - DNA, 764 bp, Homo sapiens
cactgtgttacaaaggtgctgctttacatcggtacgagaaaaacccgagagttcccagccatgtgtctggatatgacatttcaccaacccagtttcacagtgtgcacggcctccaaatatctacctaaagattatgatagattaggcattgtatcactacaaatctgtggcttcgttgtccactagagcctgactgagcagtgcctaaaagaaacagacggataaccgtgatccctcaggaacagatggtgttctagacttatgtggccgtgcatttcattggtatggagcacttgaggggtctttgaacacctgtccaggtctcacatctctgctttgggtgcaacgagctcatcaattaacagtagtcaggaatgtgcctttacttcctggggctggtctgttgaaatttctgtgtgtggacatatggataacatccaggcagtcatgtctgctttcctatagcctcttacctaattgatgccctaaagtcctatatcctttgacttcctggatggtacctagatttcatgcgtgtttaatctaatctgcaagaaacctgagcgttaatctccgatgaatagaagaacttgttgtttcttatttacatgctctttgtgactcttgtcttagattcttgagcaggatttccaatacggtgttgaaaagaagtagtgagagtgcgcatctaacttattgataaactcttaaaaacaattccgaaattgcaccattgaccagtaatgtaaccatgggattgtcct

SEQ ID NO: 726453 - DNA, 197 bp, Homo sapiens
attgttgattacatttacccaataatattgatggtttttgtcattggggctttaaagggaggccttatgggtgctaaattttatttctcctcctcttcctcctcctttttcccctttttcatcttttgtctccattttctttctcttctcctcctcctcttactccttttttgctccccctttttttcagagttcca

SEQ ID NO: 726454 - DNA, 158 bp, Homo sapiens
gatcaagatcccaagaagacactctgggtgtctgggtgccagacaaggtgggcaggcttcaacagatcaagccccacagaacagctggtgcccatgcgctgctggtggtttggggccttctgtttcttcttctaactgggagtaatcacagttgtctg

SEQ ID NO: 726455 - DNA, 310 bp, Homo sapiens
  misc_feature (177)..(177): n is a, c, g, or t
gagcttatactgtggtgtacgtaacgcagtattaaccaaacatttgaaagtatgattcctaatgaaaacactgcatattaaaactgttagcatttactcaccgcactatgatgatatgtgttttcttgtggaagacacaagaatacttaaaatcaaattgttgtactactctcctgnggatcaaagatcactctgtaggattcaccctgaaggcataaaacactcctcaagtgctttcaatctcatccgtttgaattctgtattcaacaagcagccttaagtgacggtacacaccaccagtacggggtac

SEQ ID NO: 726456 - DNA, 185 bp, Homo sapiens
acaggacttatcaccctaaattaattatgcgagtagatcttaatgttcttaccacatacacagcatatacaaattggtaactatgtgatgtgatagatacattaattggcttgattatggtaatcattttcacaagtgatatacacattattttcaagaataccttaacttgttatacgtgataa

SEQ ID NO: 726457 - DNA, 614 bp, Homo sapiens
  misc_feature (96)..(96): n is a, c, g, or t
  misc_feature (593)..(593): n is a, c, g, or t
ccgctttttattttatttttattttgagacagtgtctcactttgtcacccaggctctggagtgcaatggcgggaggcactgcagcctcaacttccngggcctcaagctgtgctcccatctcagcctctcaagtagctgagactacagaaaagcaccaccacgcccagctgatttttatattttttgtagagatggggttttgccatgttgctcaggctggtcttgaactcctgagctcaagcagtccatctgcctcggcctcccaaagtgctaggattataggcatgagccactgtgcctgccctcactgtagttttgatttgcatttccgtaacgatagtgatggtgagcatcttttcaggtgcttgctggccacatgtacaccttctttagggaaacatctcaaggcctttgccactctcatttttttagagatggggttttgctgtgtcgcccaggctagtcccaaactcctgggctcaagcgatcctcctgcctcagcctcccacattgctggaactacaggtgcacatcaccattcctagctaaaagttttaaagtttgatgaagtttacttcatccatgttttcccntgttgcctgtgcttttggtcc

SEQ ID NO: 726458 - DNA, 100 bp, Homo sapiens
gtacatacacagaatgggataggggatacagcatctggtggccggcatcctcaatgggcatggttgtgagaccactattacttctgcttgagtctatctg

SEQ ID NO: 726459 - DNA, 433 bp, Homo sapiens
gctgtgaaatgagcgaggaagagtgtcgggaaggtttagactctgatatcaacaatagagtggttaaacatgactcctgcagagaccctctcaactggtcaaaacctaaaaatgcctttcctgaggggccgctgggagccttgagagccatgtgcaagaggacagatcctgttcctgtcaccattgctctcgattcactcagatggctgctacttcgacttccctgcaccacactctgccaggtcctgcatgctgtgagccatcaggaccctagtcctggtgacagctcctcagtgaggaaagtgagtgtgcttgggcttgctacatgaagagcttcatggaccaggccctgtgaagagctctcaaccagccttgctccgactgaggtgaccctgggccggaccatgggccaggcctcggcccacatcctgtg

SEQ ID NO: 726460 - DNA, 695 bp, Homo sapiens
gttcacgccattctcctgcctcagcctcccgagtagctgggactacaggcgcccatcaccaagcccggctaatttttcttgcattttatagtagagatggggtttcaccatgttagccaggatggtctcgatctcctgacctcgtgatccgcctgcctcagcctcccaaagtgctgggattacgggcgtgagccaccacacccggccgctgttgagctttttttcatatgtttgttggctgtatgaggtcttcttttcagaagtgtctgttcttgtcctttgcccactttttaatggggatttttcttgtaaatttgtttaagttccttatgggctggatattagacctttgtcagatggatagattgcaaaaatgttctctcattctgtgggttgtctgttcagtgtttcttttcatgcaggttctttattttatccttaatatttttactgagtcacacaaaatacctggcagtacccctgaatttacggtttttacttcacattgtcagtttatacatttattttctcatctagactacaagaaggaattcatgtctttattacaaaatatgtgctgagttcgaattttatcctgggacagctagaaaaacaatgacttgattcttgcattgatctgatctttcttctacatttgcactttcggtgagacggagtctcactctgtcgcccag

SEQ ID NO: 726461 - DNA, 218 bp, Homo sapiens
agaatggtccttccaaagtagtttcagctggatgtggtggcgcgcgcttgtaatcccagcactttggaaggctgagccaggtgggtcaactgaggtcaggagttcgagaccagtctggccaatgtgaggaaagcccatctctactaaaaatacaaaaattagctgggtgtggtggcacacgcttttaatctcaagagtgagactctgtctccaaaaaa

SEQ ID NO: 726462 - DNA, 355 bp, Homo sapiens
aattcctgagctcaagcaattcgctcacctcagcctcccaaagtgctgggattacaggtgtgagccactgtacttcgctgtatattttacattatagtttttgaggtacttgtagatttacatgcagtttaagaaataatacagaggccaggcacagtggcttacatgtgtgagcagcatagtgagaccccgtctgtacaaaaaaatttaaaaattggccgggcgttatgtggcatgtgcctgtagtcccagctactcaggagaccgaggcaggaggatcacttgagcccgggagtgcaaggttacagtgagtcatgatggtgccactgccctccagcctgggcaactgtcttta

SEQ ID NO: 726463 - DNA, 201 bp, Homo sapiens
gaacgagccactgtcacgccttctcgccccgggcctcctttggcgtagccagccttccttaacgatgccgctgccggtgctcaaagcccttgtgtcttgtagacccatttgcgcaccgtgtcgcgcagctgttcctgtccagtcggctgaagctcaaacgtccatgtcaaacccgctgggcaagtcagggcggatcctcta

SEQ ID NO: 726464 - DNA, 593 bp, Homo sapiens
aggacacataggacacagtcggggctgggtcctgagccatgatgtgccatgtggtaggagcacaggacacaggaatcctggaaagtggtggcttcagaagtgatcttggtcgcaggcaccagtgccacctaccaagctgtgaaactaatccttctccactagacgtcgtagggcctcaggggctagacgaggtcatacctgagttcacctgcacgtgcttgcccccgggtgctgagccatagagcatacaatagcgccctacttcacggaaactggtgcctttaaacttaggtaaacttagaacacagccgagaaggtgcttctgtggtactgttatgctactttttcctacttttttgtaggaaaaacagaaagataatgcctctgcttctattgtctctgggggtgtggggtgggggccgggagccgtcgcagacccgtttcatgcagcgtctccctcggcaccgcgtacggaggacgcaccctcactcccctgctgccttcactcctttctgaccaagcaacgctaacctttggtacagatcgattgataaaattaaacaaagtgcttttgatgaaagacaaaagaaaag

SEQ ID NO: 726465 - DNA, 1545 bp, Homo sapiens
gatgctggcttcagaccgagcgtgtctgactccgttgtgtggagccatgtacagatggtgcatccgcctctcatgactcatcgagcgttgctaccagaaacagcgggagcaatcacccttagcgtgcaattgatgttcaaccgtaatgcctcctgctaggtatactataggattcagtcattcgcatacagactgtacgcagcgaaccacgctatggtcgaaaccttgaagccgaaccattagagctagatcatgagtcagccacttgatgagtgtggtgtcatcgaaagctttaggcattgcgtgcctttcaccaacgtgacatgcttcaaaattgcattggaagcgtagctgagagaagacatgcgcgtggtgaatccaatagagtatccaccgggaagatctcccgcgaggcatgagcatgagtgtacactttcaaatgggccctgcgggagatatctagggccgacactgaacatatttaagccaaggacacggagagtgctgaataccgcagcagcagggtaccaccaggagtgcagtcatgaaaatctggatagaagccgccaggaaagacatcgaagacgcgaccggaatgtcaagtcggatattctggaataggaccctagaaagacaaccaatagtaactcgagacaatggagccgtagataaaaaacccaagctggatagcgacatggtagacccgacatagaaacttggaaccagcggatatagcaccgtaccccgattgctatcccatggaggtgcacctggtcaattgagatccgccgatttcgaacaaccgtggaacgctgattgccggacacgtaggaacggtctagcgccctttgggccatactatcaacgtgggaatcgacggggacataacgccttcatgagaacaagcgaagttcacacgggccttaacgttaaacactggggtctcagacacgaacttgtggacaatgttcagcgccccgacaggccaacaccgtgcatatggaacaaacactggcgggtgcccctgtggatccaactggaatacacaagcacaaaataccacacaaaccaccatgctggacaaggtgggcccacttaacaccacaaacatggtaataccccggccactcaactgccgactctccacacactatcatgggcgagccaacacacgacggagacgacaaaggacgagcgccacagctaacacaccacggagcaacaacctagcggcaagcacaacataaaacaaggccgacatcccatacaccgacaacgagcccacaccatacacgagccgacagagagcagcacatcggacatatcacgcgagcagaatcagaccacacaacaggagaggcgaacaatctacaacaatgagaacaacacaatagagaggacaaaaacacacaggaggagccaagacaaaggcggaccacaaatagtacgacgcaacgaacacaaatatcgggagcgaatgacacacagacacggaacgcagtaccgaagaaacaggcatacaaagacactaaacaacatctaaca

SEQ ID NO: 726466 - DNA, 1617 bp, Homo sapiens
agaccccatctctaccaaaaaaaaaaaaaaaaaaaaagtgcaactagctgtgctgggtgattgggccctgtattcccagtgggcttgggaggtctgaggtggggaaaaattggcgtggggcctagagaagctgggcaggttatgggtggagaaacactggagatattggcgaccaattggcactggtagcctggagtgacagagcggagaccctgtctcaagaaaagaaagttattggggaagggtctatttaaaaggactctcttactttttaaatctcagggcggtggcaggcctcacggccttgtaactcccaggcattttgggagagggcttgaagcgcaaggcagaaattcacttgtgaggggctcaggagaggtctcaagaaccaagcctgtgggccaaaaactgggttgcaaaccccaattcttctttactataaaacattccaaagaacacttaaactgtgggggcaagtgaggtggcggggaccaccctgtgtataatctccccagagcatatacttgggggaagggacgtgagaggccagcgaagaaaactccctcttttgaaaaccccgtggggaaagggttttgacaagtgtgaacgcctcgtgaagatattacaccccaagctggtggcacttttacaggcccgtgggggtttggaccaagaaagcccaaaaaagttttcacaccgctttcaaaacaagacaaaacaaacacgagagattctgtgctacacttttttacagacaaatttctctccgaaccacccatagaaaatgcgaatttgtgcgcactttgggcgtaatacagcaatatatcgcctaataccattatatagccccatgtgttggaacagccaccacttgtgctcccgcgcgtgattttataacgcccgcggtgtgttcacccccatatttatcttgggaaggcggggccgaaacactttccaaacgtgttggggcggccccacacctctgatggtggaaagaccacgcctaaaacccgcgtttatttatatccccaagcaggaacgataactattttagagaccgcctggtgggtcacacacaagcatagtggacaccggcatacgatcagccagcgacctacaacattcgactcgcccaacctacttaaccagcgcgccacagtcgatcgacctacacacatacagcacacggaggggcgcggtagcacgcacaaataataaaaattaccttcacgacagcggggggcggacacacgttcattaataccagtcagtacgcaaccagcattagtagtttagttaagaacagaggggcgatcgtcccataatatagagaggtgtcgtatttaataatagacgataggagaaggtagtggtcgcacgatagatactaaccacacagttgatatgtgagtagaatcgaaacagatgattgatcagtagaagtactatgtatgaaggaagaaagacactatctctgtgggggtgatgcatatatttgtgatgactgagaatctacagtagaattatattaatcggtggaaacatataaatagatgcgtagatgtatatgaacaagacgatttggttgcgagtaagatgatcgtgtttatattctac

SEQ ID NO: 726467 - DNA, 175 bp, Homo sapiens
gcccctttattcctttaaggcccttttcccttaaaacctaattttaaaattgccttttttggcaaaataaccccaaaacctttaattttaattgaaaattttttttggctttaaagaggtggattgaaagaaaatttgaaatgactttatattatgcataaatatttatatttta

SEQ ID NO: 726468 - DNA, 180 bp, Homo sapiens
actaccaccatgtgagagctttatatattggtacatataaaaacttttctggggctgggcatggtggtgttgcttgtggtcccggctattcgggaggctgaggtgggaggattgcttgagcccacgagttcgagactgcaatgagctatgatcatgccattgtgcttcagtctgggtgat

SEQ ID NO: 726469 - DNA, 273 bp, Homo sapiens
tgcatggctcatgctgttatcttagcactttggtgaggcgagacaggcagatcacttgaggtcaggagtttgagaccatcctggccagcatggtgaagcctcatcttactaaaagtacaaaaattagctgggcatggtggtaggcacctgtaatcccagctactcaggaggctgaggcaggagaatttcttgaacccaggaggcaaagattgcagtgagccgacattgcgctactgcactccagcctgggcaacattgcaacacggtctctca

SEQ ID NO: 726470 - DNA, 775 bp, Homo sapiens
  misc_feature (338)..(338): n is a, c, g, or t
tccagcccccggtaccggaccctgcagccgcaaaaattttgatgcctaaaaaaaaccggtattgccatttataaactcctttttaaggagggagtcatggtggccaaaaaggtattgtccacttgcctaagcacccggagcgtggcaaacaaaaatgtgttgcccaacctttcatgtgttcagtaaaggccatgtgcagtcttctctcaagtctcccgaggtcatacgttgaaggaacagattgtgccgtggagcacatttctcatacgtggatacctttaccaatgtgagggatactccaggatattttccgtgattataccttctcatctctgtgncccccgggagaattgtgtgcctgtgccacccttacgccgttagccgttccaaagaactgtggcaggccactcggccataaaggctcgtggaagggttgagcgacctgtgcgagaacttcacaagaaggggaagcttgacagagaattccttacagacggagttgctgtgccacctgtggttgccgacaaaaaagccgaggctggggctgggctcagacacccgatttccagttataaagggcggatttgggctctgtggacgttggctcagccaccttcagtaaaattgggacaagcgactctctttgggctttgaaatatctttacagccaaaaaaccttaaaacaacaactaataacacaaaaaaaaaaacacagcgggcattttagtagggggccgcaaaaaagtctaataaagcaccataggaaacgattcca

SEQ ID NO: 726471 - DNA, 137 bp, Homo sapiens
  misc_feature (32)..(32): n is a, c, g, or t
tattgaggaagtattttgccttccctactcantgagaagtattgacttcgtggtacacattttaaagcatttttgatttgaatatttttgtacatttttatcaattattaaaccttctcttctagaaaaaaaaaaaa

SEQ ID NO: 726472 - DNA, 84 bp, Homo sapiens
ccaatctgaagtgggagaacagcttgagcctgggagccagacgccactgcactctagccttggaacacagccagaatctgtctc

SEQ ID NO: 726473 - DNA, 288 bp, Homo sapiens
taagcaagctggcagcccgggaacagtgcccacaccccgaggtgagcatctgacagcatggagcagaacccatagcccatggtgagcatctgacagactggatcagcacccacacatccaggtgagcatctgatggtctggagcagtacccacaaccacaggtgagcatctgacagtcaggagcagtgtccagacacccagagggtaacatttgacaggctggagacagatgaccatagccccaggtgatgcatctgacatcgtggtggaacatcctgcaaatccagg

SEQ ID NO: 726474 - DNA, 1071 bp, Homo sapiens
gttggcttacgcctgtaattccagcgctttgggaggccgaggcaggcagatcacgaggtcaggagttcaagatcaccctggccaacatggtgaaaccccgtctctactaaaaatacaaaagttacctgggcatagtggcagatgcttgtaatcccagctactcgggaggctgaggcaggagaattgcttgtgaaccgggaccctggaggcagaggttgcagtgagccaagatcgcacaactgcgaactgcgctccagcgtgggctgcagaggcagactccgtctcaagacaaaaaaaaaatcagcttatctttccttcccctgaatcttctgcagtgccagtatcatacctcaggcccacttgttacatgtagaaaaaaggccaaccaggttcatattcacgtatcaacccctgcagtaggagaaaaggccaatcctaggagctcaggatattaaccagaagacctatcagacagacttcccttgtatcagcccaaatcaagtcaccatgacactgcctaagccagcacccatgatgatcagggaactgccagtctataacacaagtcacctacaagcagaaactatagaagacaagaataaccctacatagtcaaaaggccaaataaaggaccatcctcagaggatgggacaacatgggcaccacgccatacctcagcaagcacacaacagtagcagcacgcagtgaataaccgcgcacgaaacaatcgcgaaacaggtccacaacagacacggaacggatgacaagcagacagaaccccaagaacgactacgaaacacgaaggacaccacacaaacggaacaacacaacgcgtggcacacatcagcgcagcagaggtgaacgcaatgaaaaaacagaccaaaaccggctcagaggaacaatcgggaccaccgcacccacacaacactgggagccggaacggacgcacacacgaaaccaccaaaggcgacccagggcagcaccagacgcatacacataccgaggccccacgccaccacccaacaaggcaacacgccgcaagcccagcacacacacatagcgaagcagaag

SEQ ID NO: 726475 - DNA, 692 bp, Homo sapiens
ggattgtctggtacacctggtcatgggtggtggtattctctgaaatctgtggttatgaaaattaggccaatatgattttattccaaatgtaatttaatcgctgctgttgtggggttctcgcttatctgctaatctcacgcattagttgtaaccagtgattttgacaataatactgccattctgtaatcatatccagtgcgcaatcatgataagctgttggtgagatagaatgcttttcattcttctcacttgcctttgttacttaatgtgcttctcagtacagcagatatgcaatattcaccaaataaatgttagacttgtgttcaatatttattgaatctcctgatgtgcacaatgggctcgtagataatgagcttgcatgtcagacgaaaaatcataaaaagcatggattgatatagccaatgacttaggagatacaagcataatatgcatatgtaaatgatgaatgcatgtggctaagaacaccatgaccaaaatccagcaaatcaactggattgcgaatctaaccgtagagacaataagatattatgagatgggattctgaatctcaggtttaggattacagagtggagactttccagcataacccaggatctttatcattacaaatacgcgtactcgtatctgaggaagtttatgtagagttatacaccttctgtcacagggctcat

SEQ ID NO: 726476 - DNA, 2824 bp, Homo sapiens
aaggcggagcggtccctgcaacccggccggcgggagctgccttctagtttttagtctcagaccagaccaccgggcgcaccccgatgccgagcccgcagcttctggtgctcttcggcagccagacaggcacggctcaggatgtgtcggagagactgggtcgcgaggcccggcgccggcggcttggctgccgggtgcaggccctggactcctacccggtggtgaatctgattaacgagcccctggtgatatttgtttgtgcaactacaggccaaggagacccccctgacaacatgaagaacttctggaggtttatattccggaagaacctgccctccactgccctctgtcagatggactttgccgtcctgggcctcggggactcctcatacgccaagttcaacttcgtggccaagaagctgcaccgacggctactgcagcttgggggcagcgccctcctgcccgtgtgcctgggcgatgaccagcatgagctggggcccgacgctgctgtggacccctggctgcgagacttgtgggacagggttctggggctgtacccgccgcctccgggcctcactgagatccctcccggagtccccctgccctccaagttcaccctgctgttcctccaagaggcacccagcacgggctctgaggggcagcgggtagctcaccccggctctcaggagcccccgtcagagtcgaagcccttcctagcacccatgatctccaaccagagagtcaccggcccctcccacttccaggacgttcggctgattgagtttgacatcttgggctctggcatcagctttgctgctggtgatgtggtgctgattcagccctccaactcggctgcccatgtccagcggttctgccaggtgctgggcctggaccctgaccagctcttcatgctgcagccgcgggagccagatgtctcctcccccacgaggctgccccagccctgctccatgcggcacctcgtgtcccactacctggacatcgccagcgtgcctcgccgctccttcttcgaactcctggcctgtctatccctccatgagctggagcgggagaagctgctggagttcagttctgcccaaggccaggaggagctctttgaatactgcaaccggccccgcaggaccatcctggaggtgctctgtgacttcccgcacacagctgccgccatccctcccgactacctgttggacctcatccccgttatccggccgagggccttctccatcgcctcctcgctgctgactcacccctcacggctgcagatcctcgtggctgtagtgcagttccagactcgcctcaaggagccccgccggggcctctgctcctcctggctggcatccctggaccctgggcaaggacctgtccgggtgcccctctgggtgcggcctgggagtctggccttcccagagacaccagacacacctgtgatcatggtggggcctggcactggggtagcccccttccgagcagccatccaggagcgtgtggcccagggccagactggaaacttcttgttttttggctgccgctggcgggaccaagacttctactgggaggctgagtggcaggagctggagaagcgggactgtctgaccctcatccctgccttctcccgggaacaggagcagaaagtatatgtgcagcaccggctccgggagctggggtcgcttgtgtgggaactgctggaccgccagggtgcatacttctacctggcaggcaacgccaagtccatgccagcggacgtctcggaagccctgatgtccatcttccaggaggagggtggactctgcagcccggacgcagccgcgtatctagccaggctccagcagacacggcgcttccagacagagacgtgggcctgaggcccgcggctgcccgtgccccctctgacagccatcctcctgggagcccaggaaggcatccacgagggagctcctggccagcagccgtcatcctctcggaccagccagctggtcctctgggaacagccagctcccgagcacagccgcactcctgttgaccctggatcccaccctttgagcctgaccccactgcagcctctgcccagccagccctgcgctcccccaccctgacagtgagctgtgtcctcgtccccccacccccttcccagtcaaggtggtggcctgggccgctccacctcaccggtgcagtgacccaggacggcatcagcagcccagtgagcaccaggggtggcatagggcacccatgaggctgcgctgcactcctctgccctggggccacctcggctgctgcagcctgcccagcagcacattccagtcactgcccccgcactcccacagggctcaggctgggctcagaggccactgagatgccagctccttgagagcagtgggggtgtcccaggccagagcagcctcttcctctcctggtcccagaaaaacccttgcagtaaaaaaaaaaaaaaaaaaaaataaaataaacaaacaaaaaaaaaaaaaaaacaataaatataaacaaaaaaaaaaaacacataaaaatcatacaatacctatcatcaatccacacaactagtatctgcacagcgcggcaacggagatatgaccgtattgtacaataagtacgaatgggggataccctggcagggcgcgctcctccggacagtgatcagcaactgaagcccaggacgtcgtcaccacgcgcctcagaatcttgacatagacggtgggagagacggatgtatgaggatacgagaaacaatagtcagagccgctgtccgcggttcggcgcgaacagaaagtgcaaaaagactaacgaggtcgatgggatg

SEQ ID NO: 726477 - DNA, 148 bp, Homo sapiens
  misc_feature (40)..(40): n is a, c, g, or t
  misc_feature (46)..(46): n is a, c, g, or t
  misc_feature (131)..(131): n is a, c, g, or t
tacaggatgctgtagctcccactggtgccaggtctcctanctcagntgggattataggcatgagccatcacacacaagatgttaccccttttccagatcttagcatctcacagatgggccactgcaacagntttcccactggccccca

SEQ ID NO: 726478 - DNA, 2851 bp, Homo sapiens
aaggcggagcggtccctgcaacccggccggcgggagctgccttctagtttttagtctcagaccagaccaccgggcgcaccccgatgccgagcccgcagcttctggtgctcttcggcagccagacaggcacggctcaggatgtgtcggagagactgggtcgcgaggcccggcgccggcggcttggctgccgggtgcaggccctggactcctacccggtggtgaatctgattaacgagcccctggtgatatttgtttgtgcaactacaggccaaggagacccccctgacaacatgaagaacttctggaggtttatattccggaagaacctgccctccactgccctctgtcagatggactttgccgtcctgggcctcggggactcctcatacgccaagttcaacttcgtggccaagaagctgcaccgacggctactgcagcttgggggcagcgccctcctgcccgtgtgcctgggcgatgaccagcatgagctggggcccgacgctgctgtggacccctggctgcgagacttgtgggacagggttctggggctgtacccgccgcctccgggcctcactgagatccctcccggagtccccctgccctccaagttcaccctgctgttcctccaagaggcacccagcacgggctctgaggggcagcgggtagctcaccccggctctcaggagcccccgtcagagtcgaagcccttcctagcacccatgatctccaaccagagagtcaccggcccctcccacttccaggacgttcggctgattgagtttgacatcttgggctctggcatcagctttgctgctggtgatgtggtgctgattcagccctccaactcggctgcccatgtccagcggttctgccaggtgctgggcctggaccctgaccagctcttcatgctgcagccgcgggagccagatgtctcctcccccacgaggctgccccagccctgctccatgcggcacctcgtgtcccactacctggacatcgccagcgtgcctcgccgctccttcttcgaactcctggcctgtctatccctccatgagctggagcgggagaagctgctggagttcagttctgcccaaggccaggaggagctctttgaatactgcaaccggccccgcaggaccatcctggaggtgctctgtgacttcccgcacacagctgccgccatccctcccgactacctgttggacctcatccccgttatccggccgagggccttctccatcgcctcctcgctgctgactcacccctcacggctgcagatcctcgtggctgtagtgcagttccagactcgcctcaaggagccccgccggggcctctgctcctcctggctggcatccctggaccctgggcaaggacctgtccgggtgcccctctgggtgcggcctgggagtctggccttcccagagacaccagacacacctgtgatcatggtggggcctggcactggggtagcccccttccgagcagccatccaggagcgtgtggcccagggccagactggaaacttcttgttttttggctgccgctggcgggaccaagacttctactgggaggctgagtggcaggagctggagaagcgggactgtctgaccctcatccctgccttctcccgggaacagcccccagccctgttctctgccctacaggagcagaaagtatatgtgcagcaccggctccgggagctggggtcgcttgtgtgggaactgctggaccgccagggtgcatacttctacctggcaggcaacgccaagtccatgccagcggacgtctcggaagccctgatgtccatcttccaggaggagggtggactctgcagcccggacgcagccgcgtatctagccaggctccagcagacacggcgcttccagacagagacgtgggcctgaggcccgcggctgcccgtgccccctctgacagccatcctcctgggagcccaggaaggcatccacgagggagctcctggccagcagccgtcatcctctcggaccagccagctggtcctctgggaacagccagctcccgagcacagccgcactcctgttgaccctggatcccaccctttgagcctgaccccactgcagcctctgcccagccagccctgcgctcccccaccctgacagtgagctgtgtcctcgtccccccacccccttcccagtcaaggtggtggcctgggccgctccacctcaccggtgcagtgacccaggacggcatcagcagcccagtgagcaccaggggtggcatagggcacccatgaggctgcgctgcactcctctgccctggggccacctcggctgctgcagcctgcccagcagcacattccagtcactgcccccgcactcccacagggctcaggctgggctcagaggccactgagatgccagctccttgagagcagtgggggtgtcccaggccagagcagcctcttcctctcctggtcccagaaaaacccttgcagtaaaaaaaaaaaaaaaaaaaaataaaataaacaaacaaaaaaaaaaaaaaaacaataaatataaacaaaaaaaaaaaacacataaaaatcatacaatacctatcatcaatccacacaactagtatctgcacagcgcggcaacggagatatgaccgtattgtacaataagtacgaatgggggataccctggcagggcgcgctcctccggacagtgatcagcaactgaagcccaggacgtcgtcaccacgcgcctcagaatcttgacatagacggtgggagagacggatgtatgaggatacgagaaacaatagtcagagccgctgtccgcggttcggcgcgaacagaaagtgcaaaaagactaacgaggtcgatgggatg

SEQ ID NO: 726479 - DNA, 1234 bp, Homo sapiens
gctccttcaacttccggcaccgagctacttggacgcttggcgacagtgaatcgagaatagccagtgcattcttgtctctggtgctacatccgtccatgcgtggacagagccgtgtgcgtgccgtggtcgcacatgtctcacctggcatgaggatcgccctagggcagattgctgaccagaagacagatacttgcaccaccaatgagatgcagtgatcagcccaatcattcaggacctagattcagcccgcgcaatgcttgggttgacgtttcggccctttcgaggctattgaccagtcatgctaggcaagaggccaggtcccaataggcaagcaatatcttcttctctccagtcgagcatcagcatggcgagcgcttagcgaagatgcgtacttccaccattggggtggatcgaaggatttgaggcgtcactgattgaaagtccgtaggaaggagtctgagattgtccggatcgtcgtactggtaggatacccaggcaggctgcaagtatcctacttgcaaaggggctttaccatggtagccttccattccggttaccgccctcaaatgcgatggctaaggactgaagaacaagaacgtcccaagtgtatgatccgacgccgggcaagagtgggcccattggttaccgtccaaggtgcagggagccattaggagaggatacggctgggaaatagaggctggtatatgggacgtggaagctggtttgagtacacttggtttgatattccacgacccctcaagtaatgacccattttccagcttgtgtcgaattcttttccgtgcggggaacgagacccgcacgttgaacgagcgtcccaattcattggtctcaggtactctaggcctgaaagtcttagcgattggcaacgtacgctagtgctcaccgtccataaggggggacatatacattacgctcgagggagttaactgcgtccaacagagagcagtgctttagcacggagtaggtaacaccctagtattacagcgaccatactggggttgcaaaaattggatcaacctcgtgttcacttttgacgacagggccatgatgtggtgtcactgaaagtcacacccttggtgcaacagaatcaggggacaacaagccgaagtgaggaaagaagcgatccatggccaaacggatgtggtacccctagtggcttgggaacccgcacaccgtgtgacacgtgtggtggcgcctcagtacgttgtaacgg

SEQ ID NO: 726480 - DNA, 782 bp, Homo sapiens
gactctgggcaggatccagacctgtcgctccagctgctcttgtagagtccacagtataccccgtaagccatggcaagcaaagggcttgcgggacctgaaatgcaacagtgggggagcgggagaccgtccatagaagcctgtggtcaggctgtccgggagcgatcagctcacgtcagagtagggtgaaccatggaccatcagaggcgtgtgggcaagaaaaagcccattggggccaagactgactccacaggacaccaccacaagagtacataatcaatccgatagagactttggataaagtcaagagccttagtgaggggcacttactctgaggagagattgggcgaaaagataagttgacggcgccttccattgaaaattagtacttcgcatgagagctgacttttgggagtcggcgcctcccttgaaagtagcaccagtagaggaagaacttgggtggtgacctcgctctttactagtccgggtataacatagtcatatgtctagtccccttggtctccggggaatatagccatacttcttggatcttggccccccttcatgttagacacttctctagggttcttccgagtaacattaccatatattgtcctttatagtgtcatgggctttattttcactttactcatacactgtttcccaatgttccaatctggtacttggttaaccattgttgccaaagaatagcacaaagaaaaccactttacaaccttcaaatttagcgaaaaaaaactcctctttggcaagaaaagggggcccaa

SEQ ID NO: 726481 - DNA, 621 bp, Homo sapiens
  misc_feature (31)..(31): n is a, c, g, or t
  misc_feature (47)..(47): n is a, c, g, or t
cggcacgaggcaggccctggactcctacccnggtggtgagggctcgntagggcctcggcgtgggggacgagcaggcctggcgtgcccgcctcgcggggtcatcgacccaaaaggcgtcgcattttctctgagagcgggtctttcccttatggcggatttagggaaggaggtttgggaaggggagttcagtttagcacctggaggaggttggaacctgaaagagaagacggtctggctgctcacataaatccctctgccctgtcagcctgagtaaaggagaagggggtcaagtttgggaaggacgcccggtccttacagccggaggtcttacgtgtgtgtgtcttttgttgaggtgaatctgattaacgagcccctggtgatatttgtttgtgcaactacaggccaaggagacccccctgacaacatgaaggtaaggctggcctgatgtggctcctcagatccctgccctcgaccctcaccccgttttcattgcctggcgtctaggtgcagtaaatagctctcctttatctcatgcaccttcagaggtggatttgagagaacgtccgtgagtggggctgggggctccggttgccctctctaataaactcgtcgtagccacca

SEQ ID NO: 726482 - DNA, 2726 bp, Homo sapiens
aaggcggagcggtccctgcaacccggccggcgggagctgccttctagtttttagtctcagaccagaccaccgggcgcaccccgatgccgagcccgcagcttctggtgctcttcggcagccagacaggcacggctcaggatgtgtcggagagactgggtcgcgaggcccggcgccggcggcttggctgccgggtgcaggccctggactcctacccggtggtgaatctgattaacgagcccctggtgatatttgtttgtgcaactacaggccaaggagacccccctgacaacatgaagaacttctggaggtttatattccggaagaacctgccctccactgccctctgtcagatggactttgccgtcctgggcctcggggactcctcatacgccaagttcaacttcgtggccaagaagctgcaccgacggctactgcagcttgggggcagcgccctcctgcccgtgtgcctgggcgatgaccagcatgagctggggcccgacgctgctgtggacccctggctgcgagacttgtgggacagggttctggggctgtacccgccgcctccgggcctcactgagatccctcccggagtccccctgccctccaagttcaccctgctgttcctccaagaggcacccagcacgggctctgaggggcagcgggtagctcaccccggctctcaggagcccccgtcagagtcgaagcccttcctagcacccatgatctccaaccagagagtcaccggcccctcccacttccaggacgttcggctgattgagtttgacatcttgggctctggcatcagctttgctgctggtgatgtggtgctgattcagccctccaactcggctgcccatgtccagcggttctgccaggtgctgggcctggaccctgaccagctcttcatgctgcagccgcgggagccagatgtctcctcccccacgaggctgccccagccctgctccatgcggcacctcgtgtcccactacctggacatcgccagcgtgcctcgccgctccttcttcgaactcctggcctgtctatccctccatgagctggagcgggagaagctgctggagttcagttctgcccaaggccaggaggagctctttgaatactgcaaccggccccgcaggaccatcctggaggtgctctgtgacttcccgcacacagctgccgccatccctcccgactacctgttggacctcatccccgttatccggccgagggccttctccatcgcctcctcgctgctgactcacccctcacggctgcagatcctcgtggctgtagtgcagttccagactcgcctcaaggagccccgccggggcctctgctcctcctggctggcatccctggaccctgggcaaggacctgtccgggtgcccctctgggtgcggcctgggagtctggccttcccagagacaccagacacacctgtgatcatggtggggcctggcactggggtagcccccttccgagcagccatccaggagcgtgtggcccagggccagactggaaacttcttgttttttggctgccgctggcgggaccaagacttctactgggaggctgagtggcaggagctggagaagcgggactgtctgaccctcatccctgccttctcccgggagcaacgccaagtccatgccagcggacgtctcggaagccctgatgtccatcttccaggaggagggtggactctgcagcccggacgcagccgcgtatctagccaggctccagcagacacggcgcttccagacagagacgtgggcctgaggcccgcggctgcccgtgccccctctgacagccatcctcctgggagcccaggaaggcatccacgagggagctcctggccagcagccgtcatcctctcggaccagccagctggtcctctgggaacagccagctcccgagcacagccgcactcctgttgaccctggatcccaccctttgagcctgaccccactgcagcctctgcccagccagccctgcgctcccccaccctgacagtgagctgtgtcctcgtccccccacccccttcccagtcaaggtggtggcctgggccgctccacctcaccggtgcagtgacccaggacggcatcagcagcccagtgagcaccaggggtggcatagggcacccatgaggctgcgctgcactcctctgccctggggccacctcggctgctgcagcctgcccagcagcacattccagtcactgcccccgcactcccacagggctcaggctgggctcagaggccactgagatgccagctccttgagagcagtgggggtgtcccaggccagagcagcctcttcctctcctggtcccagaaaaacccttgcagtaaaaaaaaaaaaaaaaaaaaataaaataaacaaacaaaaaaaaaaaaaaaacaataaatataaacaaaaaaaaaaaacacataaaaatcatacaatacctatcatcaatccacacaactagtatctgcacagcgcggcaacggagatatgaccgtattgtacaataagtacgaatgggggataccctggcagggcgcgctcctccggacagtgatcagcaactgaagcccaggacgtcgtcaccacgcgcctcagaatcttgacatagacggtgggagagacggatgtatgaggatacgagaaacaatagtcagagccgctgtccgcggttcggcgcgaacagaaagtgcaaaaagactaacgaggtcgatgggatg

SEQ ID NO: 726483 - DNA, 2958 bp, Homo sapiens
  misc_feature (31)..(31): n is a, c, g, or t
  misc_feature (47)..(47): n is a, c, g, or t
cggcacgaggcaggccctggactcctacccnggtggtgagggctcgntagggcctcggcgtgggggacgagcaggcctggcgtgcccgcctcgcggggtcatcgacccaaaaggcgtcgcattttctctgagagcgggtctttcccttatggcggatttagggaaggaggtttgggaaggggagttcagtttagcacctggaggaggttggaacctgaaagagaagacggtctggctgctcacataaatccctctgccctgtcagcctgagtaaaggagaagggggtcaagtttgggaaggacgcccggtccttacagccggaggtcttacgtgtgtgtgtcttttgttgaggtgaatctgattaacgagcccctggtgatatttgtttgtgcaactacaggccaaggagacccccctgacaacatgaagaacttctggaggtttatattccggaagaacctgccctccactgccctctgtcagatggactttgccgtcctgggcctcggggactcctcatacgccaagttcaacttcgtggccaagaagctgcaccgacggctactgcagcttgggggcagcgccctcctgcccgtgtgcctgggcgatgaccagcatgagctggggcccgacgctgctgtggacccctggctgcgagacttgtgggacagggttctggggctgtacccgccgcctccgggcctcactgagatccctcccggagtccccctgccctccaagttcaccctgctgttcctccaagaggcacccagcacgggctctgaggggcagcgggtagctcaccccggctctcaggagcccccgtcagagtcgaagcccttcctagcacccatgatctccaaccagagagtcaccggcccctcccacttccaggacgttcggctgattgagtttgacatcttgggctctggcatcagctttgctgctggtgatgtggtgctgattcagccctccaactcggctgcccatgtccagcggttctgccaggtgctgggcctggaccctgaccagctcttcatgctgcagccgcgggagccagatgtctcctcccccacgaggctgccccagccctgctccatgcggcacctcgtgtcccactacctggacatcgccagcgtgcctcgccgctccttcttcgaactcctggcctgtctatccctccatgagctggagcgggagaagctgctggagttcagttctgcccaaggccaggaggagctctttgaatactgcaaccggccccgcaggaccatcctggaggtgctctgtgacttcccgcacacagctgccgccatccctcccgactacctgttggacctcatccccgttatccggccgagggccttctccatcgcctcctcgctgctgactcacccctcacggctgcagatcctcgtggctgtagtgcagttccagactcgcctcaaggagccccgccggggcctctgctcctcctggctggcatccctggaccctgggcaaggacctgtccgggtgcccctctgggtgcggcctgggagtctggccttcccagagacaccagacacacctgtgatcatggtggggcctggcactggggtagcccccttccgagcagccatccaggagcgtgtggcccagggccagactggaaacttcttgttttttggctgccgctggcgggaccaagacttctactgggaggctgagtggcaggagctggagaagcgggactgtctgaccctcatccctgccttctcccgggaacaggagcagaaagtatatgtgcagcaccggctccgggagctggggtcgcttgtgtgggaactgctggaccgccagggtgcatacttctacctggcaggcaacgccaagtccatgccagcggacgtctcggaagccctgatgtccatcttccaggaggagggtggactctgcagcccggacgcagccgcgtatctagccaggctccagcagacacggcgcttccagacagagacgtgggcctgaggcccgcggctgcccgtgccccctctgacagccatcctcctgggagcccaggaaggcatccacgagggagctcctggccagcagccgtcatcctctcggaccagccagctggtcctctgggaacagccagctcccgagcacagccgcactcctgttgaccctggatcccaccctttgagcctgaccccactgcagcctctgcccagccagccctgcgctcccccaccctgacagtgagctgtgtcctcgtccccccacccccttcccagtcaaggtggtggcctgggccgctccacctcaccggtgcagtgacccaggacggcatcagcagcccagtgagcaccaggggtggcatagggcacccatgaggctgcgctgcactcctctgccctggggccacctcggctgctgcagcctgcccagcagcacattccagtcactgcccccgcactcccacagggctcaggctgggctcagaggccactgagatgccagctccttgagagcagtgggggtgtcccaggccagagcagcctcttcctctcctggtcccagaaaaacccttgcagtaaaaaaaaaaaaaaaaaaaaataaaataaacaaacaaaaaaaaaaaaaaaacaataaatataaacaaaaaaaaaaaacacataaaaatcatacaatacctatcatcaatccacacaactagtatctgcacagcgcggcaacggagatatgaccgtattgtacaataagtacgaatgggggataccctggcagggcgcgctcctccggacagtgatcagcaactgaagcccaggacgtcgtcaccacgcgcctcagaatcttgacatagacggtgggagagacggatgtatgaggatacgagaaacaatagtcagagccgctgtccgcggttcggcgcgaacagaaagtgcaaaaagactaacgaggtcgatgggatg

SEQ ID NO: 726484 - DNA, 118 bp, Homo sapiens
aagatttttcctagtgtcaaagagctgtcctcttcggactaacagttaaatttacaaggggatttagagggttctggtgggcaatttaaaagttggaactaagattctatacttggac

SEQ ID NO: 726485 - DNA, 798 bp, Homo sapiens
agcgggggaggcggagcttgcagtgagctgagatcgcgccactgcactccagccaggcgacagagccagactccgtctcaaaaaaaaaaaaaaaagattcagtgaagctaatttcccatacccatcacctcaccacatggtcatcccaaaagtgggacttgatccctttaggagtgctggtcctatggcttgtggaaagggatggagacatttggttgcatttttcacccattttcacagtacatataaatcattctgtggggaaaaaaatggcagatgatagaccaccgtgtgctatggtagaagccagagggtgctcaagggtcttcagccaccatctggtgcattctctgccagtcatagaactttaggagttacacagtacgatagtaaagaacatctgggtcaagggtcacttcatcatggatttagtaattccatctgatcattcctaacggtcttatagggtaaggtgatatgtgaaaacattttgactttgacttgcttattggaggctaagttatacagttccactttgtggtaaactgcaactacttcatcaaggaaggatataaggaattccaaaaccgaggattctagctgaggggtttaatagtattagtagatacggatagggtgggcaaaacatttcgggaagacttcatgccacaatacattggacatggaaatatgtagcgcttctacctaggtacatgcggggaccaggaacctagtactgggataacctgatttaaacagaaacctttaagaataagggtcccgatccggggtaccata

SEQ ID NO: 726486 - DNA, 1120 bp, Homo sapiens
  misc_feature (225)..(225): n is a, c, g, or t
  misc_feature (245)..(245): n is a, c, g, or t
  misc_feature (283)..(283): n is a, c, g, or t
  misc_feature (378)..(378): n is a, c, g, or t
  misc_feature (418)..(418): n is a, c, g, or t
  misc_feature (424)..(425): n is a, c, g, or t
  misc_feature (428)..(428): n is a, c, g, or t
  misc_feature (467)..(467): n is a, c, g, or t
  misc_feature (469)..(469): n is a, c, g, or t
  misc_feature (475)..(475): n is a, c, g, or t
  misc_feature (477)..(477): n is a, c, g, or t
cttcgtctgtgccgtctgcctcaagcagctcaacaatgggcaccttcaagggagcagaacgacaagccttactgtcagaactgcttcctcaagctcttctgctaggtgccctgcccctgtctctgccccccattccccagcacatgcatccccaactgcgacgtgtgaccgtagagacttcacccgggggtgaaggggtaaacccgactgaaactggaacccttntcctccgctggtgcgggatngacagagggccatgaggggtccccctgcttgtcttcanccctgccagagcctctgggccccctcctccctcctgtagctctccctaggctgcccactctccatcctccccagggtagaggctgggggctccancccagcccatgtacgtccccacagaactggcctggccagnaccccnncantgagccatctcttcctcatatttcagcagtgcagccggngnggcagngnaacgggcaggcaggggtctgctagaggtgtcgtcgttgtttagtcctgtattgcctaccctcgcgatcctagacttgtcttctgcttctgctgaattcatttggtggggacaccacgagctcccatccagcacctaatgccatggccatacaatttccagtcccatccaagaggacgagagacaccacaaagcgaggtccatgtgcaacggttcctctgttgcttcctcgctacacacttcgcagtgtccgctaggccctgcgcgacgtgcacacctgcccttctctagcacccgtcctcatcccccttattataacctcgcgtcttgattcttcactgcacgaacacgcctctccagccaactaactgtctatccctacgtcacattccctccgtccttccgcggcacacgctgttgcctgcgacacctgtacccgcacctactcactacattttcttaccacctgcaggctttgcacattccattacttcgccctgagctttgccattctacgtatcctctataccaacacatgacttcttgacacgcacgattctaacacgaccttcccctttggtacttctcctttcccctcctccaccggccctggggcctgtcactccctggcggccctggtgtcac

SEQ ID NO: 726487 - DNA, 750 bp, Homo sapiens
  misc_feature (225)..(225): n is a, c, g, or t
  misc_feature (245)..(245): n is a, c, g, or t
  misc_feature (283)..(283): n is a, c, g, or t
  misc_feature (378)..(378): n is a, c, g, or t
  misc_feature (418)..(418): n is a, c, g, or t
  misc_feature (424)..(425): n is a, c, g, or t
  misc_feature (428)..(428): n is a, c, g, or t
  misc_feature (467)..(467): n is a, c, g, or t
  misc_feature (469)..(469): n is a, c, g, or t
  misc_feature (475)..(475): n is a, c, g, or t
  misc_feature (477)..(477): n is a, c, g, or t
cttcgtctgtgccgtctgcctcaagcagctcaacaatgggcaccttcaagggagcagaacgacaagccttactgtcagaactgcttcctcaagctcttctgctaggtgccctgcccctgtctctgccccccattccccagcacatgcatccccaactgcgacgtgtgaccgtagagacttcacccgggggtgaaggggtaaacccgactgaaactggaacccttntcctccgctggtgcgggatngacagagggccatgaggggtccccctgcttgtcttcanccctgccagagcctctgggccccctcctccctcctgtagctctccctaggctgcccactctccatcctccccagggtagaggctgggggctccancccagcccatgtacgtccccacagaactggcctggccagnaccccnncantgagccatctcttcctcatatttcagcagtgcagccggngnggcagngnaacgggcaggcaggggtctgttggggtctcttctttatccttatatcctcccaccgagctaattgtcttagtggctcgtgactctatgggggagacacccgggtcccgtccagaaaatgccagcataaatccatccatccaaaggcagagaacccacaggggcaagggaagggttcccgggctcctagcgtaacctttcaagtgccctaaggactgcggaaatggcgccggcctttaaaaccggcctctcccacttaaaacgggctggacaaa

SEQ ID NO: 726488 - DNA, 149 bp, Homo sapiens
cggaatcgatggatggtggtctctagagtctccaatcattggttacgatagtcacgcggacccaaccaagtagtctgcatctgccaacattgctcagaccagaagttatgacttcaagcactgatgccacagttttgaagatgagctta

SEQ ID NO: 726489 - DNA, 225 bp, Homo sapiens
tagctgttcagaggatcccgtccactgttcgactctgtaattcgaaaaataatgttagtaaataatcttaccttaaaatgttagtcaaagatagttttgtctctcccctcattttttttttttggccttggtttggtttttttccctgaaaagtctcaggtattaacccggatcggtaagtttccttcactaagtattttggaagcttaataataaatgaagtgt

SEQ ID NO: 726490 - DNA, 215 bp, Homo sapiens
ttacaaccccacgatcactcacaaccccaccatcacagccaccatcaccctccttaacctctacttctacctacgcctattttacaccaagccccgtgatcgtggggttgtaattacaaccccacgatcactcttcccctataaggggaaataaaataaacattctttagctagttgcttggcaataggtattcgtggtgtgttgaattcaacta

SEQ ID NO: 726491 - DNA, 914 bp, Homo sapiens
ttgtgtaggctggatgtgagtcggacgagtgtggtagctagagtgtagctatacgcctagtgctgaagagtgatccatgatttggaaacgggagctgctgctggcgagtggaatggctgcaccggtttgaggagagcctggtccccactctcaatggagaggtgtgaaagcctgggtggacatttattcccagctacagcaggaggtaggggcggctggtggggagcttgagcccaagacccggggatcgctgactggccggctgatagaagtgctgagaaccctcggttcaacagtttggtcgtttctctgtgtcggagtaacgtcatgactcgtccagagtactgaagcactcacgaccacagttccagcgctggatgttcgcattcctcgttgggacttgagtgttcctgtggggctcccagaccaatgcctcctgctgtgtcaggtgccgacatgtgtgaccagagacagcagtgcgcgggagcttgagtgtgcctcagcggtccttgggtgctggaagcagacaagcacctggagaaactcatcacacaacgactgtgcccttggagacacagcattccctgggaacgtgctgctctgccctgttcaagaacctgcttctcaagaagatcaagcggtgtgagcggaagggcactgagtctgtcacagaggagaagtgcgctgtgctcttctctgccagcttcacacttggccccggaaatccccatccagctccaggccttttctctgcccctggtggtcatcagtccatggaaaacaagagaaacaaatgccaaagccaatatcctggtgggacaatgccttctctgagatggaccggtgctctttgtggtgcctgagcggtgccctggggagagcatggtgaaccccttgaaccggagttcatggtg

SEQ ID NO: 726492 - DNA, 192 bp, Homo sapiens
tgctcagatgttgcccttgcacagctgagtcggctgactgtgcagacaacacggaactgttgcaaaattggtaactaacaaatgcttggatggttaatcacagggtcagttggttgaagagagtccttgcttttctttctttcttttttttccctttttttcggaaacacgtcgtcgcttcacacgtcgtgc

SEQ ID NO: 726493 - DNA, 640 bp, Homo sapiens
  misc_feature (1)..(1): n is a, c, g, or t
ntggtgtggtgtgtagatgcccccaacgaatgaacagcatggggggcaaggcatcccgttcttgcttaaaagaggtagtgggtagtgaccatcgcaaggtgcttcatggactcccatggcgctcgccccaacatagcgcgaccagtggtgtatttgtagtggcagcgccgctcccctctcgcccgtgttgaaggctagcgcttctgttggagattatgtagcagagcgatcgccacaccgtggctatcttctcttcccccggaggaagacctctttcttagcgaggtctaaagcaaatagagttgaccaaacgttcgaattcatggtcttcccttggggcagacgggtacaataaaccattcataggaggtccgttgtttttgaggaagcgtggccagacccacaccggcctgttatctcctttaaggggacatcgcatctgggtagttctctccggtcgctctcccgcaagattgcccccggagacacctgctcgggctcctattagatacgccccgcttcattgttcggagcgaacatcacttcgaggagcgtcgtatttcgcccttgggcaaaggattatagctgtttttggattggcttgaaaaaacaaatgccgtttttaaccggaaacataaac

SEQ ID NO: 726494 - DNA, 231 bp, Homo sapiens
ttagatgaaaggcacacgctactccgcctggcttatttcaaaaaatcaggctggacacggtggcttacgcctgtaatcccagcaagttgggaggccgagaacggggcactgcttgagtctggcagttcaagaccagtctggacaacaaggcaaaaccccatctccacaaaaacaaatagaaaaattagctgggcatggtggtgcatacttgtaattccagctacttgggag

SEQ ID NO: 726495 - DNA, 1059 bp, Homo sapiens
tccaggtgcacggctgtggatggaagacaggcattggcctgtgcttcagcgaccagagatgggcatgtcagagctgcgagctgggggctcttttcctggtcattgccgtgcggtgctgtagtggcaaatgttcccagatttaactatagggggcggtccagggctgtgtgagtgtgtctttctgtcgtctactggcgctcgcggccgcgtgacgtattgtgctcgaaggatctgtcccgttcgcaggcagtcgccctcctcgcgctagctcgctggatccccctactaggtcggtctggtgccttgtccgctgtcgtcaaccgcctcgccctcctagggctctgatgcctctcgaagtggaccccagcgccattgcacgagaacgggggcctctgggtgcggctcgtctcacgctgtctcctatgcaccttgttcccttttattgtccagcccattgccgtcgttgcccctgcggcatgggccttccgcgtgcgtccgtctagggcccaccctcgcgtgtcgtcctggtcgtggtacagggccccttgctgatgtgtgccccttgcttctcttgccacctggggtccattccgccttcttgcgacagggtccccactctcgtgtcaccagggccagaggtggcgccttaggagccctggaagaatgcatcctctgctcacacctccggcccgagcttctggcagcgggttcagtcaccgggcacggagggactcggtgcccggcgacttgacgatacttgcaagacgccagcgcttgctccccggctccttgcggaataaggtgcccacatggaaccttccggccctggatgatccaggaagcaaaagcctggacctccaaagcccactgtgacaccctgccgacgcggggaaccacaacagcggcggggactacaagatacccccgggggccatcctcccccccacctttctcacacagcccataagaggcctaacccacacggcgcacacacaagcgccaccaaacaactccctctgggcccttcgggcacacccaccaacccggcacacgcatcta

SEQ ID NO: 726496 - DNA, 563 bp, Homo sapiens
gacatatccctaaccagaacaagagtgcccgtgcaggcatgctgtgggtgatcaggccacgtttccactcagatggagtggggcaagttccaaagactagtcttaccaagtcaagccaagtcaaaaccagaacaaaagtgccaatacaggcacaccgtgggtgatcaggccacgcttccactcacgtggagtggggcaggttccaaagactagtcttaccaagtcaagccaagtcaaaagcagaacaaagatgtcaatacaggcacaccgtgggtgatcaggccatgcttccactcacatggagtggggcaagtaccaaagactagtctggacaagcttcagatgtcgggactgcaagggccagttccttcccggtgtacagccagtgtcaatcctactcgggagccggctatgcgcggctctggcaaggcgttccaccgggggcatttcctacccgggagcgctctttggattgcgtcactcaggctggccggagtcctctgcagggacgctccacgggtctcacagggcttgtcagtcacctcgcttcctggttagggatg

SEQ ID NO: 726497 - DNA, 277 bp, Homo sapiens
  misc_feature (19)..(19): n is a, c, g, or t
  misc_feature (183)..(183): n is a, c, g, or t
gttcaagaccagcctgggnaacatagtgagatctctattgctaatttaaaaacaaaacgaaacaaaaaaagtttggcaccgtggctcacacctgtaatctcagcagtttgggaggccgaagtagggggatcacttcagcccaggagttagagaccagcctgagcaacatggcaaaaccctgtntctgcaaaaaagtacaaaatttagcagggcgtggtggtatgcgcctgtagtcccagctactcaggagactgaggtgggaggttcacttgagccc

SEQ ID NO: 726498 - DNA, 425 bp, Homo sapiens
gtcttgtaaggtaggttgatgggtaacaaattccttcaggcattggcgtatatcctaaaagaatgcattttgccttgtattacaaagtttagttaggcgatatatggaatggctggttgaaatttcttttgggaaggagtgtgataataggcctccaaactcttctggttggtacagtttctgcggacagggtctggtgtaagccggatggagttcccagtggtaagtgatctgccccttctctctagctgtctttaagattttttctttcatgctgacctaggagaatctgacgactacgtgtctgggggatgatcgtcatgcatagtatctcacaggggtttactgaattgcttgaatttgcatgtggcctcggtagcaagattggaacaaatttggtgaaccgtatcctgaaatatgtgatc

SEQ ID NO: 726499 - DNA, 286 bp, Homo sapiens
  misc_feature (124)..(124): n is a, c, g, or t
ctgccctataatcgacatggccagtgcctgggcaaagagggcccgaggaaacgttttcatgtaccatgctcctgaaaactacggccatggcagcctggagctgctggcggatgttcagtttgcnttggggcttcccttctacccagcctatgaggggcagttttttttggaggagaagagcctgtcgctgaaaataatgcagtacttttcccacttcatcagatcaggaaatcccaactacccttatgagttctcacggaaagtacccacatttgcaaccccctgg

SEQ ID NO: 726500 - DNA, 296 bp, Homo sapiens
tgactctagacgatccccctaggtggaaacgcgacgttaggtggagtacgtggaatacaggtcaacgggcagagctcttggcccctgtggggcagggcgaggcatggcagatagagtacgtgggatacagtgtcacgggcagagttcttggcctcaatgatgcctcctgatctatcgctgggcctggacgaccaacactgggatgatgacgagcagaatggtcatgaagatgcccaaaatcagggcccagatgttcaggcacttggcggtggcggcataggcctgggccccggttc

SEQ ID NO: 726501 - DNA, 112 bp, Homo sapiens
tcagccatgtgaatatgcagtatcctaccacacttgcctctttctggctcgaattgcctctttctgattattccccattaattatcagatgcagctctctgtctctgacgct

SEQ ID NO: 726502 - DNA, 872 bp, Homo sapiens
  misc_feature (320)..(320): n is a, c, g, or t
  misc_feature (342)..(342): n is a, c, g, or t
  misc_feature (429)..(429): n is a, c, g, or t
tcaccgaaggtgagggatcatgatctgtaggtgtaagctgggtagaagtatagtctattccatcgtatctcacagggcaagggaggtgaagtaaaatcataattagagtaagatgctgtaaatatatataattgatgtgaatcaaaaatttgaatcagtatcaaagatgactaattacaaatatgtaatgggagaaagtcagaaccggggaactctgattggaaatgtacccttctagacacagttgtaaaggagccacatatatttctctgatagtttaatgtgccaagtatcagtatggccagcaaatgggtagcttngtgataataagataaacccttntacgtgccactgcaaactctttatgaggtggcagggtagaaaaaccaactacctgttcatacatatacctccccaatagcttttatnggtatatattgtacaattgttaaaacattttacttcatttgatctccataaccacctttgaagtctgcaggctagataaggttactgttttgcagagggaaaaggagattcaaagaagtgacgtgacttgccaaatgcagcatgacacataagtgtagggcactctattttgagtcgaacagaactgggtccaaatcctagtcttgtcattttgtgaccttaaaaaaactgctgggtgtggtggctcacacctgtaatcccagcattttgggaggccaaggtgggcagatcacccgaggtcaggagttttgagagcagtctggccaacatggcaaaaccccgtctccactaaaatcacaaatattagccaggcatggtgcgggcgcctgcaatcccagctactcgggaggctgaggcaggagaatcgctcgaacccaggaggt

SEQ ID NO: 726503 - DNA, 148 bp, Homo sapiens
acagtcagcagaactggtatctaaacgtgcagtaagattctgctgctatttgggttagtgggttattgacttaaggccattcattataacttattttgagactcgaccccaaactctaaatagagattaaaacatacaatccgttgag

SEQ ID NO: 726504 - DNA, 404 bp, Homo sapiens
  misc_feature (23)..(23): n is a, c, g, or t
  misc_feature (107)..(107): n is a, c, g, or t
  misc_feature (403)..(404): n is a, c, g, or t
tcccccaccctcagccatccccnaaagcatgggtgaccccaattttgattttctagttaatgttttttccctaaagttatggaataggatttaaggtttaaagatgnaagaaagagcagggccttggcacaccttgccttatgccctgtaatcacagcactttggaagactaaggtggttggatcacttgaggtcaggagtttgagaccagcgtggccaacatgatgaaacccggtctccactaaaaatacaaaaattagccaggcatggtgatgtgtgcctgtaatcccagctacttgggaggctgaggcaggagagtcacttgaacccaggaaatggaggttgcagtgagccaaaatcccacaactgcactcctgggtgacagagcaaaactccatctaann

SEQ ID NO: 726505 - DNA, 950 bp, Homo sapiens
  misc_feature (26)..(26): n is a, c, g, or t
  misc_feature (116)..(119): n is a, c, g, or t
  misc_feature (138)..(138): n is a, c, g, or t
  misc_feature (156)..(156): n is a, c, g, or t
  misc_feature (162)..(163): n is a, c, g, or t
  misc_feature (189)..(189): n is a, c, g, or t
  misc_feature (198)..(198): n is a, c, g, or t
  misc_feature (267)..(267): n is a, c, g, or t
  misc_feature (276)..(276): n is a, c, g, or t
  misc_feature (279)..(279): n is a, c, g, or t
  misc_feature (285)..(285): n is a, c, g, or t
  misc_feature (290)..(290): n is a, c, g, or t
  misc_feature (294)..(294): n is a, c, g, or t
  misc_feature (299)..(299): n is a, c, g, or t
  misc_feature (361)..(361): n is a, c, g, or t
  misc_feature (368)..(368): n is a, c, g, or t
  misc_feature (387)..(388): n is a, c, g, or t
  misc_feature (400)..(400): n is a, c, g, or t
  misc_feature (407)..(408): n is a, c, g, or t
  misc_feature (419)..(419): n is a, c, g, or t
  misc_feature (422)..(422): n is a, c, g, or t
  misc_feature (425)..(425): n is a, c, g, or t
  misc_feature (431)..(431): n is a, c, g, or t
  misc_feature (435)..(435): n is a, c, g, or t
  misc_feature (437)..(440): n is a, c, g, or t
  misc_feature (466)..(466): n is a, c, g, or t
  misc_feature (470)..(470): n is a, c, g, or t
  misc_feature (474)..(474): n is a, c, g, or t
  misc_feature (480)..(480): n is a, c, g, or t
  misc_feature (489)..(489): n is a, c, g, or t
  misc_feature (526)..(526): n is a, c, g, or t
  misc_feature (647)..(647): n is a, c, g, or t
  misc_feature (652)..(652): n is a, c, g, or t
  misc_feature (825)..(825): n is a, c, g, or t
  misc_feature (874)..(874): n is a, c, g, or t
  misc_feature (886)..(886): n is a, c, g, or t
  misc_feature (937)..(937): n is a, c, g, or t
aagatactggataaatatcttaatantcgaacagtaaagctctaatacagtacaaacattttaccattatgtttgccaataattaagcaaactgagcatcataagaatgagcgtgnnnngtaaaattactggaaagtntaattcactagaaatganaaattnnacatttgtcatattatcctgtatttntctactacntttttctggcagaatgactccttgctgaaaaaaatggcttaaagtaggtgcttttttaatggttttgcnaattctggngancagggnctgcntctncctanacaagatccccggtcttgctattagtctagaatagtgaatatatatttaataaatgcttgtngagtganccaatatgtgaatggtttnnttagtggatttntattaanngggggggaggngtnggngtgtcnatgnannnngagcatttttactttcaaataagggnggcnattnattgtngtgaaattncattgaagttttatatatgacccccaatgcatataanatcatttacctccacattataggataggatatcatgaactacaaagatactcaaagtgctatagatgagttaatattgatgtaatacattttcattaatctacccacatttaattggatgnttganagggcacgttgaagtgtttttcatgatttttgctacggccccagcttttactggagtttttaatgcctttgatgactccagacactcaactctgttccttgcagtctgtttctttcttctatggtggtgattagttattgcaagactgcttatatagagtaatatatagtttntctggtatggagtaacttataccagagttttaacattctccctaatggngtttgtggaggngtgaaattggcgtgtcattgaggcacattaaaaagcgagatatttttaacnctaacaagagaaa

SEQ ID NO: 726506 - DNA, 408 bp, Homo sapiens
ttgttggcgatcactgtactatatgcctgttttcaatctacctgagcattgtggtatttttttaatctacttttttttttaagaggtgagggtcttgctatattgctcaggctgacatcaaactcctggactcaagcactctttctgcctcagcctcctcagtagctgggtattatggtatgtgtacatatatacttttagagacagggtctcgttctgttgtccaggctggactacagtggtataatcatggctcactgcagcctccaacacctgggctcaagcaatcctcccacctcagcctcctgagtagctagggactacaggcgtgtgccaccatgcctaatctttttttttttttttggagagggagtctcgctctgtcacccaggcgggagtacagtgatc

SEQ ID NO: 726507 - DNA, 235 bp, Homo sapiens
cgagtggtcggggctgtgcatcacaccaagggtgatccagcggcaccactccaagcacagcggggtcccagtgcacgtgcccaccattcacacggtccagggccgcaagcgcagcaaacctcctcccagccagcatccggcttgcccagcaaagcagcagccagccagggcaagtggcagccccttcaaagccagcccaggcattcagtgcccccaccagctcgaacaggggggt

SEQ ID NO: 726508 - DNA, 1394 bp, Homo sapiens
  misc_feature (431)..(431): n is a, c, g, or t
  misc_feature (639)..(639): n is a, c, g, or t
gcctgtgcatcacactgatcatgctctatccaagaactaccgtgtgtcgctgcaggatgtaatacacctaggatcatatcgcatatcattcacctatcagaagcgatcgactggtactcaagggtctgagtgtcactacctatgcacaacagggtgcccacaccgacaaggaatgcatagctgtacatgcctgacctgttcattctctgtgtgccgctgttatcagatgcctcgctctagcatcgtatgcatgtacggatggatggcggaactgaccataaattggtgcggcaatgctgggaggcaggggtctactaatgacgcgcatgcgagagtattccatgatgcctccttgatgtcatagcttctctcagtgtgtggtgtttggcagcagagaatatgtaatcgtacgtattcacgcgaaccagagntattcctgcatgcatagctacgtactgtcccatcgactacttgctcgtctttgcagtacacatcatcgtccgagtgggcttgcgccccacgaaagccccatgtgccgtgtctctatccgttatccttcgtcacctattggagaccgtccttgggggcactcacaagtttaaaggcatcaagaaatacattgtactcaaacggtgggcnaaactatagcacatgcagctaagtgtgaataccaggggacgtggggaaaacatgggaaatacctacgcaaggtgagacgacgacgaacaggcccagtgcccagcgttcgcaaaccccattcgtaaaccgtttgtaaacgtccttttcatttctcgttactgaaccacaaaggggacttggttcggcggctcctcggttggccccagaacgtggacagcgcgttggtctgcaacggccccttctatttccttactctctacaagtttacaggctaatggggggctgccaagtttcccatttagaacatctagggacagtgggttcgcggccacaagaagcacacctccaggatgcacacaaaggggaagaggaatcacccgtaagtatgatatggcccgcctctctcggtggagaatcgaaaccccttggtgggcggagttacaccacctgaaggtctgtttccaaccttagcggaaaaatcctttaacgaaacagcttaagctttaacacaaaaggaaaaggttcttacagtcattagtcgaacaatagccctactttgggttcaccatctgcgagagacagtccttcaccttggtacgcggcctaaactcgaactgcggtcggcggcagagaagtcgccacacagctccctagctggggactctccggtgacctcggttttgcaccatcttgcctcttctaaacgcagagtcttctaggccgcgacaggcacactccccatggcgggcaagaat

SEQ ID NO: 726509 - DNA, 185 bp, Homo sapiens
  misc_feature (103)..(104): n is a, c, g, or t
tggtctcgttgtagtttagatacaggtgggcctggatttcaaaggtgttctgaggtgtctttctggttaggggttcgtgaacttatgagtctttattttcctnngatggttcaacacagcgttcccttgatggtccttgatcaggcagcgagaccccgcatccctgtggcatgaccccatcattc

SEQ ID NO: 726510 - DNA, 795 bp, Homo sapiens
tctgcttgagccagacccgttcctcctctgaccttgtctgttccagccatgggacatcgagccctcctgtgctatacgctgctccccttcccccacagtgggggacctgaggttatggggaaacaggcgggacaatactcttttgtggccgaggaattgaatatctaatccaatatgtggggtcttcctttggtcagggtcctgcgtgcgagttagtgtgggtccatcggggctctactgcctcctgcccattactgctcctagtcgtgacgcccctactgtcagcccatgtcattctgccatttagcgagcctacgcaagtgttaatagttactgaagatcggaaagtatcgaacgggggtcaatgcatagacctctcctgcagcccagtgcacacagctgatcagcgagagaggctgtcagcggaggaagcgccttgttgactgggagcaaccttctctcttgccgttacctgcagagagggactatgccctgaccccgtccatttctgaaaagtcagtgcaccgtcccgtgttgctctaaggaggctcctgcataggcattggatagaagacagaaattcgatctgccgtgtcccatttttcgccctggggatttgacagcagcaggcatcatctcagcaatgagctggagcagtgacccaggtggagcagtgaccaggacgcctctggcccagtgctgcacagcctccacgcccgctcccaggcgccccatgtcctcacaggccaggacgccatggcaggatggagagacttggtgatttttgtgtcttta

SEQ ID NO: 726511 - DNA, 293 bp, Homo sapiens
tgcaactgtgaaagaaacaagacataaaaggccacatattgtatgattccatttaatatgaaatgtataaaataagcaaatccacagatacagaaaataaattagtaattgcagcttgttgagaatgcctaaacgagcattttcatcttgtgcctatctgttggctcatttcacactctggggtatgggttaaacaaactggcttgatggcctgtggcgcgaccctgctctgggggaccatgtgccagtgtggcggagtttgacttgggggcggcaccaccttgtcaaactgg

SEQ ID NO: 726512 - DNA, 389 bp, Homo sapiens
agtccttagagaaaaggcttcagttgatgttagctgtaggttgtcatatatggcccttatttagaggtatgttccttttataccaagttttgacagagggtttttatcaaaaagcaatgaattttatcaaatgcttttcagcatctattgaaataatcatatggtgtttgttcttgattatattaatgtgatatatcacatttattgatttgcatatgttgaaccatccttgcatccctggagtgaatcccacttgatcatggtgaatgatctttttaatgtgttgttgaattcagtttgctagtgtttcattgagaatttttgcacctatgctcatcagtgatgtaggtctgtagttttctttttattttgtatcctagtctagtttg

SEQ ID NO: 726513 - DNA, 196 bp, Homo sapiens
  misc_feature (11)..(12): n is a, c, g, or t
ggtcaggcacnntgaaagcgggcgatagagccagactctctctcagagaaagactctgtctcaaaaaaaaaaaaaaaaaaaaaaaaaaaaaaaagggaaaaaaattatttttttatttttttgggggtatttaaacccggttgtttaaaaaaaaataattttttttttaaattttaggaacttttaaaaaattgtt

SEQ ID NO: 726514 - DNA, 280 bp, Homo sapiens
agctgatcgcttacgcccacgggactattccacataaggttaaacaaactaggtgcttgtacctaatctattacaatttactctatcgcatttctgtaacatgaaatggcatgtcctccttcagagagaagactgtggtcaagttaaaaaaaaaaaacaatattaaacaccatgaaactgcagtctgtttttgaacatgagaatgtcttctgtatagaaccacagccttctgtccttgtgacaggttattttaaagcctgatgtcctccgaagcaaccca

SEQ ID NO: 726515 - DNA, 772 bp, Homo sapiens
tctatcccaaatacggattctttcttctttctttggcaggaaggcactttgctatgcctagcccccaccaggtagtggtattctccatggaatgtgtgggcttttccaaagctctttcagccatcagttctcatagccctcccagtcttgcaggcaagatatgagctttagaaataggcttttatcattcagcttgctttgtgttgttttgaggggttggggtacagtgggacagttttattttgtttggcatttatagaaaattgagaagtttcctttgatcaagccatatttttgatttaaaacaatgattagcagtttagaaaactatctctgctattttattctgcttttaaattctttgttttttatatttctgtcccttagactttaacattttaaagtgtgtaaaaataaaacactgtcagtgctaatcatagaaaatcagactatggcttgaaatgactagaaaaacatttcaaattaggctgctttatgatttgcatattatgattccggccattggagtttttggatttctaagtgttcataataccatgaaaagtaaatattttaaacaattgtatccccgtttaaaaactttctaatgttaaaactgtatttttttcatgtattagcccatgtgtgataatcttagttttccaattatggagggcatgaggagtagctttatttttaatacatagtacttgaaaacttatttcattctatattggtgttgaataaattgaaaatgttaaatgtttttccg

SEQ ID NO: 726516 - DNA, 104 bp, Homo sapiens
tactagtactgtcactatttgatggaatcgctacagtgctcctggtgctgaagggcttagggatacaggtggaccgctaaattgcctcggaggtgtgtgaggac

SEQ ID NO: 726517 - DNA, 459 bp, Homo sapiens
gaggctgatctagaggatcccgacagtggtgtgatctcagcacactgtaacctctacctcccaggttcaagtgattctccggcctcagcctcccgagtagctgggactacaggtgtccaccaccacacctggctatttttttttttttttggtattttaagtagagatggaagagacagagtttcaccatgtgggccaggcgggttccaaaccccagacctctctccccaaactaagtgataatggaggtgtgttactttccctccccgggtgatgtgcaaagagattgaaaggggaaagggggccaggaaggagatgtattttctccttcattcattcaacagctaatctggagtaccaccggtgtccaaggcactaaccaagatgccgggaacacataaagaacaggtagacaaagactccaacccttaatcatggagttaatcccagtgggacgag

SEQ ID NO: 726518 - DNA, 183 bp, Homo sapiens
tgatgccttccccattccctctgactacagtagtacagagaaagggcccctctgagtgaggctgcaggcggtgctggccaagcaggttcgtgtgactgaacgtgagccgctgactcagaatcagaggacatcctagtggcagcatagcgaggtatgggcagagagtattggggcatgccatgc

SEQ ID NO: 726519 - DNA, 152 bp, Homo sapiens
  misc_feature (42)..(42): n is a, c, g, or t
  misc_feature (125)..(125): n is a, c, g, or t
caatggtgggcagttgctcttacatgagctaagtttgagacnctgaggccctctttggtcctcgctttgggtgggcccaaggtctggggacccctgtcttggactggtgggagactcaaccctcnatccttgccaggcctctcccctgcagg

SEQ ID NO: 726520 - DNA, 139 bp, Homo sapiens
tggctgagtcaacacatttttattaaacccctgaagttacggggagggggccatgaggctggacccactggcaaagccaattttttccacaaggttctggggttaaaggctcttttttgggctacaaatgaaaatctgc

SEQ ID NO: 726521 - DNA, 424 bp, Homo sapiens
ctggagtcttgctatgttgcccagcctggtcttgaactcctggcctcaattgattctttcaccttggccttccaaagcattgggattacaggtgtgagcaccaccacgcctgacctccttttttagaaaaacagcaatcctaggccgggcacggtagctcatgcctgtaatcccagcactttgggaggccaaagcgggcaattcacaaggtcaagaaatcgagaccatcctgcccaacgtggtaaacattttttgtaaaaatacaaaaattaactgggtgtgctggagcgcgcctgtagtcccagctacttgggaggctgaggcaggagaatcacttgaacctgggaggcagaggttgcagtgagccaggatcatgccactgcactccagcctggcgacagagtgagactgcacctcaaaaaaa

SEQ ID NO: 726522 - DNA, 336 bp, Homo sapiens
acgggcggcctactactactaaatccggggcggtcggaatggcctaaatggcctgaaaggtcatctggcaatgctgaccggacctttaaatcaccccaggtttccttttattccatggaaatgctatggaaataggtggtataccgtatttaggggataatggttagaaaaaaagtccggaccaggtccgttccagatgcccctggagtttttctttggaataattttttatctcaggaccgagcccccaaatgcagaattcatagatacagagggccaactgttcttggaatttgggttgaaagctgttaaagttcttttcagccaaaaagtcga

SEQ ID NO: 726523 - DNA, 1068 bp, Homo sapiens
ctgaacaagagggagcatgggtgctgccgcctgcagtggaccctgccacccacctcccggggcctgcgcagcggcctctcgtctactgccaccatgacctgccaacggcacagcctgaggctggtgcatgatccatgttctggtcctcatcaactgctggcaacaatgtacctgactggcctgaggcgttctgggttcaaggtgaacgcgtcctgccagcagcctgaacgaagaagcagatctggacgctggatgcagccccctgacgagtgcgggcagctgcggccgtgtgcctgctgcagccacctgggcctgctacctgtgcggctggacaatggactggcaactgtgacctgcgagctgcgaggtgcccaggtccctgacttgcctgtttcctcatctgtggcgcactgacgacaggtcgctggtcgctgcatgtccgaggctgcaccggctgctacttcggcggcaccgaggaccgcctgtcctgcttcgcgcagacggtgtcccccgacgagaagtggagcgtgcacatcgccatgcaccctcaggtcaacatctacagcgtcaaccgtaagcgctacgcgcacctgagcgcgcggccgggcgacgagatccgccgtggaccgcgacagtgcctggggcgtcgactcgctcatcacctcgccttccaggaccagagctacagcgtgcagaaccgcgaacaacgtttcttgcgccacgagggcgctggtgggggcccgaagccggccctggtaccgctgagtccgatcggcaggcggcctcccgggacctggcaaggcagtaccttgagcacacggtgccagtggaacactaaggggtcatggccccacagtggggcacggaagcgcaaggcatgggacaagaagggcgagagcgtcgtgcgcgcagccccaacgaagagcacgcgccgggcagtcacctcccccgcggcaggccgcccggaacccaccggaacagcggacaacagtgcagacaacacaaacgacaaccagcagacacgccaaacgcagagggagcgcgcgcacacacacaacacagagagac

SEQ ID NO: 726524 - DNA, 963 bp, Homo sapiens
gtttgcgctattccttggggcctcgatctagaaaatagcaggaaccttgggcaccgttggccgggtctgcgagtccgggctgaagctttagcctcaatgagaccttctctgagctcgacgtgctaggacagcgtgtgatccaggtggatggagcatgctcgaggacattaggccctcgctcagcctccccattgttggcttcacgcaatgaaggctatcaaatcgctgtggcttgcttgtccttcattggtggcatcaggcgtctacttcagcagctcacgattgcacagtatgctcacaggtgagcacaggaaagggacgtgaagatcctgcataattaaatgctgccaaatggcacgagggcttgtccacatgtgacctgcgtagggttgggctcgccacgactcaaccttgttcaccttcaagcacgatgatcgacctagcgagcgcctggggcgcatggggtagaggtggtgtggagtgtccggccatgggctttggctccgctgtccagggcttgtggggaagcccttgtggggaagagcactggcattgtcacatcggacttgctctctgctctcccagcaccatgcgttcctcgcattgcgcttgcgatcgagaaagtattgtggtcgcaggcggccccccgaccgttggggttcctccgtgggtttatggggacgcgatgctagcccaatacttccttgaggggctgtatacgctgaggtgcgcggctcggtgctgggacggaccttgctggagctgactggcacacctccaatccctcgggccgctatctctttcaacctggccccccgtcaagggagggacccctctcttgttggggtggtggctctggcaggcgtgaggtggggcaaatccgaggcagatgcacttttccggtggacccctgggccgtttgaaaggcaggacggtgaagggcacgccgccgggggcctagaa

SEQ ID NO: 726525 - DNA, 375 bp, Homo sapiens
aacatctacaagtataaaagacagtccatggaaacatgacctcaccaaatgaactaaataaggcaccagggaacaatcctggagaaaccgagatatgtgatctttcagacagaattcaaaaaagctcttttgaggaaactgaaagaaattcaggataacacagagcaggaattcagaattctattagataaatttgataaattgaaatagttaaaaagaatcaagcagaaatttgggagctgaaaaatacaattggcatattgaagaatgcatcagtgtcttttactagcagaattgatcaagcagaagaaagaaatagtgagcaagctattgaaaatagggcaggctgtttgaaagtacgtagaggagacaaaa

SEQ ID NO: 726526 - DNA, 719 bp, Homo sapiens
acatgataaggacgctgcatgctgtaccactttggctggctggagtctctcagcttgtggggaccccgacttacccaccttatgttgcactagggtggttggcggtgaataagcgaggcccaaaagctggtcacctgtgcaaggtctccgcatgcagatacagcgtccatatgtgctacgttgcgtaccacacctgcgagcaggtgtcctcgtgatacgccaatcggagcctggcgtcctgatcggtgtgcccactgcatcagctcctctcaggaccttaccgcgtggggctgggccggcacaaactctacgttgcggattccggctcgctggcagtcagtgtctctaagattgttggtgcacaagggctggagatcgtccaatgcaaatctcacaaaggtgaacgacgattgccctgcatcaacactggctaaccccgatctccctcactcgacaagatccatgctggcctgcctccctcctgccggcactcattctacccaacatctaccccatgcatactgctcgacggtgctggggaaggctgcagagcaacggggctgttcctgatgtactgcatgtagggccggttgctggttgtggactatgccaactgttccagctctgcctggtggggcacgcatccgtgacaaagcctacgtcatgatctgtgctgggcgtgtgatgcgcgtgatctccatgttgccacggagactctg

SEQ ID NO: 726527 - DNA, 310 bp, Homo sapiens
aaagcgacggcgggtgaaccacaaggtcaggagttcgagactggccgggtcaatataggtgaccccctgtctctactagacatacaaaaaaactagccggacgtgatgactcaagcatatagtcccagctagtcgggaggctaaggcaggagaatcacttgaacccaggaggctggggattgcagtgagccgagactgcaccactgacactccagcctggccaatagagggcgactccgtctcaaaaaaaagacaacaaaaaaaaagaaaaattagtttaccaagcaattcccctttcatggattatacc

SEQ ID NO: 726528 - DNA, 125 bp, Homo sapiens
tccagttagatggttccactagatgtctactggtacattggcaaactatagtgttgctaatctgggctgagggcacctctgcctgtcagagcagctgaccaggcttgagagcatgaaaacgggtt

SEQ ID NO: 726529 - DNA, 762 bp, Homo sapiens
gggggcaggagcggagactggaggaggaggagggagaggctgaatgttggctcggtaattgagaggagcggcgctccagagcttgcctcccggggcgccccctcgagtccgtccgctgcttctcagccgccagtctcctggccgcgcagtccccgcggacgtgcgggccgcgagagaccctctgcaggaagaaggcgctgcctggcgagcagagggacttggccggctggatccagaggccgcgcggcccaaaacgtaaaacccaaaccgagctgcaagacgggtccctccgggccggcggcccaatcgtcttcctcccctcttacctcgccccaggggaggaccgtaacgaagggagagcaccgggcgcgattacgacgaagccacgggacccaagggtactacagggaacggaggacggcgggagaatccgacatagtatcggcccggagggcaagggaggagaaacgcgccgggaacgcccgaaaggccactgggggcggggacaccgcaatgggacgtgccggcagagcaagagccgacgaagcactatcgacgctcagagccggagcagcgcaagagcgggacacgcaccactgacgcgaaaagattccgggggcagcgaccccggtagcggacccacaggctccgcgcagggaccaccgaggcggacaaacaaggcggggggggacagcccgcaaccaccggggggcgaaggcccgggggccacagaatacgggggaccaacaacggcaacatggg

SEQ ID NO: 726530 - DNA, 129 bp, Homo sapiens
tatatagagtggcatataatagaggtgcatacaactaggtgggcccctacttatcagccggactaggtagctagcgatagccgaccagtatagggtacaggccagtagcctatagcgcgtcgggaaggt

SEQ ID NO: 726531 - DNA, 429 bp, Homo sapiens
agtaggtatcatacgcgtttatgacatgaagtttgtacaggctgactgtgtcatctctggtcacaaggtcattggttcccgatcggaccacacagatcttgctcgatcagtcagctacgttgcttgcaaatagagtgcggctgacgacgtacaatctagtgaacgcaagcgtcatagtctatccgtgtgatctcagcgttattggcgactctgaccagatgcctgtttgcatcatcgtaggcaagttcagtggtgccatcaaggcacagcatctcatagtcttgctcactcatattcttagcccatggttcagggattgcacactcagtgctgtgtggcacagtatggtgtatcacaaagcgctcttctcccttgtcaagcacactccataaagcgcctgtgtagccgtagtacacctcattgatgatg

SEQ ID NO: 726532 - DNA, 104 bp, Homo sapiens
aggtgtgtgccttcccgcatgcgcaaggagtctaggtcaaatgtcgatgaatatgaacctcgagaaagttctggaggccaaaaagaaaaagaagaaagtggacg

SEQ ID NO: 726533 - DNA, 280 bp, Homo sapiens
ggcattgtgtggggagtgcggctcactctgggccgagcgacgcttagcctctcctatgagcagacttggcagaacttcaattcctaagccgtttcctttttgcaggcaaaatgaagtgggagaaaagtgtaagcactgacattttcaggaaaaatattaagatggaaactgtgaatgtaaagacagatatatacaccactttagaatatagcctctccttcacaccaagtctcacttccaaaaaattgatctgatttacaaagtgatatactatacctga

SEQ ID NO: 726534 - DNA, 120 bp, Homo sapiens
tgatgaacagccccattccaggaggctgaggtgggacaatcacctgagcctggaaagtcaaggctgtggtggcgccattgcactccaagcctgggcacaaggcagtgggaccctatctcc

SEQ ID NO: 726535 - DNA, 306 bp, Homo sapiens
gttgtgtatccgcacaagagtattacatgtgactagagcaagaagttattatctcgaagtagacactagagacacaagccaaagaacccagctctccctaagcttcaaactagactacttctccataatattcatccctgatagcattagtacgtatacatggtccatcatataaattctcactagtgatatataaactacagacccaaagcattaactcagttcttcacaatatctactcattctatcctaattgaccatactacatctatagttaccagctaacaaccctattccaatctgttc

SEQ ID NO: 726536 - DNA, 118 bp, Homo sapiens
  misc_feature (42)..(42): n is a, c, g, or t
  misc_feature (55)..(55): n is a, c, g, or t
ggctcctagggaccaaggccgcatttctaccctgactcccanttctaattcctcnttattgttattattattattttctctgctattgtaatatttttttgttaattaaagttttggc

SEQ ID NO: 726537 - DNA, 435 bp, Homo sapiens
gcttgttctgtttcatgccaaattccgaagattcacagtaagaatttaatcagaggtctttatattggaaaatattgcctaactgtagcctgcttcagcttggttaatatagttgtgaactagacattaaggccctgtaatacagacaaaactttaaagaaataggtcatttaaaatgtcccgtagaaaaatgaacaaaattctgttacttcagtttgctaaatagtgttttgtttttttaccaagttacaaacacgattacactaatatattcacacgtcgattatggtagtcttaagaagagcagtttagaggagacaggagcttgagtaaaagggaacttaagaccaagttgacttgtaggaagatacggaagataaaagagaattgaggtaattaatctatcagtcatgctagagacaggaatgatttttc

SEQ ID NO: 726538 - DNA, 159 bp, Homo sapiens
tatacagaatcccctaatctgtatcattgcggtatgattttacatttcctgaataatttgtgatattgggcatcttttcacatgcttgttgtgccatgtttatagtcttctttggggaactgtctattaaagccctgtgcccattacaaaaatcaggtc

SEQ ID NO: 726539 - DNA, 832 bp, Homo sapiens
  misc_feature (257)..(257): n is a, c, g, or t
  misc_feature (368)..(369): n is a, c, g, or t
cgacaaggagcagcaccgtgagttatgtgacgagaatctggttgaagacatctcgcggattcaaatcgaacaggtaatcagagcacagcattttgtttgggttaaatcacctgggttagagaactgaggccagtgagactgcctgtgatgcacaggatcccaccccaccagccccttttcaaagcactttatcccgtgagtctcaagggaggagctgagtgtgggggtacaggtcctgtgtgcagccacagtatttnaagtccattcatggaagcttggcctttgcttcatattcactttctgcacaatgggaataataatatctatcttgtgggctcattgtgagatgtgaagcaccctttgggtgnnggagagtagtgaattccttttcttcctctgctccttgtatctgttgtaccctgagattgcatgtgcgcacgccctttctaatcttctgactttgagtgtggctggtctgtagcttttgctcattcttcctaatgaccatgggaataagggagtggggtggggggcaagaatggctgcaggtagtggggagtagttgaaggtgtgcaaaactgtgtctgcacccagcctgacccccaagagtcctgggcaggccccatggtttgggtgtgagtcctggtgagtgtttgctcaaaatctgcttgactattgatggttttttactgagtgttaaatttgattaaactcttaagtcctcctaagtgccaggaagacactctgctttctctccctcttttttctccttgattcatagggggtaggtgagagacaagggcagcttttggaaagaaacatttatagatgt

SEQ ID NO: 726540 - DNA, 157 bp, Homo sapiens
  misc_feature (14)..(14): n is a, c, g, or t
gtctggcatcaggngacatggcatgggctgagtcttgacttccattcacagatatgtatttgatggaatggtaacccttttcaattgggcagcagcctcggaagggtatcttggccccgtgtatttccgtgtagataggttgttaaacattaggagc

SEQ ID NO: 726541 - DNA, 160 bp, Homo sapiens
  misc_feature (47)..(47): n is a, c, g, or t
  misc_feature (94)..(94): n is a, c, g, or t
  misc_feature (106)..(106): n is a, c, g, or t
tggctcggtacccccctccccgggtacaactgtttcagagctcacanagaaacaacatggacttttccatccgcatcggtaacatcaccccagnagatgccggcanctactactgtgtgaagtcccacgaagagggtccccctgcaaggtgacgtggggt

SEQ ID NO: 726542 - DNA, 134 bp, Homo sapiens
attgacaacaatagactgagaaagaaatactcgacgcttttgacaaaatgtgctcgaaggcttgccgaagtccctgtcggaaggagtgtcatggaggtgtgtggacactgtactggcagcctcctatccctgtc

SEQ ID NO: 726543 - DNA, 490 bp, Homo sapiens
acacacgaagcaaaaagtctcccaccaaagagcggcccaggaccggatggctgcacggctgaattcttgccagtattaaagaaactaatacaggtcaggcatggtggcgcatgtgagaaatgccagcagttcgggaggctgagatgggaggattccttgagggcaggagtttgagacaagccaggggaaacatagcgggactttgtctctacaagaaatattttaaaaattagacaggtgtgatggcacatttctgtggtcccagctactcaggaggctgaagtgggagaactgcttgagcccaggagtttgaggttacaatgagccatgattgtgccattatacaccagcctgggcaacagagaaaaaccctgtctcaaaaaataaaaaataaagaactaataaggccgggcagggtggctcatgcctgtaatcccaacactttgggaggccgaggtggggggatcacctgaggtcaggagttcaagac

SEQ ID NO: 726544 - DNA, 231 bp, Homo sapiens
tctgagtcttctacgtgatgggacggctatattcaagtctgttagagtaactgttttaagtaactgttacatgtgtacttcctttatcgcatttagatttttctgattattttatatactaaacagggcaatgtattccaagatgcagtcttcaatcaaacagttacagttatagaaagagaggatgggttagatggcagaaacgtaaggtgaaagtggtagtacgtagat

SEQ ID NO: 726545 - DNA, 105 bp, Homo sapiens
  misc_feature (11)..(11): n is a, c, g, or t
  misc_feature (75)..(75): n is a, c, g, or t
  misc_feature (92)..(92): n is a, c, g, or t
aggaggacaangaggaggaggaaagaagccgacgcaaggagcagcggaagcgggcacgacagaggagccgggcanggccgaaagagggcggnggggacgagcccc

SEQ ID NO: 726546 - DNA, 168 bp, Homo sapiens
gtgcgcggtgatctgaggatcccgctgtacctctctatgcagtagatcctgtgcctcaagaaatttagacgcccacgacagcactacacagcatctccaggtgatgcccaaggcacagggctgcagaaaataaacctccagattccacacaacacgggtccaattctt

SEQ ID NO: 726547 - DNA, 454 bp, Homo sapiens
actgagtttctatgggcagggactcccatgtctccctatcccatttatgggcttgggagtctaggggtacgagactcacacgagtgagtttgcagtgacacagctcctttagcatctgccgcacgaagtatagagcatgtcctgcgtgggtgaagctgcaatggctgagacagggccagatgcttgcagtactgcaacacaaaagcaccacagtcaccgtcattatactgcctggccacattcattttgaagtaacctttccagccctggtgaaaatccagtcggactttctttaccgcctctgcctgtagatacttggcactatgcttagggcagcggcggttaagggtacgctgcgagtcaaaataggtgatggtgcgtcgccttcacatcaacagagatgagggaccattgcacctccaggtggatggggattagcagtagctgggtaccg

SEQ ID NO: 726548 - DNA, 320 bp, Homo sapiens
  misc_feature (210)..(211): n is a, c, g, or t
gcttgacatcttgcagagtgtgccagtcagggctggtcttgggggttgtctcagggccggagtggtgccctcctcatcccctcccaccagggtcaaaacccccgcctgccggtcatgtgactgctctcccccggtgccctgtgtgtggggagagtcagtgaagcccccactcaaatggttcagctccttctctggggacatccagcacgnntcttcagattcctctccaacaattcatggtccctgtaatgaactcccaccgttcccgctgtcatccgtcgatgatggagtgcgagccgggagctgcagccccgcggccg

SEQ ID NO: 726549 - DNA, 217 bp, Homo sapiens
gcccaggtgggagtgcaggggcgcgatctcggctcacggcaggccccgcctccgggcttcaggccattctccggcctcagcctcctgaggggcgggaattacaggcgtgagccacggggcccagcctaatttgggtacctttttataatggagacttacacaggggatttattatatccagggatgctcagccagcacaatggggggcggggtaccg

SEQ ID NO: 726550 - DNA, 394 bp, Homo sapiens
atagtcgcgctctctccctcgcaaattgccattccttctcacaaccgtcactgtgtaatgtaagggggccgcgttattgccttgaatccaggtcctcagaccgccactctaaacttataaaaattgggccccttcctcatatatataaatttagattaattccaaaatttaattaggataattggggaatgtttttaaccataagccttcacttatactatgtgtcctgtgcgcaattggctctgtgaaggccgtgtgaggaccaaagcacagccccacagctctccctctcagagccacgctttcacatctagagagaccaccgcctcacatgtgcgctccccgatatctacacagcgcgcgtaaaattctcgcacaacccggggtaccctct

SEQ ID NO: 726551 - DNA, 456 bp, Homo sapiens
tagggtggtgctcgaaactactgggagcgactgtacggaagcttctcagagccgggcggctttcccagtcctccgtgggaccagcatcagcagtacagggccagcatgtttacagagccagcaaatgataccagtggcagtaaagagaattccagccttttggacagtatcttttggatggcagctcccaaaaatagacgcaccattgaagttaaccgtgtgtaggagaagaaatccgcagaagcttatttacaggttaagaacaacattagacgtatgtcctgaatgtggtcaccttgaaacagaaacatgtcctttgtggctactgctatgaaaaggtgtgcaaggagacttgcagaaatcagacgacagctagggaagccagaaggggcgcctataaaggctcccaccatagagactgtggtgctgtacacaggagagacaaccgttctgaac

SEQ ID NO: 726552 - DNA, 194 bp, Homo sapiens
agtttacgaggaggacgggggaaggcgctttgttgaagtagcatatttctcttgtcctttcgtactggtacggaatgtgatggtagatatgacaccgacctggattattccggtttgatgctctaggagtcacgtaggactttaatcgttgaacaaacgaacctttaatagcggctgcaccttcgtgctgtcca

SEQ ID NO: 726553 - DNA, 1311 bp, Homo sapiens
  misc_feature (1236)..(1236): n is a, c, g, or t
gacgagagtgcgggacgtccggcttcggagcgagagtgttcgtctgtgccagcgactaccacgacgaattaacactatggcgtgatgcttgagaacaggcacacaagatttctcatcatgaagtgttcccagtgccacaccgttgacaacagggaggcaatgcacaacgactggcgccaacatctctcatgtgtcctctcttgcgcgccggcaagaccaggtcaggccccctgtgaacttacttctttaccaccaggccgcccaaatacgagaaccaaataggccatcattcttggggcgagacggaataccactgcatcggcagctactccggccgaactccccaaccgaacacgctaccatccctgggcaacccacacacactggccctccttcgggttccggcccagttacccgcaaggaaagctgcaccgcaccagggcgccccgaacttttacactcagcccacactccctccacacacgaaaggcctaacctacacttgacgctacctaaacttgggccccccttgcccctatatctccaatctcccaaacacacagtccacgagtggtcctcacttgaacctttctcaacacttgttgttacccaactcccctttaaactaagaacctcctccattaacaagccagcacactcccagaattccagtggaccttggacctggccccgccactacttctgggcacggggcccacgccccagtgactacttcgacccccttacagcaccttggcctatgctgccgtcaaccctggaccataactggtccaccatccctggaccatcctcccgttcgtaacactccaaaatccacggtacactggctatccaccggcctcacccccctcctccaagggacccttgactccgacctccggaaagtaaacggttcaacgtattctcaccaaacgactggctgacgtgcccctcttaacaagcttagcggcacgccttgccctcccctacttcacgcacttacataccacccgggccaacggcggaccatatcttccaccatccgggcggcacacctgcgcctcccgcgcctaacacaccacacgcccagaatcagcgcgggcacccgccgcaccggcacccccgcccctaaacgccggcgggcacccaacacggccaagcgccacaccgccgcgccacaccggccaccacaccaacacccgactcacacaagcgacccaaccacgcaacgcaccncgggcccgctccacacccatcacccccaccaccacacacgccagcacaaccggacaacaccccagcaacacaaca

SEQ ID NO: 726554 - DNA, 221 bp, Homo sapiens
tttttaaaaacctgccagtgataccatcaagcctgaggggcaattttgcaaagaatataactccaagcagaagtgaccgctgtgctgttttagtgccaggctgcggtgaacagccatgagaacaaaacctcttctgtatttttttttttccattaggaaaacacaagacttcagattcagccgaattggggtgtcttacaaggcaggccttttcctacagg

SEQ ID NO: 726555 - DNA, 307 bp, Homo sapiens
aggaggtccagtgggaggggccccccgggtttggccactggattccccgggttagttttgccagacccgttgtcatagtataaaaccggcagaggccttcctgccctggggtttagttaatgtgtttagaagggccgaagagccgttttcttttggaggttttgggtcccccccccgttttttttttttttttttttaacccggcttccttccgttgccccgggtggggtacagtggccccattacagctccctgaagcctcggccttccccgggtcagatggtcctcctgcctttgctccctttta

SEQ ID NO: 726556 - DNA, 267 bp, Homo sapiens
  misc_feature (2)..(2): n is a, c, g, or t
  misc_feature (9)..(9): n is a, c, g, or t
  misc_feature (73)..(73): n is a, c, g, or t
  misc_feature (77)..(77): n is a, c, g, or t
tnagtgctncctggggcctcccacctcccctggcttaggtgatcctcctgcttcaaccccctcttcccccacnaccnactacagtagctcggactacaggtgtgcacccattacacccgactaattttttgtatttttagtagagaccagattttgccacattgcccaggctggtctccaactactagacccaagcgatctgcccacctcggcctcccaaagtgctggaattacaggtgtgagccacctcgcccagccagtacttaa

SEQ ID NO: 726557 - DNA, 154 bp, Homo sapiens
aaactcctcccctgctgcctgctggcatgagagaaagcaaacagccagatatgggtcgatcccatgaaatggcaaatgtctaacacaggctttctctatcatacttcacgtttaccttattgcaccttaacagaagtgaagactagctagggtg

SEQ ID NO: 726558 - DNA, 1016 bp, Homo sapiens
ttcattaggtctggctgaacgggtctaatggacttgtacaatttagatttcttctaatttggttgatacttgatgggatgtcttgtaatcgaatgggcgtcacgtcccaagtgcttcattagtgtcctgaggaatggtgaattgaaccgttgaggtacgcactcatcatgaacgactcctgctgggattaaaagggaagattcacacgcttgtttactcccgcgtgacacgaacctttaacttagcatggtgaccgtttgttataagagagacgttatcgcgagtgagggcggtcgagcacgacttcgatgggtgaatctgagggacttgcgggtacattagcgagggcctttgtcctgtgtcatcgagctggctttggtagtggaagttccaggtgcaagcagtctgcgccgctcggaaggagtttggaaggctcgggcaagcaaagagacaggctatatacgcggagcgaatacacggctgcagcccttcaatgacagatatccatgcgggacatcgaaagagcagcattgagaaggctctccctgaagaaggaggcgcgccaccaggctgatctccagccaccgggggcacggagagccagccaacacacacagcagtcccactcagtccgggcacaggccgccccgtgctgcgtcgagccccaagcaagacgcagagtccgcgtgtgagctgtctctccaagcagaagaagaagaagacaaagaagcaccgaaggagcgcacagccggaacgagcgcgaacagccaagtagaagctgacaaattaactggtcaagtgtgtgcagtgacgtgcacattggtttctgttctctggctatttgcaaaacctctcccacccttgtgtctcactccaccacccaaccccaggtaaaaaagtctccctctcttcctacgtcacacccatagcgggagagacagtcatgcagatttgcaatggttctttggagtaagaattctatgcagcggctaatttaactggccatggtcgtgtta

SEQ ID NO: 726559 - DNA, 241 bp, Homo sapiens
taatagccgtcccgctattctggactcggggcagtctggacttcggggcaatgcatgtacgtacacgcattggcagtggtgcgtcattaggtggcacaagctattacacactaaccagtttgaagactacacaagattaataccatccagcatcaggatatagctgtggattttcaaaccattcttatttctaacttcaggagttgatgtttttcccagtccatcttaaaatattactgct

SEQ ID NO: 726560 - DNA, 692 bp, Homo sapiens
taacatcccaggtcacaaaagcccccatctcgttcctctggaccagagcctgcggtgggatcaagtccaactgaaacatcagaaccatattagagagacaataagcatagaatgagatgaccccctaaataggcgttttcgtgggcgaggatgtgctggattaggaaaggtgacatgagcacaggcagatgcagagtggcacccacctcatgatacacgtgtgtgttatttacgaggagccatgcagttgagcctaaggtccttctacctacctggtattggcatttgaggtcggaaaccctctgactgcccctataagcccagggaacaagtgataaagagaacaccagttcctttgaagaactggcagcaaggcttgaggccttatagtatgtgagactgagtcaagctaaggtacaatgatatctggtctgcttgtcccaaaggacttttcgtctcctcagctggcaggactccttccgttagttccaaggacagctgagacacgacctgctgtcgtgatgtagccatacttagtcgactggagcaaatagtcctgtgcgcttttacactgacggtggatcacttcaggattgatcgaggttgtatatagtgcccacaatgcataccccttatatgtacgaatgcataatcccacttgaactagtatacatcttaaagcaaaaaaaaaa

SEQ ID NO: 726561 - DNA, 150 bp, Homo sapiens
caaattaaaaaaaaaaaaaaaaaaaacccctgaatgatgattaaagacatccccgctaaaaaaccccatttaaaaggtaggatttgttaaaagcaaaaatttttcccctttttttttgttttgtttaaaccaaaaaaaggcctttgtata

SEQ ID NO: 726562 - DNA, 348 bp, Homo sapiens
ttgaccactccggatgcatcagacccagcggagggctgctcggtggggctggcctcactcctactcctggcagaccctggtcccggactagctgcacttgccctgtacttcaagggcagtgaccacgttccctcctccccgccccacctttcccagacccccatagatgagatgagccctggggagatgggaaaagcctctgtccttgcacactccagtggaggtgacctggcccgacatgatccaccagacttcttctgccctccaggagactttggacacttttgtcaagtggcaggatagacaatgggccccccatggacaagtctgatctgggacagaagcgga

SEQ ID NO: 726563 - DNA, 160 bp, Homo sapiens
tgttgtccatgcacaattgtgtagcgagatgccgtcacgtttcaaaacactacacgttgttgctggacgtaaatgcgatgcagtcatcgtcagcgatatatcgaggaactttgacgtcgacattcgatgaaatacgcggaggccaattcaatgctttcaa

SEQ ID NO: 726564 - DNA, 488 bp, Homo sapiens
  misc_feature (14)..(14): n is a, c, g, or t
  misc_feature (72)..(72): n is a, c, g, or t
  misc_feature (176)..(176): n is a, c, g, or t
  misc_feature (178)..(178): n is a, c, g, or t
  misc_feature (228)..(228): n is a, c, g, or t
  misc_feature (233)..(233): n is a, c, g, or t
  misc_feature (235)..(235): n is a, c, g, or t
  misc_feature (288)..(288): n is a, c, g, or t
  misc_feature (419)..(419): n is a, c, g, or t
  misc_feature (447)..(447): n is a, c, g, or t
cccggagccggctnccatgaataacatcaaaacaacgtggacactaagagaacacatgtaactcatggacgnaggggatgcatgttgtctgcattcctgtctgctgtgcctacatgtgctccaccccacacctgttgagtacatgctgggaagaccatgtcaacccttggagcagntngtgtttaaccatctcctgctagcgcctcatgttttacatttgggcactanctgananccagatcctcccctttccccctaaataagacactgtcacacaatatcttttanctcatcttgtatttgttacaactttaagcagaattgtgactcgagcactacatttccatccacaagactgggtcttgaggttattttgggacagctttacgatattgcttagggtaggtttttacttttgntcctccaaacaatacttttcttttgggnaaacaaggcccgggggggggtccctccacaaggtggttcca

SEQ ID NO: 726565 - DNA, 202 bp, Homo sapiens
  misc_feature (158)..(158): n is a, c, g, or t
  misc_feature (167)..(167): n is a, c, g, or t
cacagttgatccgcctgcctgggcctctcaaagtcctggaattacaggcttgagccactgtacccggcaacattctgtcttaaaaaaaaaaaacacgggccgggctcagtggctcacgcctgtcatcccagcactttgggaggccgaggcaggcgaancacgagacnagatcacctgggcaagagagggagactccatctca

SEQ ID NO: 726566 - DNA, 177 bp, Homo sapiens
tctggtatgataccagatgtagcacgaggcctactgaaggtgtttctctagaatacacgtgaatctccttctgaaggtgttctctagaatacacgagtccttctgaaggtgttctctagaatatatgtgagtccttctgaaggtgttcctctagaatacacgtgagtccttctgagg

SEQ ID NO: 726567 - DNA, 766 bp, Homo sapiens
ctcatcgaagatggcgggcgagctgtgtcgggcattaccagagagagtcttcgttgtggacggtctcaagaacaccattgtagagaattctggtctcgattcagaaaagagaaagagccagtggtggtagagacgagtagaagagaatataggaacctatcctagttgtgtcctagccgttgatcgaagtccgtagcgatacacaccaccatgagagaatctccagagtcgattgggaatcttacgtttaaagaagtgtataggtgtcatctcttcctagtaattggcaagagatctcccaggaaggactagtcggctaaatgttcaatcttctgtattcatttagctgatgactgggatcatgtagtccctaactccagactccaccagatgtgcagggttagagatgttcttgatttctataatgtccctattcaagatagatctaaatttgatgaactcagtgccagtaatctgccccccaatttgaaaatcacttggagttactaagcaattcggaagagaaacacattgaaatcactgtctttccctgagcaagggggctgctcattagatcttttgatactttaccatgtgaaatactaccagaactgttctctaaacccactttttctgtagaggaatgtatcatctttaaatatctcatattacaaatggacaaataacggactttctattttcatatagggctgaaaccattttcaacatgaacattaggtcattatatatgaaaagtttgagaggg

SEQ ID NO: 726568 - DNA, 153 bp, Homo sapiens
  misc_feature (13)..(13): n is a, c, g, or t
tggggcgggagangaaggtgcgcatcctctccgagcgtaagaagcctctggacattgactacatgggggaggaacagctccgggagaaagcccaggagctgtcggactggatccaccagctggagtctgagaagttcgacctgatggcgaatc

SEQ ID NO: 726569 - DNA, 593 bp, Homo sapiens
  misc_feature (165)..(165): n is a, c, g, or t
  misc_feature (222)..(222): n is a, c, g, or t
  misc_feature (388)..(388): n is a, c, g, or t
  misc_feature (471)..(471): n is a, c, g, or t
  misc_feature (517)..(517): n is a, c, g, or t
tacttccacagggcgaggtcagtagttcgagaccagcatggccaatatggtgaagctctgtctctgctgaagatataaagattggctgggcgtggtggcatgtacctgtggtcccagctactccagaggctgaggcagaggaatcgcttgaacctgggaggcagnggttgcagtgagccgagatcgcgccactgcactccagcctgggtgacagagcaagantccatctcaaataaataaatttaaaaaataaataaaggaactcataattgactggtgagaaagattagcaagtatgacgtatgcaaggaatagaagttatgtaccgagtggttaaaggttggggggatatggagatggatgagagggagctgtctgggaaggcttngcttcacttggattagagtagggttgcgtgaggaaataggtgtgtagagtgagaatgagggtcatgacatcctcctacaaaanaacaatattcaaggaaggaagagaatctggttggaggtaccagganatgtgtcgttaggaagctcagaagaaaatagtaagtcatagttagtatatcagacttaggtggcttagtggtgata

SEQ ID NO: 726570 - DNA, 1084 bp, Homo sapiens
  misc_feature (561)..(561): n is a, c, g, or t
  misc_feature (760)..(760): n is a, c, g, or t
  misc_feature (768)..(768): n is a, c, g, or t
  misc_feature (996)..(996): n is a, c, g, or t
cggctgtgcgtgtccttaaaagtccctgggaagcggccgggcgcggtggctcacccctgtaatcccagcagtttgggaggccgaggcgggtgcatcatctaaggtgcaagagttcgagactaagtctggccaagatggtgaaacccccgtctctacgaaaaatacaacaaattatgccgggcgttggtgtgctcatgtcctgtaatctcaggctactcgtggaggctgagcaccggagagattgcttgaacctcgggagggactggaggttgcgagctgaccgctgagtatcatcgtccacctgctacatcctatgcctagtggcgacgaggagcggtgactgccaaccttcaatacaatagatagaatacaataacaggggaacgttggagatctataattcagtggagaatgtcgcaaagaaccagatggggagagtttctcctttggtgacaaccaacattgttcctcctccctttcgatatcgtctcgagaagcgcttacagtgtggtcgaaagcgctcctgcgcgtcttgcgctgcggcaactctcaagtcacagngtcccttctacaacgcccactataacagtgataactccgggtgggagacccaagaaacgcttgggcgtgtgttacacgcctgagagccattgggcgcgcgtggagaccgctgttgggcgacaagctttgtgtgtgtctccctttggagcggagaacctcagagcgtcttgcgcgatgtgcgagcactgctcgcgtcttntcacaagngcgcgtcccaacacaggggaggcctaaaagccccctctgtgtcagggttctcatacacgggacagcgcatacagtgcggtgggaacactttggaagacccattgtgtctgcgcagttcggctaccggcgaacggcccttggaatgcccagttagcacacggtgtgcacaacggcctcgcggtgagacagttaccccgggattgactagcatgcggcgtggaaccgagncctccaggtgttgaccccttggaagcctgggggcccatgcgcggagccggtggcttggtggctagcactttcgactgcaacatacctg

SEQ ID NO: 726571 - DNA, 434 bp, Homo sapiens
cggtggccttggtgtcactggtctgagtgtctgcagccagctggaaatgcatgaccatctcctgtatcatctcactggcgtctgggcttgcttgatacttgagcagtaactcaatgcccctgaaatgtcagcagcagatgatcaggtccccctccctctgaattgcagactgttccgtgcccagacgtacccatgggatcatgctttgtgctacaactgaaatatcaaacaattgctaattgttaatggaacattaagtgcattttcccagaccacttattcaaagtgcatttcaccttctgtgggttgataatgaggctgtgtttgaggtctgtgttgaggaagaaatgaggggaggtgggattgggccacagaaatcgtgctggctgggggcataagcacattggcagctgatgggatacttccccaagccc

SEQ ID NO: 726572 - DNA, 1122 bp, Homo sapiens
tagtgggaagatttatgaggtagaggcgataaagctaccgagcctggtagatagcatggttagtccaagatagaatctgtgagttcaactttaatattctgcccacagcataccctctaaactccccttgtaaatttaactgtgtgagtccgaaagaggtaacagctctttggacacgtaggaaataaaccttgtagagagagtaaaacaagtttatacatccgcagtagtaggtcctaaataggcagccaccaattgatgaacagcgttcaatgcttcaatcaactctagctatccgtaataaaatcccaaagcatataactgagactcctcacatccaattgggaccaattctatcatcctatagaagaactgagatgttagtataagtaacagtgaaaacattcgtcctccgtagtaagccgtgcgtcagattaggatcactgaactgacaattaagagctccaagtagtctacagatcaaccgaactagtcattattacccgtcactgtcaagccaactacaggtcatgctcataaggaagggttaagaaaagtggaaggaactcggcaaaatcttacacaccgtcgtgtttaccatataaacatcagcatctagcgatcaccagtattagaggcagcgcctgaccagggacatcatgtttaagcaggacgcggtagcctaaccgtgcgaaggtaggataatcacttgttccttaagttagggacctggtatgaatgggtccgcgagggtacaagtgtattttactttgtacgcagtgaaattgagctgaccggaaagggggaatgagaagaggagagaaaacctatggagttgaattatcagggcaaacggacctaagagacgccacaggtcctaagtagcaacggtcattaacagatcccgagggggggaccggggataaagccaaccgcggaaggagcagttaaaattcaggggcaaaggaaaatatataaagggaagaagtaacagggaggatcccaggaatacagaacatatagacagacaggaggacacagggtacagcaacggacgacagcggcgcagacacatcaggagggagaataaggagacaaaatcgctatcctcgctgccacttg

SEQ ID NO: 726573 - DNA, 101 bp, Homo sapiens
aagaagtagaaaatctgaatatataaaattacatacaaatatttaatataaatgcaatttataaatgtaatttatatttatattctccaaaaattatattt

SEQ ID NO: 726574 - DNA, 325 bp, Homo sapiens
  misc_feature (5)..(5): n is a, c, g, or t
  misc_feature (40)..(40): n is a, c, g, or t
  misc_feature (68)..(68): n is a, c, g, or t
  misc_feature (124)..(124): n is a, c, g, or t
  misc_feature (235)..(235): n is a, c, g, or t
ccccntaaaggcttttggatggttttagcaagcccggcancctcgccttccccccccctattaacctnggggggaactctttgtgggaggaaccgcgttttccggatcaaaaatccctttcctncttacgggactcaacatactagcgcaggccctaactcccctttacatatttcccccaacccaatgggggtccctccccccccccattaacaacataaaaccctcattcacncgaggaaaaccccctcaggggtcaaacccctatcccccatttttcctcctatccctcaaccccgacatcattaccggtttttcctcttta

SEQ ID NO: 726575 - DNA, 176 bp, Homo sapiens
  misc_feature (16)..(16): n is a, c, g, or t
atctgcgagctgaggngagaggcctgggaggaaacgagtcctgcaggcaccttgatcttggacttccagcctccagaactgagaaaataaatttccattatttaagccacccactctgtgatatttcattacggcagctctagaaaactcctctaacctgccaagccacacatgat

SEQ ID NO: 726576 - DNA, 616 bp, Homo sapiens
caaaaacctttttattgaacccactcgtattagtttcctaaggctgctggaccagatgatcataaacgtggtggctttgccctcaacgttttggagagcagaagtcgaaactcaaggtgtcagcagggccaccatcactccagagcctcctctagcttctggcgcctgttgatgttccttgccttgtagctgctgcactccagtctctgcctccactgtcacaaggccttctcctctgtgtctcaattgcctcttctcttgtctctttgtcaaatatccctctgcctttctcttaaaaaagcacttgtcattggatttatggaccacctggataatttgggatgatctcctcatctcaagatccttaactttattatctctgcaaagaccccttttctaaggaaggtaacattcatggtttctggggattaggacatggttaagatgtagacatatcttttggtgagccaccattcaacctattacaccatccatattaaaacttatttgattagagctggcatcattatttaccaatatatatacttctctagttttaggccatgtaacccaaaagaatgtagcctccactttataagtctgtaacaaaaaaaaa

SEQ ID NO: 726577 - DNA, 1109 bp, Homo sapiens
caggagatgagatgctcgggaccagcacgaacccgcggacatggcccggccgacgacagccccccggaggtgatccgcgcggcgcagaaggacgagatactaccgcggtgggctgcggagacgcggcagggcggcgccctgcacagcctgcgcgggtgcgaggaagtggctggagtggaggaaggaggttagagctgcatctcagatgtggcctactttggcctcaccacacttgcaggctaccagaccctgggggacggagtacgtcagcatcatccaggtggacccatacgcggatacatgtgccctccatcgctgcgccagtggcgatgctggtgacgcatgcatgccgtccgtgccctacctgactggacaaggcccatgctcacccactggagcaggagcatgcaggctgaccccgacagtgggcagaccattgacacggggagcctaggggccaggtgggcgtggctgctcaggggcgcggcgctacgatgcgatacaacacacaggacaccactgcacctagagacaacaccaggaggcgcgcagcatgcggggcggacacaccgaaccctcaagacagggcctcgacctgacctccaagcggctacatgtagcctggtacaacatcacacgggggcacctacccacgatgcgccacagagggcctccacggagatcaagaaaccaccgagtaccgaagccctgcccggaacaggaccaaggaggaccgagtaaaacaaagagagaagaagccacacaacacatgagacaccatgggacgagaccacaggggcaaacaaacggaagaaaccaagacaccgcaggaacccagcacacgacgccagaagaacagcgagagagaaaaaaagagacccccagagagcacaaaccaaacgcaagacgcggccaccccggccgggagcagagcacgacaagacgacgcggcgcagccccagcccgacagaaaccacggagcgggaagcacccggagacgccccggcgggcccgaagaagcagcacagacaagggcacgagacaccgcgcacgcgagaacgggcaccgcacgcacgaaacacaaacagcaacggggacacaccaaacca

SEQ ID NO: 726578 - DNA, 272 bp, Homo sapiens
  misc_feature (6)..(6): n is a, c, g, or t
  misc_feature (13)..(13): n is a, c, g, or t
  misc_feature (25)..(25): n is a, c, g, or t
  misc_feature (27)..(27): n is a, c, g, or t
taagangtcaaancaacagtaaaantnattagaaatggagcacatgaacagacattcatgcagaggatataaaaatggcaataagcgcatgaaaagacatgaaagacagtcaacagactagtcactaggggactgcaactaatactacaatgagatatcactacatagctaccaaaattgctaaaataaaaaataatgataacaccaacgctgacaggatgcagataaccgggtcagtcatacctagtggtgggatagaaatggacagccac

SEQ ID NO: 726579 - DNA, 404 bp, Homo sapiens
  misc_feature (3)..(3): n is a, c, g, or t
agngggcacctgaagagtgtgtagctggggttatagcatgcttttatatgggtctcacaaatacacaagtctttacattgtgtgttcactctggcgcaccaatcgtactttttttttgttttcttagatggagtcttgctgtcacccaggctggagtgcagtggtgtgatcccggcccactgcaacctctgcttcccaggttcaagcgattctcctgattcagcctcccgagttgctgggattacaggcgtgcaccaccacgtccagctaattgcccatctaatttttgtatttttgagagagacagaatttcgccatgttggccaggctggactcaaaactcctgacctcaggtgatccaccacgcccggtagagccttgatctcttaaccactcccgtacca

SEQ ID NO: 726580 - DNA, 170 bp, Homo sapiens
cctagtgtcagaagtttcaagtagcacattgctgcctggcgtggcaggaaagctgatcttccctatgcagtcgctgtcacgttagccgtatatgcctttcacttggttgaaggtgacatgctatttaaacttctaaaactaggcctacttttgaaagttctaaaactagg

SEQ ID NO: 726581 - DNA, 305 bp, Homo sapiens
gacaactagggtagtttgcaggtggtaagccatttacaagatagttgtaggtaagaagggcagatttattagagaaatgtgaaaatatgttgcagtgggcagctcagcagagaaggggctacctgcaaagaggcaaaggctggaggaaagttttatagggtcctgctgaagggtgctacgtgtggaatgaggtcattgtgcccgcaggttgtttgtgattagctgtttctaacaattgttcatacaataattgttcattattgttctcaacttggggctctccccaacctggggacccttcctta

SEQ ID NO: 726582 - DNA, 136 bp, Homo sapiens
tcccaaccaggacaaccggaccgtcagccagatgctgagcaagcggtggtacaccctggggcccaatgagacgcagaaataccacgacctggccttccaggtgaaggtggcccacttgcaacaaggaccgaaagaa

SEQ ID NO: 726583 - DNA, 659 bp, Homo sapiens
gagttgaaaagggaagggtgaagtcaaaggagagaagtcaatgagttggccaacaccaagcaaggatcatgggaccctctccacggccccacatctcaaatgaagtcaacaaaacccatcagtgcttggtgtaagtgttgtatgctcctggaaatgaaagcaggggccacatttcaggtcagtagggtcacgggtagaggcagctgtcatggacttgtgggccctggaggatgggatgattctgagacattgaatccctacactgatctcagtagaaatctcaggtagggcttcaacattcgtcgacaaaggactctgtgggcatcagagcaacagccttggtgcatgtccaagctccatcaatcccaactggggctttgaacaagttacttattttttttaactaacgttattttaattgacaaatcataattgtacccatgtatgtgatgttttgatatatgtatacaatgtgggatgattagatcaaactaatgaacacgtccatcccctaatttactgacaattttcatgatgcgacatttgaaatgtacccacttagttattttgaaagatacattattattgactatagtcacgctgctgtgctatagatttcaaaacatataatccagcaacccaacttctggatatagacc

SEQ ID NO: 726584 - DNA, 284 bp, Homo sapiens
atcatccatccggtgcgcttcgtcctgccgcacgaaaatgcgctgcggccgtggtggatggtacggctcggcctctatctctatgattttctgggcggcaagatgacgctggcgcgctcgcgcgggctgcggcggagcgacaccgccttcaccgcgccgctcaagggtgcgggcaagggcttcgtctattcggacgccttcgtcgacgattcgcgcctgaccgtgctcaacgcggtcgatgccgccgccaacggggccgaaattgcggtcggcaccgcgctcga

SEQ ID NO: 726585 - DNA, 641 bp, Homo sapiens
  misc_feature (129)..(129): n is a, c, g, or t
  misc_feature (146)..(146): n is a, c, g, or t
  misc_feature (155)..(155): n is a, c, g, or t
  misc_feature (163)..(163): n is a, c, g, or t
  misc_feature (180)..(180): n is a, c, g, or t
  misc_feature (256)..(256): n is a, c, g, or t
  misc_feature (467)..(468): n is a, c, g, or t
  misc_feature (532)..(532): n is a, c, g, or t
gctcgaccttggtgctccgtctccgtggaggaattcaaattttcgtcaagaccttgaccggaaagaccaccacccttgaggtcgaatcttccgacaccattgagtccgtcaagccaagatccaagatanggagggaatcccccctnaccaacaangtttgatnttcgtggaaacaacttnaggatggacgtaccttgtccgactacaacatccagaaggagtccacccttcacttggtgcttcgccttcgtggtgnaatgcagattttcgtcaagaccctcactggaaagaccatcacccttgaggtcgagtcatccgacaccatcgagtctgtgaagaccaagatccaagacaaggagggaatcccccctgaccaacaacgtctcatcttcgccggcaagcaactcgaggatggccgcactctctctgactacaacatccagaaggagtccacccttcacttggtnntccgcctccgtggtggaaactaagataccttaccagtatgcggtacgcgcaatgtccttgcccnaacgtacaatgtttgttgtataaactgtaaattgtaccctgttgtatatcttattagccctttgttgtattttaggggaagtaaaagcgtacttgaaacataaaaaaaa

SEQ ID NO: 726586 - DNA, 398 bp, Homo sapiens
gccagagcttccccgagcaattcaacgatccagggctctgtgtctggcccagtttaactcctccctctctctcccatccaggcttgagataaactaaagctctcctaacgctctgtccaggaccatgcttgggaactattaatgatccacaggtcactttccctaagttccggtcaatctgtcagtccatttctcccacccctcaatttgcaccctcagtctgtcagatagcttgcgcaagttgtcatttagcaatataactggccattcgtccaagtgtgtcctctgatcaagtccaacttcaagaatgctagcttgtccatcgcaatatgtgaaaagccgcggctcctatttgtttatatacactcctgttagtgtgtctgcattcggcgtaagct

SEQ ID NO: 726587 - DNA, 947 bp, Homo sapiens
gcgtgaatatacctagtgcatcttgctctactcagcagtcggtatgacacggatactattgtcgatgtctaagggttgcattgtctgcttaatgcacatattgcccgacgaagagaagagactctctcttgtcacattgtaggagcgacgtgatcctctaatccggacgggtagataatagtgagccctggatgactggtaggctgcgagtcgacacatcttatgagtcgatatggcagctggatgaagtctgaacatgagcggcgtacaacgcaggccatgataactacaacatgcttgctatgtgagcaaatctgattgacagttctcctgcgaaacatagtcgacattctggattccagaggaaacttcctgagaatctgggcggtcctggttcagaactcggagaaattgccatatctgtctggctcttgtcactttgtggtgtgtcctgtcaccagagtcagtgagtgtgtgaccacttcgggaaggtctaacagagtgccctctcagagtaaatgtcacaccatatgtagtctcataggccacgctatggattgtccatgtatatgaaactacttttttgcaccaagttgagtctcgacagacgactggacgtgcttgtgtacgattgtatgagtccagagagggggaaggtctcacgttatcccagagaagagatggcattattcgaggagttcagctatcgcagtgggcattttgacgtggcacgcagaagacgggatccagaggatggtaccaagtaggggactaagtctagccaatggaagccctcctgggcggcacctgagggattgaaaagttggcgaagtactcgcgagtataattaggggtccctctctgatgcggatgtcgttggaagcgttttatacccgtgttcgggggacttgcgaagcgaatttgtagacggtgcaaattacacgtaa

SEQ ID NO: 726588 - DNA, 123 bp, Homo sapiens
cctacctaagaagaacacgaggaggagatgaacgccctgcgagccaggtgggtggtgagatcaatgtggagatggacgctgccccaggtgtgaccttgagccggatcctcaaggaggatgcgt

SEQ ID NO: 726589 - DNA, 1101 bp, Homo sapiens
gcaggcccgtaggcagccatggctgcccagccggaatggcatggtcttgaagccccacttccacaaggactggcatgcggcgctgtggccactgtggttcaaccatgcctggccctgtaatgatcctgcagactgtaatggccctggcaatgccaatggctgctgcctgcattctgcccctgctgcccctgcgtctgggtcccattcctggcccatctgtgctgcttgccccactggttctggtaccacactgaagggtgctgcgccgtgccgcgtgcttcatgcctggagtgagctcatgggttgtgccgtgcatttcacaatgaaaggtggcccgtggaccatctggcatttctgttggatcctgaggatgtgcggaacaatgtccactggaggtcccttgcaggccaacgttgcagcgtgctgacagcgagtacctgctccaaactcatcctcattccccatggaagcccttcggcccccaagaacgggagacagttctgctgaagaactgacaactggccacccatgcttgacctggacctggtcatgccctgtcccggaacgtctataagaaggagaaagctcgagtcatcactgaggacgacgaagaatttcaaagccttcgctagtctccgtatggcccgtgccaacgccctggtcttcggcatacggggcaaaactgagccaaggaagccgcagaacagcgattgtgtgacacaccgaagcgaattacatgcccttcctggcgaccttgggaattcatagtaacacacacacaaattcagagcggcatctatggcacggatgccggaacaacgcggtactctgacctcgccccattggcgcactcacctggtttccttgcaccccgagctatactgtgtaccactggtggcaagcactcgtgccggatacccccaaaatagctagagacgacgcactaacaccttcccaatatacgccgaggttacccttgcttatgatgatgaatgcaccacaacacagcatcgacgacagacatgaatactccgagaaatcacaacgcgagatccacatctcaaaattagcacgagaatacaagcacgaagcagactacac

SEQ ID NO: 726590 - DNA, 195 bp, Homo sapiens
gataggacatcctgaccacccagcctgaagtggcaggcaggcgtctctaccacatcatcctatttataattctctccatagcacttctcattatctggaatgttctttcttttctttcctagagacagggtcttgctctgtcacccaggttggagtgcaatggcacaatcatagctcaatatagcctcaaattcc

SEQ ID NO: 726591 - DNA, 464 bp, Homo sapiens
gtgtccaaattcccgtttttggttttttgtttttcagttaaaaaaaaaaaaaaatttttcaggggaaatttttttttggggggggtgtttaaaaattcccccccgggggtgaaaaattttgggttttggttgggttttaattcccgggggggcccccccaaatttttgggggaatacggggcctttccccccgcgggggtttttccccattttttccaaaaattgggggccggggccggggcccgggccccttccttttttttttttaagtgggggaattttgggcccacaaagtcccccgggcgggtttttaaaaattttccagattcaaaatttaatttttcgttgccccccgggtttttgggcgtttggcaaaaaccagttttttcccccaaagggcccaaccctttttttttgggggggggccttttttggggtttgccccaattaaatttaggaaggcc

SEQ ID NO: 726592 - DNA, 391 bp, Homo sapiens
  misc_feature (54)..(54): n is a, c, g, or t
  misc_feature (135)..(135): n is a, c, g, or t
  misc_feature (150)..(150): n is a, c, g, or t
  misc_feature (153)..(153): n is a, c, g, or t
  misc_feature (189)..(189): n is a, c, g, or t
  misc_feature (198)..(198): n is a, c, g, or t
  misc_feature (219)..(220): n is a, c, g, or t
  misc_feature (235)..(235): n is a, c, g, or t
  misc_feature (298)..(298): n is a, c, g, or t
  misc_feature (330)..(330): n is a, c, g, or t
gtgtgcggtgactctagaggatgccagtgctactccacaaacagattgaggggnacttgttcacggagaaaagaacggacgggggaagttcttcttctttgatggcagcaccctggaggggtattatgtggatgntgccttgcagggccnggnagtttacacttacgacagatggggagagttctccangggcacgtnatgtagacggatgatgctgannacggtccagcccagngaatatgcacacacgatgggcagactggactcttcaaggggcacgtataacagataacattcngtcatggcgagtgtgctggatatattacccangatggaggtagcactcctgtttgtgggaggtagcactggcgtaccggagctcgacattcgt

SEQ ID NO: 726593 - DNA, 622 bp, Homo sapiens
  misc_feature (22)..(22): n is a, c, g, or t
atgaagagcagcactctgttgncgatcctagttctccaggcccttctggtctctacggccgtgcccaaaggacctgcaggcccgaagaagcagtgctggtgcggcgagtgcaccagctggtcgggcgtgtggacctgcgacgacctcctcaccaagtgcgccgccacctgcaagaactgcgtccccgtctccacggacaagggcgccaccaagtacagatgccgcgacttcctccccgaaaactgcggctgcaagatccactagactcatccacagcggcacagccgatggatccttccatgctcctccgtccgtccgccttgctacaagcaggcagccaccaataagctagctcttgttgttgttttgcatgtttgattgggtgtcccttcccagtcgagatggaataatgtcaggcgcacgtacagacgtgttattacgatatttctcccctacaaataaaaactcgatctgtggggttaacactgtcccctagtattacaattaaaaaaagatgttatcacgcatgttaagaaaacatctgaatccctatcttagaatgtatttggtttggctttgtcttttgctccataaaaactaaaatctagaccaaaaaaaaaaa

SEQ ID NO: 726594 - DNA, 134 bp, Homo sapiens
ccagggatgtgccagtctcactgctgggggcctcgccctcgaccctgtagcggtcagtggagagttgcattccggtgtccagcgagctcctgaccctccgcgatctgtctcgttcagaattgtggcggcggccg

SEQ ID NO: 726595 - DNA, 245 bp, Homo sapiens
cagcacaaatctcctgtggtgcatctagtgatccctggcaaatgactgcggccagacggcaggggtagatggcacattacagcgtgcgtcgaagcaataggttatgcaacagcacataggcaaggttatgaaacagtacacaggaaaggttaagtgacttattcaagctggtactaacaccagctgcttagtatcttagcatttatagtcattcattcacactacaaacggtttggtagcatgta

SEQ ID NO: 726596 - DNA, 345 bp, Homo sapiens
acgttctctccataatttattgtgatgtatcaacatcaagtaaaatgctgattttcatcatttgcttctgttcatgtttcttgaacacgtcttcaattttccttccataatgctgcatgccacacttgatgtaacgaagcagaagtatttttacacattacagctaacaacattcattctacagcaatcctatttgctcaatacatgccgtcgtgatcctagtagttttttcaccaccttcttatcgagtttttggaaaacatctgttatgatgactttcattcaccttcacctcaaaggctttcttgcacctcgcatagcccagctactggcccgcattctccg

SEQ ID NO: 726597 - DNA, 942 bp, Homo sapiens
ttggaccgccttttttaccgagaggaggggggtggtggtgtggtgtgtgtttcccctgcgtcgactatatgaaactcctccttgctgttgcagcgtcactgatccccgactgtctttgcatggagacctatttgttgtgtcgtgacttggggagggactccatctctacattgggagtcatcgctcggctttcgttgttgtggggttgttgtgtattagctcgctccctccacgcaggttggggtgtggcccccacccactcatccacgtgtggcgggcagtccacatcttactgcttggagacgcgcatggactggtttccgtacgatggtttggcctcctcgtgtcgtgctccggtggttttttgtgtggtgggggggaacaacatccatgcggtctggccggtctctcctcccccctgtttgtctttgctctctttcgcagatgtggggatctcggctgcccctctcgtgctcgtctttgctggttgttggagtgactcgccgcccttgctttctctcggcacaccacctcgggggctgcttcgctcggtcttgtttctgtctcgcgccaccgctggtggttcgtctagatataagcttgtctctctcttggtgtgtcgtgttgttatgtgtgtctgttaacactccactccccctcgcggggggtccttctaccccctcctcctgcggtgtatttacgtacagagagcaaccactccttgtatgccttcttcttaaatgacctcctccagtattttgctgctccccccttctttctgtagaggaggacgtcttttttacacatctgttgctccattatacgggttggttttctgagcacccttctttaaaccccccccctttttttttccggggtccggcccccccttgggtcaacaaaggggtttttttccaaaaaaaaaaaatggtgacgggtgga

SEQ ID NO: 726598 - DNA, 183 bp, Homo sapiens
caaggtacttaaaggagacgaaggaagttgtggaagaatcagaaaatggaagagacgcccctgctaacgggaatgctgagaatgaggaaaatggggagcagtgaggctgacaatgaggtagacgaagaagaggaagaaggtggggaggaacgaggaggacggcctcacgacggtgatggtgag

SEQ ID NO: 726599 - DNA, 325 bp, Homo sapiens
actttttaaaacgagcctcttatatttttttaatttggaatttttgggggtttttttcccccccaccccttcccaattttttaaacgattccaagggggggtgcaaagtttggagcccttttggggagctgattttgcatttcctacgactttttttgggcaggttttaaaaaacatggaagcatatgctgaggggaggaaataaaaaactggtttttaaaattttgggtaaaaaaaaattttaaaattggggtagatttatttttaaaagggtcagacctcctgacattttaacagaaatttcaagcccctcgcaatattttta

SEQ ID NO: 726600 - DNA, 331 bp, Homo sapiens
gtgtggatttccagtggtcccggtcttactgtttcaaggtttttaaataaaaaaaccaaccctgccttggcccatgcccgcccctgcccgcagttgccaaaaaccccccttgtcgttgtgggtgtcagggtttggtgggctcatgccccacccccaaagtgcccttaaaaggctcctcctgggattgggaacccccgcagggccaggcggacggggtaaggtttgtgttggggctggttttgcccatgctagggggtgggggagctcccaggacagaccacccttgtttttcatgtaaagcagggacgctgtcattaaacacggggattca

SEQ ID NO: 726601 - DNA, 521 bp, Homo sapiens
catctgggtggtctgagtgcctcatttcaaggtaatacgtttttatagcgccgaaaatggaaaccttggcatctaaacgaaacagagctgaagatgtgaagagtaggacaaggcactgtactatggggtttggtttctttatgggaaaggtgtttgcatagattgctaggtatttagggtgcaggaaaagagagcccccagcgtgcatggctttgtgaggggtgaagctgcatggtgctccctcagccccaagagagcgcagtctctcattctccagccccagccttgtgggctgtcccgctggtgctgtcctttagaacccctacaggagagtttttttgctcaaaaagctgcacgtcaaaacggacccagacctccccggtggtgacctcatgcagcagcagtcggcgggtcataggggcttcgtgttcctgttctgttcgaatttttgccactggaatttcagtacgacccaggaaatcatctggtgaaaactggtctctgtcaaacagggtgagaca

SEQ ID NO: 726602 - DNA, 140 bp, Homo sapiens
atcagaagacggttacaggtagtttaccacaaagtgagactagaatcaacggcatcaaagccaggtaggaaaattcaactagcctgtcgcttgccagagcctcccagcccccaacccctgccttgaagatgcttggctgg

SEQ ID NO: 726603 - DNA, 259 bp, Homo sapiens
ccggttccctgaaaattccggggaattgaaaaaaaatataatggggggggtcccttaaaaccggcccaaaaataaatttttggcaggaaaaattttttggcaaaatgttttgggttgcccttttgttggggaaagccaggggaaatagttaaaaaatgttgataaaattgaaacctttgggtggggaattggggggggttttaaaggggttttgtttgtgaaagggagggtttaaaaaaaataaaattcccggacctta

SEQ ID NO: 726604 - DNA, 1104 bp, Homo sapiens
gggtggtgtctcgggataccttgttatagtaccttctctttgccagtccatcttcaaattggaattatagaaagtagagggagggatagtctaccgtctctcactggattggtgccacctaaaacattgttatgctggaaatgctagaatataatcactatcaggtgcagacccacctcgaaaaccccaccaagtaccacatacagcaagcccaacggcagcaggtaaagcagtacctttctaccactttagcaaataaacatgccaaccaagtcctgagcttgccatgtccaaaccagcctggcgatcatgtcatgccaccggtgccggggagcagcgcacccaacagccccatggctatgcttacgcttaactccaactgtgaaaaagagtttatgaagcagtgagaatgcagagagaggagaaggggaggtggaaaaggaaaagcaaaaatagaagaggtgtgggacatgctgtttagaagttccgcttgttgtgaatgtctggaatattatttttatttctccctgagttgggggaagaaagaatggaatatgcatggatggatttgaatcatatagcacatgagactttaacggaaacgcaaaggtttaattgctggatacattctgtttcataataaaattgccactgcccgttaaatctgctttggtgaaggctggattggaaacaagactcaaactaccttcaagctaattggtgcatcaaaatttgcagcatacaaatacctgagagctgtgatttaatgctcattatttccaaattatgagatgatgagcttcatctcaatgggatttaccgtactatggactatgaagtgtttatgcaaattcggaggcaacttttctagagttggattgattttaatttctagagggactaaaatctttgcccctatgcccaaaccaactgctttatttttctctacccaaatttgtcatctagcaagatgatttgacacaagttcttccttcattatttcatcttttggtcagattccactttgtttgaaagcttagttcatcttgttgctgtgccatcagctttgtgtgaacaggtcattaaaaagtcatttgcaaatcc

SEQ ID NO: 726605 - DNA, 445 bp, Homo sapiens
ggcctttcggccggaaccgaccatcttccagtaattcgccataatgatgaacacaacacgggaaagaggagaggcacccgactatatgttctctacgaccttctagaaaacatggagttgttcctttggccacatatatgcgaatctataagaaaggtgatattgtagacatcacggcaatgggtactgttcaatatggaatgccccacaagtgttaccatgggaataactggaaggagtctacagatgttacccagtcatgctgttggtattgttgtaaacagacatgtttaagggcaagattcttgccaagagaattaatgtgcgtattcgagcacagttaagcactctaagagccgagatagcttcctgtaaacgtgtgatagggacaatgatcatgaaacagaaagaagccaacagatgaaaggtacctgggttcaagtaa

SEQ ID NO: 726606 - DNA, 170 bp, Homo sapiens
gcgaccatggctgtgctggcggcacttctgcgcagggccgcccgcagccgcagccccctgctccggaggctggtgcaggaaataagatatgtgggacggagttatgtatcaaaacccactttgaaggaagtggtcatagttaagggcttacaagaacaacccttgtggtc

SEQ ID NO: 726607 - DNA, 973 bp, Homo sapiens
  misc_feature (721)..(721): n is a, c, g, or t
  misc_feature (783)..(783): n is a, c, g, or t
  misc_feature (822)..(822): n is a, c, g, or t
  misc_feature (835)..(835): n is a, c, g, or t
  misc_feature (843)..(844): n is a, c, g, or t
gggtggtgtctcgggataccttgttatagtaccttctctttgccagtccatcttcaaattggaattatagaaagtagagggagggatagtctaccgtctctcactggattggtgccacctaaaacattgttatgctggaaatgctagaatataatcactatcaggtgcagacccacctcgaaaaccccaccaagtaccacatacagcaagcccaacggcagcaggtaaagcagtacctttctaccactttagcaaataaacatgccaaccaagtcctgagcttgccatgtccaaaccagcctggcgatcatgtcatgccaccggtgccggggagcagcgcacccaacagccccatggctatgcttacgcttaactccaactgtgaaaaagagggattttataagtttgaagagcaaaacagggcagagagcgagtgcccaggcatgaacacacattcacgagcgtcctgtatgcagatggatgatgtaatcgatgacatcattagcctagaatcaagttataatgaggaaatcttgggcttgatggatcctgctttgcaaatggcaaatacgttgcctgtctcgggaaacttgattgatctttatggaaaccaaggtctgcccccaccaggcctcaccatcagcaactcctgtccagcaaccttccaacataaaaagggagctcacagagtctgaagcaagagcactggcaaagagaggcngaacaaggacaatcacaacctgattgaacgagaggaagagtttacataatgaccggattaangaactaggactttgattcccagtccatgatccgccatgngggacagggaacntttaaagnncgggatatatcgaagtgaagagaaaggaggcaaagaatttaaacggcgagaatggggcacgattgtggccgaaacggatgagggggtgatgcttccttaacgggtgccaatggaggtaagaacgttaag

SEQ ID NO: 726608 - DNA, 187 bp, Homo sapiens
agaggcacagtgtccgtcagaggtagcgagtttcttcatatctcacacaaagagagaagacgatccgtttgatccaaacgcatgagagcggaggatgagggagggaaggacatggaccccctccctttaaaatctcatctgggccttcaaggcacttcaaaagacacagagtggtatagaccgtacg

SEQ ID NO: 726609 - DNA, 1287 bp, Homo sapiens
  misc_feature (1131)..(1131): n is a, c, g, or t
  misc_feature (1134)..(1134): n is a, c, g, or t
  misc_feature (1262)..(1262): n is a, c, g, or t
  misc_feature (1274)..(1274): n is a, c, g, or t
gggtggtgtctcgggataccttgttatagtaccttctctttgccagtccatcttcaaattggaattatagaaagtagagggagggatagtctaccgtctctcactggattggtgccacctaaaacattgttatgctggaaatgctagaatataatcactatcaggtgcagacccacctcgaaaaccccaccaagtaccacatacagcaagcccaacggcagcaggtaaagcagtacctttctaccactttagcaaataaacatgccaaccaagtcctgagcttgccatgtccaaaccagcctggcgatcatgtcatgccaccggtgccggggagcagcgcacccaacagccccatggctatgcttacgcttaactccaactgtgaaaaagagtttatgaagcagtgagaatgcagagagaggagaaggggaggtggaaaaggaaaagcaaaaatagaagaggtgtgggacatgctgtttagaagttccgcttgttgtgaatgtctggaatattatttttatttctccctgagttgggggaagaaagaatggaatatgcatggatggatttgaatcatatagcacatgagactttaacggaaacgcaaaggtttaattgctggatacattctgtttcataataaaattgccactgcccgttaaatctgctttggtgaaggctggattggaaacaagactcaaactaccttcaagctaattggtgcatcaaaatttgcagcatacaaatacctgagagctgtgatttaatgctcattatttccaaattatgagatgatgagcttcatctcaatgggatttaccgtactatggactatgaagtgtttatgcaaattcggaggcaacttttctagagttggattgattttaatttctagagggactaaaatctttgcccctatgcccaaaccaactgctttatttttctctacccaaatttgtcatctagcaagatgatttgacacaagttcttccttcattatttcatcttttggtcagattccactttgtttgaaagcttagttcatcttgttgctgtgccatcagctttgtgtgaacaggtcattaaaaagtcatttgcaaatccaagttatagactgttttgcttggtttntgngggaggattttataagtttgaagagcaaaacagggcagagagcgagtgcccaggcatgaacacacattcacgagcgtcctgtatgcaggactgatgcttgcagcctgaggatgaaccttgtaatgagntatatttggggnggacccctttctg

SEQ ID NO: 726610 - DNA, 161 bp, Homo sapiens
gggggttttccccctggggggggggggggggcccccttttttttttttgggggggggggggggggggccccccctttttgggggggcccccccttcccccccccttttgggggccccttttttggggttttttttttaggggcccggggggccccccccca

SEQ ID NO: 726611 - DNA, 398 bp, Homo sapiens
  misc_feature (60)..(60): n is a, c, g, or t
  misc_feature (142)..(142): n is a, c, g, or t
  misc_feature (265)..(265): n is a, c, g, or t
cttggggttcctgtttgttggggaaccagggaagttgaaaggcctccacagggaaggaanaggttggtcctccctcctcccatatggtggcctgtgaatgtaactctaagtttgaagtgttagcccttaggctctttgtgtncctcccctagtcccaagggcaggagggatagccactgttaactgtggcagtggccaaggggctgtcgtatgcctttgggagcctcttctcagggaaactctgtgtcactaacagtgggtatgnctcagccatggctggggtgactgttctgcattcatgaccatggccctgcctagtgaagagtaggggtgggggttcctagggaggaggggctgcactcctgtctgtatggtggctgtggtgtgctaaaaaaaaa

SEQ ID NO: 726612 - DNA, 255 bp, Homo sapiens
  misc_feature (62)..(62): n is a, c, g, or t
agcctacacgactccccttggggcttacttatcggaggcacttacgttacggctcacgccanactccacggacgctcacacagtgaccactcctcacggacctttctcgtcggcccactctctcacgctacccctcggctacggcgttggctatccctatctcacgacggaggcctctccttactgtacggggcaacacggaacgacccattggcacgctccacgacgtacaccactacgttcttacccggtaca

SEQ ID NO: 726613 - DNA, 808 bp, Homo sapiens
tgcaggggctcacacctgataatcctagcacttatgggaggccgatgctcggtgggtcacctgaggtccggagcttaggaccagaactagccaacatggcgcaaagcccgtctactactaaaatatacaaaaattaggcaggcgtaggtagcgacacgcctgtaatcccagctactcaagcaggctgagcgaacggagaatcgcttgaaccacaggaggtggaagtagcaagtgagctgaaatcgatgcacactgcactccagattgtagcgacaggagggaggctcacatctcaaaaaaaaaaaaaaaaaaaaaaaaacagagaaacacgcgcaccaacaacagaacatcactaaaaaacatatgtgtcacccatatcattacttaccagcaaaggcaaaaatatatcacaatacgagtctaacaaaaatatacaaaaaacacacattcaaccaacgaaataaattatagtgtgcgcgcaagagcagataatatagcgacaaatgtatacccaaattgtcgcagtccacagtcagtctcaatgtagcctctcaggagaagacgatataagaaaaagtaccggagaacaaacacaagcgtaggtttcggcggccgctgtaacaccaacaattaacaaagtacctataaaacggaaaataaacataaccaaaaccctactctaacatctaacacagaccacaaacgagttccacaaaaatactactaacaacactccttaatcaattcaaactaaacacataaaaacaacaacaaaaaatataaccaccataaaaattatacacatata

SEQ ID NO: 726614 - DNA, 284 bp, Homo sapiens
gtcgacgctgcttggaaggctgaggcaggagaatcacttgaacccgggagcggaggttgcagtgagctgagattatgcctgggcaagaaaagcagcgtgggactacaaacccccggccagcatgcctggctaattttgtatgtttagtagagacagggtttcaccatgttggtcagtctggtccagaactcctgacctcaggtgatctgctggcctcaacctcctgaagtgctgggcacgtgctggcctctaaattcctcttacagagactcattttcatggtt

SEQ ID NO: 726615 - DNA, 134 bp, Homo sapiens
gatcgagctggtaccgggtggggagtcggaatctgcaacagacaacagcagcaacacagcagcagcagcagacaacagcatcataatgcgaggtacagcccttaaccacagcgcctagtgattccgtactcccc

SEQ ID NO: 726616 - DNA, 348 bp, Homo sapiens
gtgtgatctgggctcagtgcatcctttgcctcacaggttcaagcgattctggtacctcagcctcctagtagatatggggtttcaccgtgttcccaagcctgtatctcaaaactcttgacctcaggtgatctgcccgcctcagcctcccaaagtgctggtatcacaggcttaagcctgtgtgcccgcccttttttttttgtttttttttttaattattgagacgaacccttgcgctgtcaccagagtctaatgtgcactggcactgtcttgcgctcactgcaacctccgcctcgcgggctcaagcgactctaggagtctacaggttacagtgatctgaaaaggcgcccc

SEQ ID NO: 726617 - DNA, 120 bp, Homo sapiens
gtgcacgtgtgggtatgacgtgtgtgtactgtctgcattgaaacaatgtaatcatgtgtcttctttttgctttaactgacttatttcagaaattgtacagtgttgaaggagaaatctcgt

SEQ ID NO: 726618 - DNA, 419 bp, Homo sapiens
agattctcactgtaggataagggagatttggaatgaaagaaggaaaatgctggtgttttgttatttgtaattagttatggaaaaaaattactaaaacaagatttttaagtgaaaagaaaagaaaaaggctggccaggcacaggcctgtaatcccagcactttgggaggctgaggcgggtggatcacttgaggtcaggagttcgagaccagcctggccaacatggtgaaaccccgtctccactagaaatacaaaaatcggccaagcacagtggcgcgcgcctataatcccagctactctggaggctgaggcagaagaatcgcttgaacaccggaatcggaggctgtagtgacccgagatcgcgccattgcattctgcactccagcctgggcaacagagtgagactccatctcaaaaaaaa

SEQ ID NO: 726619 - DNA, 926 bp, Homo sapiens
taacgaatgaggcaatttataaccccatcatgtgttggttctaatgcttcttgtgtggcagctgccaccgtgtccgggattctgtccagaatctccttgtgtccctgaggtgtcagtttgcggccgccatttgtggtccttttccaccattttcagcccctccagtggcttggaggcacccggcggtgccacactcttgtgagcctcggctgaagtggctgggcttgaccgccgtttctctgacgtcccccatacctctgtggcccctggagccaaccccaggccccccggaggtacaggtgcctgctgcttgtggaagccagtcgcgtgtaaaaccagttctcatcgtagggagcaagctcttgtgtgctgtggccagcttgactggtcatctcacccattgtggcgactttcagcttcccggattttttgacgaaggctgccagagctctgcacgcaactcctgcgtggtccacgtctttcacagctacctcccaggcatccgtgcggcagcgcctcctgctccgcccccttcctatcggcagcacctccagcggtgtgaccgggtgtgcccttaactgccacggctacgtcggggcgccctcattccctgggcggtacccgtcccggctttggaccttcccctggttcccgaacatttctgcaccttcacctctctccgccccccccgtctccccttttgccgggcgcctccgcgcggtgcaatccgtcttgccggggccccgggcctctctgacatctcggctgtgccctgcgacggtgcccctgctggttgtctgcccgcaggccccccgctctttctccctgcatcgtcgcccgtccttgcacccggggcctcggcctgcgaccggctccccctgccgcctatctgtgctccggcgcgtgcccacccactgctcacgccg

SEQ ID NO: 726620 - DNA, 127 bp, Homo sapiens
cccgtgctaccagctacctgaatcacattggagcggacaggaagacacaccgagaggtcaagaacacaaccaagctgtgctgcaggaggtcgtcaactccaaaagctatttattggtttcacaagga

SEQ ID NO: 726621 - DNA, 895 bp, Homo sapiens
agccgggtggtctctcgaggccgtccctgcggctaatctctaagtccgggccgcggtcggcgtctcctctggggctcggcccgaaccttggttcctcatctgccctgagatgggataatccccacaggaagtaattaagtgcacaagacattggtcaacaatggtttccaaaaagaagactgtcaaaatctgaggataagagagcctggaagaagatgcctccaaaacaggaagcaacactttccaaaaagacaacagaaatctcatattgtaatgaagttgaagaaaatgacagcatcttgtaaagcttcttaagatatcaggaattattcttaaaagggagagagtcagaatcaactagctgtggatcaaatagctttccaaaagaagctctttcagacctgaggaggaaccttcctattccaaaataatagaagaattgttagtggctggaggtcttacattgaggatgaagaaccggtttcaggaaatggctttgtcttgtgagcgtttgcaaggatgaggaagcaagtatgggtggcatcttattctaagagtctcatcaaatgttctggggattgacctactggagctgcatttatcagaactttatttgtgagaagttgcagaatatttgttttgaaaacaaagaaacagtggatgaaatcaaacatactggaatcattgtcaggcaactaacaatgggttgaagagttgtggatggaaaggacttaacaggaagatcatgcaggtgatcagattgggacaggagaactggggatgagtgatcaaggtacgtgaggatctaagggaatcaggaaggtggtgtgggggaagaagagaggcagtgttagatataggagaggcatgggggttgagaggtgcaagtatatgg

SEQ ID NO: 726622 - DNA, 257 bp, Homo sapiens
ctcagaatccgggccagcttagccctccataacgtggacagatccatcggagaaaagacagaagcggctgtgaccaacaggggcgaaaggctgggaactgggggaggatgggtgtgctggcatccttctccttgtagcctgctgggacatcctggaggtggagacagctgcctgaagacgattgctccaggacttggcctgcgactgaaagggcaccccaaatgatcggccacccccctccccttatccagagcctt

SEQ ID NO: 726623 - DNA, 132 bp, Homo sapiens
  misc_feature (61)..(61): n is a, c, g, or t
cagtggcacaatcacagctcgttgaagccttaaactcctgatctcacgtgatccacccaantcaggttcccaaagtgctgtgattacaggcgtgagccaccgtgccaggcctaattcttgtctttattacta

SEQ ID NO: 726624 - DNA, 312 bp, Homo sapiens
  misc_feature (28)..(28): n is a, c, g, or t
  misc_feature (91)..(91): n is a, c, g, or t
  misc_feature (115)..(115): n is a, c, g, or t
  misc_feature (128)..(128): n is a, c, g, or t
  misc_feature (178)..(178): n is a, c, g, or t
ggccaccgagggggtcggggaggctgcnaagggggcgagccgggcagccgcgcaacccccgcccagccgcaccaccgccgcccagcagcanacaaggaagagatggcggccgagntggggaagcgtgngtcccccatggacgacgggtttgtgagctggactcgccctccctatgtcntgtacagggacagagcagaatgggctgatatagatccggtgccgcagaatgatggcccaattccgtggtcagatcatttatagtgacaaatttagagatgtttatgattacttccgagctgtcctgcagcgtga

SEQ ID NO: 726625 - DNA, 113 bp, Homo sapiens
ctcttgttcacttttcccgtatcttgtccccagcagagacattgatgtataccattggcatcaatgtcacaagtgacttcaatctgatggaacacctcggtgtacacggaagg

SEQ ID NO: 726626 - DNA, 790 bp, Homo sapiens
agcgggctggtttgtcagccccgcggctgcgggcggcgggcggcgagcgcgctctgaggttcgtccctcatcgctgaacccggcgtactcccgccgtgagctcctcggggaggggggcggtcggtgcctgtcgcagagccgtctcctcccgcgcttggatggagtccgagcgtagacaacagtgtggaagggagccggccgcacatctcaagggaagggctccgcagcaaaacgagccagagtggcatggcacagcgtgatctggggcaaaggcgcgagagccggcgatccgaggcagggacacgttgatggatgccacaaccaggaagactggacgaccagaacacggacgacacgtcggggcccacctgggaaaaggtcgagtcgcaaaggaggccggacgtggatgagaaagcgtggcacaggaaggcctaatcgttgcagaaaatgagccgggaggagttcgccgttttccaccgagaggaaataacacatcgctttaccgagaagcggatgagcgcccatatatccggggccacgagatcggagcaagtaagccccagggaacatgtgggcggaggcacataattttggcagagcgcagattagcaggcgcacgagaggggccgaaccaaaggaccaccggagatacttgcacgggaaaagggggaaaggcagaccggtatggcgccacagggaccccatagagggcgatagcggggcaccaaacattcccggtgggcggcccaggggagcagcacagaaacaaaaagaaggcggcgcaaaaact

SEQ ID NO: 726627 - DNA, 273 bp, Homo sapiens
ctattcagatagcatttacattgtattgggtattgtaagtaatgtagagatgaagtatatgagatgggctgggtgcagcggctcaagtttctcatcccagcaatttgggaggcaggagaatatcttgaacccgggaggtggagtttgcagtgagctaagattgtgccattgcactccaacctgggcaactgagcaaaacaccatttcataaaaaaactgctaaaaaaaccccccagtaccctgtttttatgtgttctgggctgttaattacaa

SEQ ID NO: 726628 - DNA, 179 bp, Homo sapiens
aatgtcgcatcggtctgttttctcacgtaggggccgcctctgctcatctcactagacatttgtaggaacctcctgccttgtggttcctcttttttctcacaaaacagggacactgaactgcgtcagcctcagctcacccctccttagcccaaggtcttcctcatgcttgccacctacta

SEQ ID NO: 726629 - DNA, 387 bp, Homo sapiens
  misc_feature (103)..(103): n is a, c, g, or t
  misc_feature (112)..(112): n is a, c, g, or t
  misc_feature (117)..(117): n is a, c, g, or t
  misc_feature (120)..(120): n is a, c, g, or t
  misc_feature (122)..(122): n is a, c, g, or t
  misc_feature (134)..(134): n is a, c, g, or t
  misc_feature (146)..(146): n is a, c, g, or t
  misc_feature (149)..(149): n is a, c, g, or t
  misc_feature (156)..(156): n is a, c, g, or t
  misc_feature (169)..(169): n is a, c, g, or t
  misc_feature (172)..(172): n is a, c, g, or t
  misc_feature (178)..(178): n is a, c, g, or t
  misc_feature (182)..(183): n is a, c, g, or t
  misc_feature (188)..(188): n is a, c, g, or t
  misc_feature (203)..(203): n is a, c, g, or t
  misc_feature (239)..(239): n is a, c, g, or t
  misc_feature (272)..(272): n is a, c, g, or t
  misc_feature (278)..(278): n is a, c, g, or t
gatccccttgtacgcttctgagaaattctaagctatatgttcaaaaaccccagaaaacgtatatagaacttctgtctgtgtcccaccaggactggtcacttgnttttcttgncgtantcngncaagatcagatncttgagctgganctngaacttnatccattcttcgncantcagantggnncagangtggtgtggttctgnaatagtagtcttgtctggcttcaggatcacttttgnccgatcgttgttcacatgtagggcacgcagaancaggangagacgggagaagtgcggttaagattgaatagtcttgagccagtcgtcatagaggtttgaagagaaccaatctgggtgctccagtgggctttaatggattgagatcccc

SEQ ID NO: 726630 - DNA, 357 bp, Homo sapiens
  misc_feature (73)..(73): n is a, c, g, or t
  misc_feature (82)..(82): n is a, c, g, or t
  misc_feature (87)..(87): n is a, c, g, or t
  misc_feature (90)..(90): n is a, c, g, or t
  misc_feature (92)..(92): n is a, c, g, or t
  misc_feature (104)..(104): n is a, c, g, or t
  misc_feature (116)..(116): n is a, c, g, or t
  misc_feature (119)..(119): n is a, c, g, or t
  misc_feature (126)..(126): n is a, c, g, or t
  misc_feature (139)..(139): n is a, c, g, or t
  misc_feature (142)..(142): n is a, c, g, or t
  misc_feature (148)..(148): n is a, c, g, or t
  misc_feature (152)..(153): n is a, c, g, or t
  misc_feature (158)..(158): n is a, c, g, or t
  misc_feature (173)..(173): n is a, c, g, or t
  misc_feature (209)..(209): n is a, c, g, or t
  misc_feature (242)..(242): n is a, c, g, or t
  misc_feature (248)..(248): n is a, c, g, or t
gtagggcgagatctcataccaggatgatgtctcgaactttctgattgtgtcagtagatgccacgttcacttgnttttcttgncgtantcngncaagatcagatncttgagctgganctngaacttnatccattcttcgncantcagantggnncagangtggtgtggttctgnaatagtagtcttgtctggcttcaggatcacttttgnccgatcgttgttcacatgtagggcacgcagaancaggangagacgggagaagtgcggttaagattgaatagtcttgagccagtcgtcatagaggtttgaagagaaccaatctgggtgctccagtgggctttaatggattgagatcccc

SEQ ID NO: 726631 - DNA, 453 bp, Homo sapiens
aatccactgcacagattcttcacttgttagaagccactaggacttaggagtttctaagcttttgcttttaactacatgtgcaataataatatttggataggcacattttaggaactttgtggcaaattattctgttgataagtagattattatgagctgtgaaatatcaaggattaccaaaaaagggggcaagggataagaaagaatccatatttaataaccaaagaaaactttaaacccggagcaaaacaatgttcctcaaatgcaaataggaaaggacagccgtgattataacgttttgctcaagcattttcttctttgttcctctaacttaacagaagttgaaacaagtgaaaataggaaatttccatttagaatacaaatcctgtaagtcacagagcaagtcggaaaataataaacaaacaaacaaacacccatgccctgtggaaaata

SEQ ID NO: 726632 - DNA, 925 bp, Homo sapiens
gaggcggagctggaaccgcgcagcgcatgggaacgcgtccgctgctatgggtcaggttcgccggtcgcgggagcgccgcgcgtgcagtcggaggaacacgtggccatcagataactcgatgatgcaagccagttcgcatcacgcttgcatgagccatcgtgatcgcgtgtacaagccaggaaaggaaattcttcaatcgctgaataagatgggaggatgtcaagatatgggacgcttaccattttcgatcagagtttcttctgggaaggcggccgattcaggaattagtgatgagtttaaggtgaagaacacgggatattggacagatattgctacatgggaatgtcgacgcagcacaagagacatagagagtgcccatgtcaagcctgctcgttgtcatcctgcaggacttgtactggtgtgtgcccgactgctcgtgttgacttagctgcgaaatgcgtgatgctgtgacacaagagttgaggaggagatccagagaaacatgaaaaccgtgtctggccatgggttgagtcttggcaattggattgggtgacacaatacaagggtatggattttcgaccggggaaaggggctatgcagggttaaaaagaaagatgtcgggaaacctggaatttgaaaatgaacataggagaggggagtagggaattttaaaaggtgggtgggtccactgggggaacctccaaagaccatggccgggagttcatgaccccaccaagggggcccggtgacggcaggccaaacccagcgaggacaacttgcgggacactatatgaggggaaagaagaggacatggacggaacagggaagggcaaagaaaagcaagcgagagaaggggacccagggggtccaggggaacagaggggaacacggacacacgaaaggagggggaggtcaggcaaaaacg

SEQ ID NO: 726633 - DNA, 460 bp, Homo sapiens
  misc_feature (252)..(252): n is a, c, g, or t
tgtttacatggaatgtcatgtatgtcatacccacacaagagtctaggtctatgctaagccttgctctctaaagcattccaccttgagagacgttttcactctgtcatgtctggcacaactttggtaaaaatattagctgtgaaattcttctgtgatcgcttttttttctctcctcagtaagcacaatatttatccttctaaaaaagtatcacaagcctccttaggatgtttcacctttctcttcctctctantcctggtgttacttggcatccaaccactttttcctctcactaatacaggtgcttccactgcaaaaccacatttcagccaaggactggctctgaatgaccaccgtggatctatggcctttccctccacttgggaaagctcttcagtcagcacaggtactgtaggcggccggagaaaaaaagctcataataactggtgggagtctggcct

SEQ ID NO: 726634 - DNA, 1033 bp, Homo sapiens
gtcggtcaatggtgttgacctccgcaatgccagtcatgaacaggctgccattgccctgaagaacgcgggtcagacggtcacgatcatcgctcagtataaaccagaagagtatagccgattcgaggccaagatccatgatcttcgggaacagcttatgaatagtagcctgggctcagggactgcatctctgcgaagcaaccccaagcggggcttctatatcagggccctgtttgactacgacaagaccaaggactgcggtttcttgagccaggccctgagcttccactttggggatgtgcttcatgtaattgacgccagcgacgaagagtggtggcaagcgcggcgggtccactctgacagtgagaccgatgacattggcttcattcccagcaaacggcgggtcgagcgacgagagtggtcaaggttaaaggccaaggactggggctccagctctggatcacagggtcgagaagactcggttctgagctatgagacggtgacgcagatggaagtgcactacgctcgccccatcatcatccttgggcctaccaaagaccgtgccaacgatgatcttctctccgagttcccgacaagtttggatcctgtgtcctcatacgacacgtcctaagcgggaatatgagatagacggcgcgattaccactttgtctctcccgggagaaaatggggacgggccttccgggggcacaaggtcatggagggtggcagtacaaaaggccaactctacgggaccagcgtccagcagagcgaaagagtaacaacacgggaaccacggatcttgaggctctagcaagccggtggggtgaagggcaactgacacatagcaatatacggccggacgggagaagggtgaaaaaacaggcgaaagagaaccgaagaccaaaggcaacggcgagcatagaggtacacaaagcggcaaagacaacaagaggggcgaacagccaaagacacagaaaccaggggacccacgggaaaggacaccatgacagacggcacccgagcagcgacaccacag

SEQ ID NO: 726635 - DNA, 235 bp, Homo sapiens
atcggatccagcggattatgaaattcattcattcaggattcattcacataaagaaagcacaacgatgacaaacgtcacgttacagaaaggagcaaagatcaggaaaggcttcgagagggaagaatttcacgtctccaagttgggccctcaactggtagaaaatgcagagaagagacctccaggtggggccggaaggccagcatgcgcccaggaagcccactttcttttccttttt

SEQ ID NO: 726636 - DNA, 351 bp, Homo sapiens
tatcgtcgtagcgagcttgatggaaatgttggtggtttcggcaccacacttcctcgcgtgtgggataacgtcaagaaggagttggagctcagcggcgaagtcggcagtggaagactggttggccatggtgttgtcctgggcgattgatttgatgcgcccagtatcaagcgggctttgctgtgtcatcgggggggtggccgccaaaatgcaaattcgtcacaacccaagctgggccgcgaggaatgccgcggctcgcgctgatcagaccaatagtggcatccccgcgatcctccttgctcctcatccagccggcttccaggcagcgttcggcggcaaaggtaccgtcggtga

SEQ ID NO: 726637 - DNA, 247 bp, Homo sapiens
acctccttacccacactacttatatgattcttgtctatacaaaactagcatatatacattctgtggtgcagcatgccaaaaaacattactctgtcagtaattacaaactctctggggaaccatctagagcctcttattctacccatccataaatttatttccactgatttatttaacactggcgcttaataaatacattatataaatacatagcagtgggtaccagcagctgcgaattacgtacatc

SEQ ID NO: 726638 - DNA, 210 bp, Homo sapiens
  misc_feature (59)..(59): n is a, c, g, or t
ggggggggcccccccttttggggcccaaggggggggggggggggattttttgggtcccncccccccccccccccggggggaggggtttccctttttttcccccccccgggggggtttaaggggggggggggggggggcccaaaacccaaatttttttttttccttccccccccccccctggggggggggaggaattttttttccccccca

SEQ ID NO: 726639 - DNA, 600 bp, Homo sapiens
gtagctctacacgagtccccttgcagggctctctaccctggcagtggtacaaccggtacaccggtagcgggggaccttgaatggtgataaggagtggggcgcgccgtgaggccagagacctatgttcatttagcctacataaaagacactcaataaatagcgggtacaataccaaatgaatacatacatatcatcggggtgggggtcagaagacagcagtgcccacgcgggcatccgtcaggaagtgtgggccttggtgtatggatgctacacatgtctagggcgggccacttcttctgtacgtctgtgggacctcagcatacccaataggcagcaagtttcagtatctcccagaggtatgtcctcaggggggggctatgtctcccccaccacttcccctctcatcaggctagactttaacatccatcaatcatgtctggagtctggctccttcctctgggctaagtcatgtgactacagatcagatgcgtggactagtgtctcaggtgtgcaggtaccatggccccaaatgctgttgtatctgactgaggacaatgcctgtctccggcgtccaggacggtaggtgagaggtaagagctg

SEQ ID NO: 726640 - DNA, 342 bp, Homo sapiens
aatcatccaccagcgcttcacctacgcaagaaaaaagggctccagcatggtcctagatgacggaggaattaaattatcgtcttccatgtccacccctatagtcagtgtttactgtgtggttactatggccaggtactcttctaagcactttattaaaactcaatcctcacaactactctgtgaagtaggtactcttaccacgaaacatattttgtgtaagagcaaattcaagcctagaaaaattcagttatttgcccacagtcacgaagcaagcacagtcccagcagtttgacttgattagcccccaccactctacagagagttctacattagcaaggacct

SEQ ID NO: 726641 - DNA, 117 bp, Homo sapiens
tgacagcctataagtcctaggatcacagttaaacactccaaatcacccgctaggatctcttttaagtgtactttcctgctgtaaaactttttaataacacgtcccactcctgctact

SEQ ID NO: 726642 - DNA, 226 bp, Homo sapiens
ctatgtaatcctagattggtctcgagcatttcggctttgacttggtggacaacttggtccaccagatccatgaacttgctcacctggtcttgttgccccacttaggaaggtacttagcacaagaggacagattcgacttcctgtgattcatctgcaacccaaccgatcagcacatcctgtcttccaaccctacccaccaaattatcctttaaaattagggtaggtg

SEQ ID NO: 726643 - DNA, 647 bp, Homo sapiens
gtcgcacgatgggccgccctatgggcactgagctgtcccgggaggcctgtccatccgtgaggaccgttggaggagccccgtctggatgttaagcggatgccaagcggatgccacagttgcacctgacagcggactccgtggggacatggctttgctggagtccctttcaccgtatctaagccccacgggccttctgctggtcagctgcgacctgtgcttcgtgcgagcagatcggtctacctgtactgtgaatgtgacggtcactcaactcagagccaactcggtgactgtgtcctgtgacgtcccacaaggcaacatcgtagttggctactccatattccaattacggcataatgtgcccgtgcagagtgtgattcgggaggtgaacaccaccacacggtgctgtgccctcttgagcctggctgaagacagtgactacacagtgcatggcatgagcatcggtcttcggcgagagagtccccctagggcccggttgcacttccgaactctcaagggttctgaccggctaccttccacgttaagctcaagtgacattacagtggaaggtctgatggagagcgggcactgcatactggtggagagtgcatcattcgggcggtgttgctcatgtgggctgatgttggccg

SEQ ID NO: 726644 - DNA, 157 bp, Homo sapiens
aatctggagagttctggacagcctgtgccacgggacactggcatcctgtacatgagcgctgcgtcctacaagtacatgccacgatgtgtctgagaaactgcgggacccaagaatttactacattaattcggcagcctcgttcttcgccttcatccgc

SEQ ID NO: 726645 - DNA, 127 bp, Homo sapiens
aggatcgagatggtcacaatggtggagaagatgaagtcacagaagtagttttgagcaacaagatcccaaagatgctcagagacctgacatgtgcttattatggctccatggggtttttcccatggag

SEQ ID NO: 726646 - DNA, 590 bp, Homo sapiens
ttgctgtcccagagtatctccatcaccctaaattattatggaactcctaacaattaataagaaaaatatggaaattttaggagaagaaaatgcttcttgaaaacatatgaatcagcataaatcagagaggaaatctgaatagttaacaagaatgcattataataagaaaaataaacagttaaaacatccgtatatcattttatgtccatattgttggcaaaattagaatgatgaatagtaacacgtattggtaaagatactgagaaaaagaatgcttatatatcgccattgggagccttaactaatgaaacaattccagaagacaatttgttaatatctactttgcttaaatatctatatacctgacaacccagttattttactcttggtatatatattgcaaataattctcataagacataagtgaatatgaataaggacatttatttgggttactggctagctgaatataagctgggttcctcttactaagagaatacaccattaaaagttggtggatgcagtctagggaaaactgtgaagcactgaagcaacataataaatttggggttgatggggtaccgagctcg

SEQ ID NO: 726647 - DNA, 469 bp, Homo sapiens
ccatgaacatgaatctttgtttgctttttgagcgtaagctttgagtgctacatcaatttctgatccttccggagctacaggtagattcaccggtgcatccttgtcgaagtatgcgaactcagagctcaacactgtaaattcaaaggcatttaaatcatgattttctgcatttcttttaaaagattccatgatagcatcaatccattggttgagtacttctgcactttctgtaaaaaatttgaacgattcacctgtggctgtatttctgatcttaaatgagaactcgtctgtgtttggattcgcgttagaaatttcagtattactagtctttctatctccatacgctgttgacatgtgatttccagaacttttaagcagaggtctcatggagttaatcggtgtcgaaaaattatgcattggggatttatgttctttctgagagtagtttctcagaggctgtttacttgtt

SEQ ID NO: 726648 - DNA, 160 bp, Homo sapiens
ggtggtctgaactccgacctcagtgatctgcccacctcagccttttaaagtgctgggattacaagtatgagccaccatgcttggccatgtttttcttttctttttttttaaatttgccttgccctaagaaatttttaataagttcccatgcacaactggt

SEQ ID NO: 726649 - DNA, 155 bp, Homo sapiens
  misc_feature (149)..(149): n is a, c, g, or t
  misc_feature (152)..(152): n is a, c, g, or t
ggctctgtggctcactcatcatgtcgtcctaagcaggtcacctgactcctgtggacctcaatttatctatccatgaaatggacacagtgaggggaaacacgtatcctggtgttacatcataatcccggaatatgcttcatctcattcantcntgt

SEQ ID NO: 726650 - DNA, 403 bp, Homo sapiens
  misc_feature (61)..(61): n is a, c, g, or t
  misc_feature (74)..(74): n is a, c, g, or t
  misc_feature (160)..(160): n is a, c, g, or t
  misc_feature (309)..(309): n is a, c, g, or t
  misc_feature (319)..(319): n is a, c, g, or t
  misc_feature (348)..(348): n is a, c, g, or t
gaagatgagtccaaagtaatttttttgtttttgagacagggtctcgctctatggcccaggntggagcgcagttngttgatcatggctcgctgcagcctccagctcttgggctcgggcaatcctcccatctcagcctcctaggtagctgggactgcgggtncatgccactgtgtctggctaatttttttttttttggcagagacaaggttttgccatgttgccaaggctgatcttcggactcctggggcttaagtgatctgttccattccctgctttccgcctcttcagagtactggggattatagggtncgagccactntgcctgggtccccaaagtaatttttttanttgtcccggcttctcatctgtttcccagagtttttccccattcaataaggtcaat

SEQ ID NO: 726651 - DNA, 490 bp, Homo sapiens
taggcccagagactgtttcagaagagatgggtgcatgagattgtaagggctggttttgagggacacagttagctgagacactgcaaatcaacgagggtacacaagtgcctaaacagcttgtaaaacaaagaactttgctttctcagctattacgtggcacctttttatccaccccaaccatgaaaaatgtcctgcttcctggaattaaaagaaaataagaggataaagatacctcatggccaagcctcctgggcataatactcccagttataagttttgcagatatatatatttagatatataaaattattttttagaaaaatgtatatgttttgtatagttaatcactgtaagcctataattaaaaccaagattatagtagctcaacgcatagaaatgaaagaaaactcaatttttgtaaactcgccattggctttttgtttttggctctttactttaaataaatcttttaaggggtaatgaaaaaaaa

SEQ ID NO: 726652 - DNA, 688 bp, Homo sapiens
tctggaggctgagatgccggagatgcaggtgccctaggaggccgagactcgtgtctgctatcgaactccagatggctcagacctgcatcgatagtctcagtcatttacttcagagaccgactcatatcccaggaatggtgtgtgatgtgcagccacagtacgactgtgatcgaccagagccacgcattctggactccagaggactgacaatcatcatccgagctgtgacatagacgagcaggagttgtcagatgttattgcatcctgggtcatgcttccggatgcataatgtagaattgccttgacgtctgcgaatgagaactagttccactggactgacaagttccatcacatcttcatggtcaattgggtgtcttgtggaccaatgtagtaacctgactatggttcatggtggatgcctatgacagaaaaggttgtcacaggcagggacatttatggcacgtatacaagattgtaaccgtttgatggaggtttgatatttcaactaatcaagatgtgggcaatctgcaaaagatgattgccatgcctgaggaaccgctctgaccctacaaggactgcaataactttgaacaactcggtgtctgactcttagcctctgttgtgtcatgccagttaagctgcagataaggaagaaataaacgttagccaaggtggagagcgctcagac

SEQ ID NO: 726653 - DNA, 795 bp, Homo sapiens
gccaccgccgaggaataccgtgtactattaggccatggtcaagccccaccgtgttcttcgtagcattgccgtctgacggtcggagcccttgggcccgcgtctccttgtgagctgtttgcagacaaggttcccaaatgacagcagaaaatttgtcgtgctctgagacagctggcagagaaaggatttggttcactaatgggttcctgctttcacagaatttattccaggcttcatgtgtcagggtggtgacttcacatcgccataatggcactggtggcaaagtccatctatgcggtgagaatactttgaagatgaggaacttcatcctatggcatacgggtcctggcatcttgtccatggctaaatgctggagccaacacaaatggttcccagtttttcatctgcactgccaatgactgagctggttggatggcaagcatgtggtgttatggcaaacgtgaaagaaggcatgacatattgtggacggccatggagcgctattgggtccaggaatggcaagaccagcaagaagatcaccattgctgactgtggacagacatcgaataagctttgacgttgtgtcatcatcttaaccaccagatcattccttctgtagctcaggagagcaccctctacccatttggtcgcagtaatcctagaatctatgtgctctcgctgcaggttcactttgggttccatgtttgccttgttcccttccatgcctagctggattgcagagtaacgttcactgattatgacattaaacactaaataacagaaaatataaacaaaaca

SEQ ID NO: 726654 - DNA, 207 bp, Homo sapiens
cctgctggaggtagggctcgtgtcatgttatatttccttcaataaactttccacccagaactagggctacaaacataacgacgttataggaatcatacggacaattttagtgggcaatcacatggccatctttggcaaagtcaaattcctcagaaagcaatccagacaagcaacacagttcaagaacatcattcatccaacagcaag

SEQ ID NO: 726655 - DNA, 449 bp, Homo sapiens
  misc_feature (8)..(8): n is a, c, g, or t
  misc_feature (33)..(33): n is a, c, g, or t
acggaaanccccaacagtccaaagtttggatgngggaaccggaatatttaccatattccggcaagtgtttcccccccacacattacttttttaattaacaaaaggtggatataacccttaacccaagcaattaaagcctagccatcacccaatattgggatgaatccaacatccatatgccctcttgatgtgatatactaagaaggacaaagtgtccaattcctttggtattccctgtgaaaaatttataacttgaatcttaggaggaaacatcaaacaaatccatgttgagggacattctacaaaataacttgcctgtacctttcaaaaatattaaggtcaagagacagaaaggctgaggaactgttccagataaaatgagactaaagagacataacaactaaatgcaatctgtgatcctgggttcgaacctggactaggaaaaaaaa

SEQ ID NO: 726656 - DNA, 132 bp, Homo sapiens
caaatctctccgcagcctcatacagtgtctgtgcatactgtctcacgagagcatctgtcagataattatcttcattcctcccaccagctgagagagacaacaggactcgctggaacatgaatgatgtgttag

SEQ ID NO: 726657 - DNA, 501 bp, Homo sapiens
agtcccacaggggcagtattctatccttggacagcagtgactgagccctggaagcaatgatgtgtccccaacccagcacagggcattcaacagctgctcaatcagtgtttgctgaatgaatgactccagagaataaacaaacaggatctgatgtggaacccaaccgatgaggaagtcacaaatgggaactggataatgtgcatcatcagaaagtgactagataactacagtccatctcatctggctcagggaacacccttgagcttctcaaacctctttacagccaaacaggttaacagtggcaaagctgggggaaaggacaaggaaaacggacagacacaatccaaaaatgattcataaaacttgtgtttgaggctgagcatggtaataatcccagtactttgggaggccaagggaggtggatctcttgagcttgggagtcgagaccagcctgggcaacatggcaaaactccatctctaataaaaatataagaattaaaa

SEQ ID NO: 726658 - DNA, 310 bp, Homo sapiens
agctattcaggtgactgaggtgggaagatgacttgagcccctgaagcagaagttgcagtgagccaagatcacgccactgtactccagcctgggtgagagagccagacgctgtcttagaaaaaaaaaaaaaaaaaaaaaaaaaaagttgttttggtagagatgggatcttgatacttaacccggggtgatctcaaactccgtgacctcaagttaattctcggggtctgggcctccaaaatgtgtgagagttcaggcatgggccacaacacccagccggaaggtgccagtaattatttttttttttttttct

SEQ ID NO: 726659 - DNA, 864 bp, Homo sapiens
gctagaggtctgtgttgccgttgcccaggtgtgatgtctctgcgttacaaactcctatgagggcttgctgtgctggagggcctgctatggtgtgctgcggttcatcatggagatgtggggccaaaggcgtgcgagggtatgatggtgtcttgggaagactccgaggaacaagaagggctaaatccatgatgtcagtggactgggactcatgatccacagacgagagaaccctgtttacatactacgtctagacaactagcgtgtgccgtccacgatgttgctcagcaccagggtagtgtcttggtgcatctaagggatgaccgatcatgctgcaccgtgggtaccgcaacttggtaacgtattggccacgtaaagtaagaccctgacgtgacctacgttgagcgagttgtgggaaactcgaatggatgatgatatctgcccaacgaggcccctattctcagtaagcgagaaggggtagtggaaagcacactagccggtccgtgacccatgactctccaagaaacgagttgcgcctcgaacacgcgatgaaaccacgggttcttccatatgggcctagcttggtatttctgggaagatcttggagtgttgtggctcatctagaagtaccgtgtgtaaaattaaacaaaactatcatggctaaccaaatagggaaccaccgagacgatacttacgagaagtatggaaaaaaaaggaccaaaaagaaagatcacaaagagacaagagaaggtaccgtacggaagtgtagaacgccgagggggagggccgcaagggatacaaaccaagagggatgagcaaggttggcacgcccgtacaagactaacgagtcctcagggcagggggcac

SEQ ID NO: 726660 - DNA, 138 bp, Homo sapiens
caggattacgatagtccaacataccctaataatttaaaactactatagaaactgcagcagcacaaggcaagtggcttaatgcatcctgaagagatatctatctgatggtagcttctgtatacatccaagtaagcattc

SEQ ID NO: 726661 - DNA, 103 bp, Homo sapiens
gagaaggagggctgaactggagaagtatgatggggaagcaaggaccaggacaagggttgggggctgggggaggctgcggcaggagatgcctcttctaggcagt

SEQ ID NO: 726662 - DNA, 609 bp, Homo sapiens
aaatatttattgggactgtctttgaatttagtagaatcactgtatcattaacagtacttccccaaactgttaatgatacagtgattctactaaattcaaagacggtgggggaagtactgcttggcgccttattgaaaacttaggtctagctgtgttgcatcaaaatttttgagctattcaaaaactaataggatctgtgtaaaatatttcactcaaaactactaaaaaaaagtctgggatggcagctcattatcaaatatactcctattttgtggtgatttatgaacatccccactaagtataactaaagatcataaagagcctcagatcaagttggtcaggtttgtcaccaagctttgtaaataaactggttttcatagctttttggagatgagaattgaggataagaaatcgtgtctctgtccctttttttttgtatttttggtaaagtcttacatgtatttaccggataccatcttttggacctggcaatatttacctaattcaacatattttccctctttgcagaagggccagtccatgtgaaaaatcccttttcatgggaaagagctccatgtaacagcattaataaaactggctacctagcag

SEQ ID NO: 726663 - DNA, 287 bp, Homo sapiens
ttattaaagggggcatgtcccctgcttgaaccctgaaaggcaggtggtaggccatggccacaatccccagtgaggaagaaggtgtccctgagaacccaaatttcccagagagtatttgagaaccaaccaatgaaaacagtcccatggtttttagccggtaagtaaacagtcaaaagattagcatgaaagcagtttagcattgggaggaagcacagatttttaaagctgtcctgtcgctgcccaggattgacctgggggtaagtcccaataaattcccctactcccca

SEQ ID NO: 726664 - DNA, 215 bp, Homo sapiens
  misc_feature (14)..(14): n is a, c, g, or t
  misc_feature (16)..(16): n is a, c, g, or t
  misc_feature (21)..(21): n is a, c, g, or t
  misc_feature (49)..(49): n is a, c, g, or t
  misc_feature (85)..(85): n is a, c, g, or t
  misc_feature (92)..(92): n is a, c, g, or t
  misc_feature (94)..(94): n is a, c, g, or t
  misc_feature (98)..(98): n is a, c, g, or t
  misc_feature (102)..(102): n is a, c, g, or t
  misc_feature (106)..(107): n is a, c, g, or t
  misc_feature (115)..(115): n is a, c, g, or t
  misc_feature (123)..(123): n is a, c, g, or t
  misc_feature (129)..(129): n is a, c, g, or t
  misc_feature (131)..(131): n is a, c, g, or t
  misc_feature (136)..(136): n is a, c, g, or t
  misc_feature (139)..(141): n is a, c, g, or t
  misc_feature (144)..(145): n is a, c, g, or t
  misc_feature (149)..(149): n is a, c, g, or t
  misc_feature (155)..(155): n is a, c, g, or t
  misc_feature (161)..(161): n is a, c, g, or t
  misc_feature (164)..(164): n is a, c, g, or t
  misc_feature (176)..(176): n is a, c, g, or t
  misc_feature (178)..(178): n is a, c, g, or t
  misc_feature (181)..(181): n is a, c, g, or t
  misc_feature (183)..(184): n is a, c, g, or t
  misc_feature (193)..(193): n is a, c, g, or t
  misc_feature (207)..(207): n is a, c, g, or t
  misc_feature (211)..(211): n is a, c, g, or t
  misc_feature (215)..(215): n is a, c, g, or t
gcgcgggcgcgcgnangcggnctgaggcggcgccggggcgggcgcggantggcaagcggtgtggcggaggcggcgccacggggantgctgangngcgnaganggtnngcggcgcncgggagcntgttgntngcgcngtnnnggnnggangttcgncggcgngtngcagcattttgntngcngnntttaagaancatttttataatgngatntatn

SEQ ID NO: 726665 - DNA, 174 bp, Homo sapiens
aagaacgcgcgcaaaccggacctggttctcaagagtctctgtctctgtcgtccccccagattagacgattttcatcagagacatggctactggaactgtcacctgtgtactgggcgcaagcactgttacctgggtctacaccatggctggtcatacgaggccatccggtgagtc

SEQ ID NO: 726666 - DNA, 199 bp, Homo sapiens
ctcaagtgctgggcttcaaggactcgcattctgttgggcctgtcagccagaagagaatctgtgatgcggatgagtgagggtggggcgaccgatatgaagcatctttgcacactttttacatgtacttattggacaattcgggcagcttcaggcttcagaggacagctgtcatattcatcttgacacatgtgggcacaga

SEQ ID NO: 726667 - DNA, 424 bp, Homo sapiens
gagaatctaatccatcccggtctgggtatcatcacccgatgaggcacagccagaacgctagacgcaggcacatacttccctattctacaccctagtaggctccctatccctactcatcgcactaatttacatcaaaaaaacgctaggctcactaaacattctactactcactctcactggcccaagaaatatcaaactcctgagctaacaaacttaatatggacagccttaacaccaatagcttttataggtaaagatacctctttacgggactccacttatgactcccctaaagccccatgtcgaagccccccatcgctgggctcaatacgtacttgcccgcagctactccttaaaaacctagcgcggcctactggctataaactacgccgtcacagctccacttctcaaaccccgctggaca

SEQ ID NO: 726668 - DNA, 606 bp, Homo sapiens
gtaactaggtcggacatcgtaatatgctcggaaaagtaagttgcttaaaaaccctggtaggctagactcatttaaatcgatctcgcgatgcatagacttactagcagagattctactcacatctcaagctaatatcaagcgcactgagcagtggatctctataagattgcgtacgtattcgttagcatgtagggtagttcctccgtagctagagcagcacgtgtatgttatccagtcctggggtggcaaaacgacgtggcaatcggatttccagactcaaggtagtctggtctactgtgtattctaccttccccgtaaaatcccaccaaacgtgggaaccttttgacgcggacgcgagggtgcgcgacacggacgtgtcacttggggacgtgtcacctttcagggtaaggaagctcaagtgtacctgttgactacctggaacgtggacatgcataccccaatgggtccaatgatggcaaatgtgggcgaaacgcgttggggtaagtacttggccctcacaactggcatgttaccaaggagccttcaggtttaccacctttcttgggtcttctggacatttcatcgaccactctgaaaggagaagaa

SEQ ID NO: 726669 - DNA, 567 bp, Homo sapiens
caaggcctcccttttcactgcttttccgcctctactcaccccgaccccgagccccgagtgcccagcccgtgtccgcggcttcctccccgcccgcttcccggcgccccggccctccacgcttccgcggggagatctcacctaggagccccgaagcggcgtgtggacggactgttgccttcatgtgtcgtaagaccggcctagcgcttgcctcgcatgcttcctgtccggccgccgctatcattcgcagccgaggccccggggcacatggagggcggcgtgcgctgtgcttatcggcccctaacggggcctggagccgaggctcatggtgcaggagattcgcccgccgccgccaggcagactctgtcttggcattgcagctgcctaacagcctacccggccgtacaccgaacgcgggcagcgccggggatctgggcggaagagccaggagaggcgggacggcacggggtgtgaaggtgcggcctgatatagccaaccggcgcacggggccttccgcgggttgtgacgtaagcagctgggcgcccgcagggacacctgcgacctcccccg

SEQ ID NO: 726670 - DNA, 373 bp, Homo sapiens
cacggaaaggcgatgtggtgatcatctcgcccaaagccgttgggacggcatcagcatgatcgtcctcgtgtttgctggaacgggagcgcgcggacatcgtcgatcgcttcaaggcgtgcgatccgtgcgacgcgcgaagtcatgatcggctattatgtcaccggtgatgccgatttcattctggtaatcacggcaaaggacatggaggactacgaggccttcacccgccgcttcttttatgaaaaccacgacattaaagggttcaagacaatggtcgtcatggaccgtgtgaaggccggattcgcctttcctatcgaagactgaccggccagaggtctgctaacatgtctgtgtccttctccggtggcgtggt

SEQ ID NO: 726671 - DNA, 269 bp, Homo sapiens
ggggggggggtttcccccccccccccccttttttttgggggggggggtttttcccgggggggcccccctttttttttttggggaaaaaacccccctgggggaaaaggggttttttcccccccccggttttttggggccccaagggggggggcccccccttttcccaagggggttggccctttctttcccccccccccccccctgggggggttttgggccccccccggggggggggggggttttttttttttttttttttttttccccca

SEQ ID NO: 726672 - DNA, 982 bp, Homo sapiens
  misc_feature (584)..(584): n is a, c, g, or t
atcccccccgctgtgtagattaccggctttcacccacatattaaaagacccagttcacccctctgatgtgttataccgaaaaacccacccattacgcgatattttagagtggggaccacaccgcgttttagggtacattcgccaaagaggatcccccaccaaagattttggggccacccccagaaaatacgccccaggccctttttttttataaaacacgtactcggccccccacgtgtacacattgataacacccgggtgcccttaaaaggtttacaccgctaggggccctctgggtgtgggcccgaaaatttccgcgccgcacccgagaggcccgccccacacaaatatgggggcccccccgttttcccgcgcacccctcaacacccgcgtgtgagataaagaagcgctcggccacccacggggtgcacatactatatagagaaaaagtgtacttcaccacacgccgcccttgggccacacacgacattctccaccaccgtcacaccatgccgcgcgttgtcgccgaaggaagatcttccccccctgtattctccctcccgccacaaataagcctctctccnccacacacaagagttacgcaccgggttaaccgtcacccgcacattctgagatgagaagcggagaattctcaagagaaggccccccgtataagagaggtattcttccacctccaagcctctcaccggaaggaaggaagaagaagaaaaggaagaagacacacattatatgttcctcgaaggtttcacgcccctggaatcacggagaattatattgaaagtatgaatcccgaccacactaaaggaaaattctgaaagcttttggaacttcggcacactctgtcccacaccctcacggtcacactcacgcctacccttgggatgaatttccaaacccctcggggacccgtttgaaatttttctgtaatgccgtaattaattttccataaatctgggaccac

SEQ ID NO: 726673 - DNA, 151 bp, Homo sapiens
  misc_feature (63)..(63): n is a, c, g, or t
agttgtactgctgacacaggaaatggatgctgggaatacaggcatggaagctcaggcagcagnaattgcaggaagaaaggaagaaggaacatgatctcaaacctaaagggactttactgagaagcccacttccgaatcaataaaaagcagc

SEQ ID NO: 726674 - DNA, 953 bp, Homo sapiens
tggggccgttttttttttttttgggagaccccccccccaaaacccccggggggggcccggggccccccccccccccccccccgcggggggcggggtcaccacaaaaaaaaagaaggttggcctacatacaacaacccgagcgcgacagggagaggaccacggggggggtatatgaagctgggggtgggagaggaggaaaacatatgttgagggagatacatcacagaagagattgctcctccctcttataataccccaaaaagttgagtggggggcggctcgcgtggctccaacacaacgccagacgatgcggtatgggtggtgaacacgaggggggggtttgatagattaggtccccccccactctctgtgcggtggtgtagcgagggtgtggtgctcctcctctggtgagaaacactcacaaaagaaggaggcggcgggcgctactatgtgcgcaccataaagaagccaaggaggagggttcccagctgtggagagaaaaagaccgcctgcgggtactaaaaacctcgggtggtggtacgccaaggtgggtgcgtgctcctccagaggatgtggagtactacgagggtacttaacctgctgtagtcacgttgtgtttgctccccatcgaacgagcaaacaaaagtaatggggatttgctcggtcgtatggtgactaatatggtggcacgaacactccctcgtcggtggggcgtcctctctttcggcagttgtgttttttgcctcctcccgcggggtattcccacgtggtggtgggtgtttctccgcgcagcctgagaaccctgtggtcggtgttaataggaaaagcccccttacgttctgtgtttgtgccactgtcctggtggtggctgcttgggaaacaccggggggggttcccctggtgctgaggggacggtcttgtggggaatccttatcagggggtcccggcgtgtt

SEQ ID NO: 726675 - DNA, 585 bp, Homo sapiens
  misc_feature (393)..(393): n is a, c, g, or t
  misc_feature (401)..(401): n is a, c, g, or t
  misc_feature (409)..(409): n is a, c, g, or t
  misc_feature (434)..(434): n is a, c, g, or t
atgatgagtgatgcaagtgacatgtcggcggcagcgttgtagcagatggatggtatcatagcaggttctaaggctatggaatattccaatgggatttttgattgccaatctcccacctctccattcatgagaagtatgcgagctctgcaccttggacagacctgcatgaattgttagagagatgcaaccactagaaatgtagacatagatgccagaaccaagataaagagctagctcctgattcatgcgtgccacatattacaacagagatccacgagctcgactggtgctgaagaagcaaagaacgcaggcacgtctagcaaatgaaaaagaatccctcgttcttcagtaagtgtgttaacagaccaggtggaggctcagggagagaagatncgagattnggagtttngtcttgaagagcacagagagaagtngaatgccacagaagaaatgctgcagcaggtatgtgcagaggccagaaccaagatgggatttccctgctgaactatgtgagatgctgcatttctatgttgtgtttgctctgatgcagcagtaagtttcttgattcacttagaccagcacatt

SEQ ID NO: 726676 - DNA, 736 bp, Homo sapiens
  misc_feature (393)..(393): n is a, c, g, or t
  misc_feature (401)..(401): n is a, c, g, or t
  misc_feature (409)..(409): n is a, c, g, or t
  misc_feature (434)..(434): n is a, c, g, or t
atgatgagtgatgcaagtgacatgtcggcggcagcgttgtagcagatggatggtatcatagcaggttctaaggctatggaatattccaatgggatttttgattgccaatctcccacctctccattcatgagaagtatgcgagctctgcaccttggacagacctgcatgaattgttagagagatgcaaccactagaaatgtagacatagatgccagaaccaagataaagagctagctcctgattcatgcgtgccacatattacaacagagatccacgagctcgactggtgctgaagaagcaaagaacgcaggcacgtctagcaaatgaaaaagaatccctcgttcttcagtaagtgtgttaacagaccaggtggaggctcagggagagaagatncgagattnggagtttngtcttgaagagcacagagagaagtngaatgccacagaagaaatgctgcagcgggagcttctaagtaggacatccttagaaactcagaagtgggatctgagtgctgaaatatctaactggaagtggaaactgacagcggtagagaaggacagatgggattatgaagataagtccagagacacagaggggcgtgatcaggagatcaaggattggaggttaaaagttagtgaaagggacagtgagagacttcagttatgaaaaaaagcttaaatcaaccaaagatgaacgggcatctttaaaagaacaactagaagaaaagaggggtacc

SEQ ID NO: 726677 - DNA, 119 bp, Homo sapiens
tctaaggatcccgcgtatcgtacacaaactgaagaagtatcattactatgaaatcaagtactgcttaaaagcattacagactctcactcagtttcctgcagataagtgaatgcatactc

SEQ ID NO: 726678 - DNA, 136 bp, Homo sapiens
tggagattactatttcgcggggtggtggtacgaagttttttcatagcgaggtgtatgaattggtcgtaacggaatcggcgcgtatgctgttcgaattcataagaacagggaggttagaagcagggtcttggtgagt

SEQ ID NO: 726679 - DNA, 392 bp, Homo sapiens
tagaggaccttatgtcatcccccttcgtgatatcgcatgatccattataatataggcaggggatatactattggtggggcgtgcagaccctcccttgcttcagccagacagttcaacctggagttccttggtacctggcgccacctcccgcagcatgcctctccttttcctgcagacgttcaataatagcagctagatcagcctcacggttttccttaatttgttccattttcaggatcagcttttcctccgccatcttgctgaagttgttgttctcctccaaagccttctgaaggacttctcgctcgtgttccctcttctctgccaattgtttcagcacctgggcctcctgagactttcttctttcctctgcagcctccagtttcttctgg

SEQ ID NO: 726680 - DNA, 590 bp, Homo sapiens
atacaacaaaataatatccatttgtagggttccgcatatctcttgaccctaaagtaagaatgagtactgcttcttctaggtagtgcctccttagcaaatggaagattagttaggatgggttaagaaaggatgttggccaagtactgtcttttctcctattaaatcacttgttataaagtaagcactttttctttggtgccttggccttctgcccataattttgtttaaggcttcccaaatgtaatgtctataggtgtgaaatgttgaccctgtgcagacctctaataacagtagcactgatctggccgggcgtggcggctcaggcctgtagtcccagcactttgggaggccgaagtgggtggatcacgaggtcaggagtttgagaccagcctgaccaacatggtgaaaccctgtctgtattgaaaatacaaaaaaattagccgggcgtggtagcgcgtgcctgtaattccagctactcaggaggcagaggcaggagaatcgcttgaaccctagaggcggaggttgcagtgagctgagaccgcaacactgcacttcagcctgggcgacagcgcgactccatcttataaaat

SEQ ID NO: 726681 - DNA, 165 bp, Homo sapiens
atcagacttcagaccttgcaacaaacttaaaaccatcttgggagcaccgcacgtccaaagagatgatcttcttggggccacatcgcaatttccaccagcttcacgaagggctcttgctcaggattgcagacaacatgagaaaagatggacctcctcaaccaccac

SEQ ID NO: 726682 - DNA, 1359 bp, Homo sapiens
ggttttcagattgctcttgggaatcatgccgcaaatgtagtgtctcggtcacggtagctctgctctgtacacctcggtgacccggtgagcgaatatgacgacgagtggaagaagccccgtccatgttttacctacctgtttagtgtcgtgtgcgagcatgagtccataggtgctggactgtcctagttaaagaacattgccctatgagtgccccgggaatccggtctccgtgtgtgattgattcgctgccaaacatgcccataacgttcggtaaacacagaagatagagggcacgatctactgtattcggatgggatcacctgtaacgcgccattggaaccagagcagttagccatggtacacgaacttggtaggcaaagatgtcgtgtagctggccggctctttcctactcaatttccccacgactacaaggacactgtcctcactgttctaacccttttcaatttggattgggagttgagcaagccgagatgaagttccttacgcttttagggcgcacggtggctatcagagggcaaccaaacgggaaagcattattgagtagcgttccacgtataagccagagggacgacccttcctcgtgaacgtacacgggtcgagttggactgggacccgagaagccggaacccatacaccgatcctgtgctgtgtccagatggtatcacccgtgttctgtgatctatcagcgtgattgcataacacacgtttgcatgtgaacacgaacgcgaaacggatcgcggacagacctgtgatcgcgggcgtagcagggaaaaggagggttccggacgtgtattcccgcaagttagctgcgtgggaggaagaaatgtgcgcccatggggttggacatttgattcaacccaaaaggcttccgcggaaacccgggcccaaattcccgggcgagtgcgaccgtcgattaagcacagaggcgggacctttgccaaagatggaattggcttcgcgcgtttgccaccgtggggcgaatacggactcacaattgcattaacgccggagcgacacgagtcggccttaactgctgtgaaccggcgtcggtgtagttttatcgagacaataacccgaggcgcatacaggaagctaaattggcattgcgcgccccgtaattcctcctataaggaccacccaatagcaacataatcaggtgggatggaacgctttgtgaagtagtacaccggcagcgacagaaacccggttgaatcgtgcgtccggtgtgaaccagtacagatgggggagttccctaacctccatttcggcaccttcagggaggaaggggccgtttgccagttgtagttgatccccaagttcgcaagtggctcccataag

SEQ ID NO: 726683 - DNA, 435 bp, Homo sapiens
cccctaccccctgcccttccctcagtttccagccgggattggctattcattaggggacccgtccactttctcccctgaaaccccacacatgtggttcccttataaaccagtctttgtactctccctaaaacagcgcaagctctaggaatttttccaaggggggttctgcggtgcccttgccccccaaccagtttgcccccccctggggcatttttgtatggtgtttcccctgtcctgtaaaaacctttggatgtaccggaatggtatcctccagtcgcctttggaaataaatggtcattaatttgtgtacttagcattctgaattttagtcccaggtgttcctgttgttgaagatccttgaatgaaaaggaaccctcaccatggggcttactgttataatgtttcttcatttactgttattaaaagatttatgag

SEQ ID NO: 726684 - DNA, 311 bp, Homo sapiens
ctgcaacctctgccttacaggttcaagcgattttcctgcttcagcctcccaagtagctgggattacaatgcatgccaccatgcctggctaatttttgtatttttagtcgagacggggtttcgccattttggccaggctagtcttgaactcctgacctcaggagatccatccgcctcggcctcccaaagtgctgggattacaggcatgagccaccgcacatggccctaattctgtcatttcttctatgttcgttagctagcatcctgtaaagaagacattttcttttttactctcccttctgtcgtcttctc

SEQ ID NO: 726685 - DNA, 118 bp, Homo sapiens
catttgatgcccctttgatgcacctgcatcacgttataatcacgtggtcatcaacaagaagggctatgttctctggaggctaaatggctatatcagtcagtaccgacttgagtaggat

SEQ ID NO: 726686 - DNA, 478 bp, Homo sapiens
tgaggaccgtatatgcactgaactatgctgggagctagagacacaaaatctatatggagatgtatgggatggtcgtgaaatcatagccaaaaaaagaggccaggtagtgtaactctggcaggtgggcttacaggtcagcacggtgtttagtttcgtcatggtctatgaatgcctaccagggctttaaactgactcaccctggctggatggcagttgaacttgcagccattagaccaggggttctagtctcttgtcactccaattattgcttctacgaactaccaggtagtacacattcatcaaatgatgacttagcactgatctatcagtcacggatatgtgatgtggctaccataagcaggcaggtttgtagaatgagtcacagaaacactgtcgcgcaaggtgttcgtgcaggcggagagatgagcgcgagggtcacccctgacagcaagggggagcggggagaccagcttgggta

SEQ ID NO: 726687 - DNA, 656 bp, Homo sapiens
tgtatttttagtagagatggggcttcaccgtgttagccaggatggtctcaatctcctgacctcgtgatccacccgccttggcatcccaaagtgctgggattacaggcttaagccaccgcgcccggcagtttacatgaatatttttaaaaagggtggtcccaaagagctagagcatttggggacatctgactgatagaagtaaataagaaaatgcctatcatgaaaagatgttatctttattcaggtggcaatttcttgaggagctaccttgattttgagagaaaatgaagagaaaggtattcggcaaaggtgaaatgtgcagggaagagtccactctggatggtgttttggtcagcaggctgtggatggggtgtgtgagagtgaaagtttatcacactgagaaaaggcctctacgcctaaactaatgttcaggctgggttattactaaaatgtggtcatatcatgctccattaacagttacattaaaatataagaccaaagaacctgagttttgtttcaattttttaatatccccaaattttaataaaaattttaccttgagccacagatgcaaagcctgaagaaaacaaaaacaaaaaatttatcaaaggataatttttaatttggaaaaaatgcacactatattaatatactat

SEQ ID NO: 726688 - DNA, 900 bp, Homo sapiens
acaaaggcaggccgcgcgaacagatacacaagtcctgaggatttttcgccggaaaatccccgcgggacccccttggtgcaccccggggtggcgccgcaaacggtgtccagacatgacgcctttggccagaaaccaagctctgcacgggtcgcaaactcacctggtctcctctgggggtaacccatgaagacgccagtctctcgaagagccggtcgttggcttaacataagtggccgcctcacctccaaacaagagcggctgtcgccaacttccatggaaaggggtcccagggcctggccacaaaagggcccccgcctcttcgggggaaaacgtggaggaccgccaaaagttcggtggagccccccccccagggggggtccgccaccagcacggtgcccgcgaacatcatggagagcaaagttctccaaaaacggagtctacaaggtcccgaagctgcaatagcacaacgcccaagcttctgcaggctgggaccaccgcacaaggggagactacatcccccaaccgggggctccacacggagagattccgaggcccccccttttttggtggaaaatctaacacaaacggctggcccctacctgatgcagaccaccccctggtttcgtggtggtgagacaagcaatacagatgttgcacaccagaggatgatttcccacctacaacgcttcttcccaaaaatgggtgcccccttaggtcggtatacaatcggggggcacttcgcaaaaaaatggcaacacgcaacttccttcgtttgtctgcccagaagtagaattcctgtcccccctaagaaacaattacggtcatgtgcccccttttggaaaaaggcccccgggccaggcccccaacacccgggggatttttaagcaccccacaaaaaca

SEQ ID NO: 726689 - DNA, 704 bp, Homo sapiens
  misc_feature (504)..(504): n is a, c, g, or t
  misc_feature (509)..(509): n is a, c, g, or t
  misc_feature (516)..(516): n is a, c, g, or t
  misc_feature (537)..(537): n is a, c, g, or t
  misc_feature (562)..(562): n is a, c, g, or t
  misc_feature (582)..(582): n is a, c, g, or t
  misc_feature (585)..(585): n is a, c, g, or t
  misc_feature (640)..(640): n is a, c, g, or t
ctcagcagcggccctgggcctaggagcacagcacaataaagccaggaaggtcccggctcaagacctcagtctaagacgtcaggagcccagaggagaatgtcacagcctcagcagagagctgggggctgcatggcttgctggggggtgcagggagtggggaacatctcactttcataccacccaggcctcctataaaccccagctccagccagaggcccatccatggcgctgcactaaaccttggatgcagtgcgaagtcatttcgttgtcattgcctgttaggaccttatagacaccatagagcccaaccccacattttaccctagggaaactgaggcccaaagaagggtgatgacaactcaaggtcacacatagcggtggcaccccctccgattcccagtgtactcactctgactctcattctgactttacgacaagacagggagagatgagcctaactctaccgtccaggcgagcccaggaaggaggagctacccctttccnccctnacccctncacaccttctagtccaacttnacaccagacggagacctgaactctnctctttcgagagacaagttncgncccggccccctcctagtgcttttggccagccctggggagcatccatgccccccgngcccactgtctctcctcccactctagctctgcttgcacctgctatatcttcgcttctttggctg

SEQ ID NO: 726690 - DNA, 436 bp, Homo sapiens
  misc_feature (256)..(256): n is a, c, g, or t
  misc_feature (402)..(402): n is a, c, g, or t
  misc_feature (408)..(408): n is a, c, g, or t
tctagcaggatcactaccgtaatatgtaccatatcaagggagaaataacagtgagatagcttttttattgataggataaaaataagtgcagtccttaaatgccagtgaaaattaccacataatcaattgtatagccccataaactgataatagagctgaaatttagcagtaccaagttattagtctaaggggtgggtatagagggaagtataggaaagtgctgcaggaaggaaaatgagaaaaagtttccttctcnttttctagatgtacatacaatagacctcatgctaaacaaacttgaaatgtatcaggtttattattggcatcctgctagtctctttttggtttctcttctgctgccacctcttgttttctgtctaggatgtttagctccctcatacnctgtgntcccttacatggtgtgacatattacggt

SEQ ID NO: 726691 - DNA, 219 bp, Homo sapiens
atcggactgacaaacactcttttcatggccattataaagatgcttcactagcagctcagtctactggtctcatcagtaaaggcttgtgaaaatttctggaaagagcattgggctggcttgttcaatctctctggtttggtaagttgctgtgtttctcccggatcagatgagcagattggttagtgagggtcagtttaagaggaggatgtttctgagctt

SEQ ID NO: 726692 - DNA, 290 bp, Homo sapiens
tgagacacaatctcactctgttgcccaagctggagggcagtggcatgatcttggctcaatgcagtctcgacctcttcgggttcaggtgatcctcctgcctaagcctcctcacctcagtcttatgggtaactgagactataggtgcatgccaccacgcctagctaatttttgtatttcttgtagagacaggggttcaccatgttgtccaggttggtctggaactcctggactcaagcaatccacctgcctaggtttcccaaattggggaaattccaggcctaacccccggt

SEQ ID NO: 726693 - DNA, 597 bp, Homo sapiens
gagggacggaggtggaggaataggtgcaccgggcacgggcgtgaagcacatcacgttatagtgaaagagtggagagtgctagacttcctgctatattcatgcaacgctcacgggcgaggaaggctggaatcgggaagcatgtagatgaccaagacttcagccttttctttggactaattctatatttccccaattgggaccacaagagggatttctcaagactcggtgggggttggcaagaactggggttgtggcacatgcttgaggcagtcttatcaagtttcaagtcagccctaagaaccgagctgcatccacgtgggtgggctctcttcttggtgtggagctcggacgtactctgaaagccccaggagaagctcactgtagtaagaggctctgttgctgtacaagagactattatagtggcctcccctgatcaggcatcagcttggtggggcagcgcacacctccacatccacccaacaggcctttgaaggtctgagaatgctgagtcccacctgtgtcagaatgaaatgggagagttccctgactcctctcaggacttgtgacaggggtgaagctcgtttgcttgttccgctg

SEQ ID NO: 726694 - DNA, 887 bp, Homo sapiens
tggagcagttgttaatttccccgaggggctgtatttgttcgccccgccctgtgtgtgtcccgcccctggtggcgctggcgtttagtgctccctaatcttctcttcccgcccccttggaagagtgtgttgtatgaattaccccaaagggggggtcgtgctcacccccacttggagacccgctgttccgagaaaaacacaagaggtgtatgtctgtccccgccggatcattcgtccgcgtggttgctgtgtcgccagaagcatcttgctgctgtggagttccccccggaaacattattgagggccgcatttatttttccccgccgaagtcctcacacaccggggtctttccaacgcccacaatttttctttcacggaaccccaaggtcccatcaacctagcttcttcttatcttcgcgcccacaatgtaaccgccttcctaggacctactttctacaaagatgccgctcattccacgtactcacaaaaacaaagatcattctccctgttatacaaaagagttgtaatgaacatattcttggaagcatcctcacatattattggtgacatatatcctttaattgtcgccccccctctataccagtactacagaataaattttcttcccatgtcccctttttcgtaatcttggacactcgttcctcctttctggtcattcttcactccctgctctcatttctaatggaattagcctattttgaccacggaaaaacagaacacaaaaagtttctgtatttttttctctcttccgccccacatatgaggtccctcaggggcacgacctgtatatcattaagaccccatatgttttatgtctttacagtaccccccaaaaataaatcttttttcaaatcccccaaacaaaacaa

SEQ ID NO: 726695 - DNA, 198 bp, Homo sapiens
caactaagatgaagcatatttgaaaatgtatcaagtaaatcaaacaaaaagatttgctcagtgtattggccaaacatgctagatacatggaaggttctggggggttgtgcactgtgttcacagtttccaggagcgagtcttcctcttgttactggcagtttaacttgagcatgttactaagactcttaggagcctccc

SEQ ID NO: 726696 - DNA, 222 bp, Homo sapiens
gtggagtccatcaccaccatccatttccagaacttttttttgttgtttttttgatgacagagtcccactctgatcgcccaggctggagtgcagtggcatgatcttggctcactgcagcctccacctcccggggtcaggcaattctcatgcctcggtctcgagaacccaggattacaggtgcctgccaccgcacctggcgtctttttgtttttttttttttcg

SEQ ID NO: 726697 - DNA, 347 bp, Homo sapiens
  misc_feature (82)..(82): n is a, c, g, or t
  misc_feature (85)..(85): n is a, c, g, or t
tatttggggtggtttccccatgtacccccatgtattgggtcattatgaataatgctgcctatgaagattgttgtacaagttnttntgtggacatttatttttctgggatatatgccctaggagtgaaattgttgcattataggatgactgtacatttagccttttgagaaactgccagactgttttctaaagtggctacaccagttgagtgcaatggctcacacctgtaatcccagctactcaggaggctcagctaggaggatgcttgagcccatgaattcaagaccagcctgggcaagatagtgaaaccctgtcttgatttttaaaaaatccaattaaaatgacaa

SEQ ID NO: 726698 - DNA, 459 bp, Homo sapiens
  misc_feature (327)..(327): n is a, c, g, or t
ccgccagcggccctagacgtggggtccaggaaggggatggggagtgggggggctcagctatccgggcactcgatgctcctgtcctcgcgccccccaatctggacctggcggggaatttgcctcagcgcaattctgagtgccgtcgccccccgcccccgccagtgcccctgcgtgtacccccaccagcggagtcccaggccctgctccccagtcccacctccgctgcgggccaggagcgtgcaggtgagggggatagtgttaaacggggacctggggaggggagaggaagaagaaccagagggggagaagagggggcgggcggagcgngggcgcccggcgcgcctgtgccgagcgcgaaagctgcgagcgcccgcgacagtaaaacatctgtaatgtgccattcgccgctgctcgctgattgctcatggattaaagattaaaatctcggctttggcaaaa

SEQ ID NO: 726699 - DNA, 420 bp, Homo sapiens
tgcccctggatgccggagaggggggcctgtctctgtgccattgagggcccgtccaaagtcagaactcagctgccgtgacaaccaggatgggacatgcagcgtgtcctacctgcctgtgctgccgggggactacagcattctagtcaagtacaatgaacagcacgtcccaggcagccccttcactgctcgcgtgttcacacggtgacgactccagtgcgtatgtcccacctaaaggtcggctctgctgtccgacatccccatcaacatctcagagactggatctcagcctgctcgtacggccactgtggtcccgccctcgggccgcgaggagccctgtctgctgatgcgtgtgcgctttggccacgtgcgcattgcattcgtgccccaggagacgggggagctcctggtgcatgtgaagaa

SEQ ID NO: 726700 - DNA, 349 bp, Homo sapiens
gagtcaggtagcgggtatatatggggagaaaggggaggtctagaaagtccttggcagtacccagttatctcttcatgactcctcatgggtcccatgttcaaatttgggaggagttaatatgaagcatgtggtggcaattcaggctgtgatgacgctccttcagagtgaactctagttggctatattggttgcaactgatttcagccagttttgttatcttacaagcagaaggagtttcagtgtttcagaaagttgtttcttatctgctatcttgcaaactcaagactttccgttagttactggtttaagtttttggggcatggttttactaacaacttcagtccctggg

SEQ ID NO: 726701 - DNA, 256 bp, Homo sapiens
taccggaaggatctgtgggcagcttttctttgacatgagcaatggtaagcagtgctgtgatgacatcatgaaaattgaaactactgctccccggaaaacaacccaagcactgaggaagcaggggtccttggtaacatgagatggctattgagccgctggataacatcgcagcggtgacagacattctgtacccagcgggagggcgccaggctggagacacccccaccctggctggccatgtttacagaacaaactg

SEQ ID NO: 726702 - DNA, 226 bp, Homo sapiens
cgtgccatagcgatctctcggactcgcggcgttgggagattcggcgtgtgcagcaacaacttcgtccaccgcgattgagggtggggatgatgtgtctccatgtgccatgtatggtgtttcggcgtgtgcagcaacaacttcgtccatagcgacatgacttcaagaagtatatggaggttcggcgtgtgcagtatggagcctcggcgtctgtgtttcggcgtgtgca

SEQ ID NO: 726703 - DNA, 145 bp, Homo sapiens
  misc_feature (42)..(43): n is a, c, g, or t
  misc_feature (117)..(117): n is a, c, g, or t
  misc_feature (122)..(122): n is a, c, g, or t
atgcaatccacccaatcttgctctctacctgttgggctttgnnttgaaaaaacctgtcagtactacaaacctacaagatccaggagtgttaggttgccctcggacatgccttcacgncattntaaacatcttggagaaaggaacg

SEQ ID NO: 726704 - DNA, 168 bp, Homo sapiens
agatagcggtcctgacgtacccaatcacgtgcttctttattttttaaaccgataggctcattctactgtcttctccaggctcttctatgaaacagttacaaacctacggccaggccagtgcagtggctcacacctgtaatcccagcactttggaatgctggggcagga

SEQ ID NO: 726705 - DNA, 254 bp, Homo sapiens
actgggagaccagggcgggtggatcacttgagctcaggtgatcgagaccagcctggaaaacatgtgaaaccccatctctacaaaatatagaaaagttagccaggtgtggtggcgcacacctgtagtcctagctactctgggggaggcaggaggatttctttggcccaggagaagttgaggctgcagtggcctgtgtttgtgccggtgcacgccaggctgggtgacagagctggaccctgtctgaaaaaaagagc

SEQ ID NO: 726706 - DNA, 587 bp, Homo sapiens
  misc_feature (447)..(447): n is a, c, g, or t
  misc_feature (485)..(485): n is a, c, g, or t
ctcgcgaacgtgttatcctgctgggattagaggcgtaagccaccacgctggtcgtctatagtcttttaaattaagaaaaatttaaaacttctaatagcattattgtaggtatcagaggaaacaatatggtttttgttggatttcgaagctgaggaagcttgttgtctaatatttttactaagttaagttgattctgttgcagtttgctctgtgaaataatatatgcaaaataatgcaagttcttatttgttcctttccttctgattcttacagtgaagtgacttgctggctagaatctgaagtactcaattacatggtggtggtgatagaggctgccccgttctttctctttctaccaaaggagatctctggtagaaggtttaaccaggtgaaggaactagcttaagtcccctttccatagtttggagagaatttgtttcggtttanaaaggcgttatcctcttgcaaatacttttccttaaaanctattcatgtccatgcagtttttatcctttagtttatgaatgtggttaattacattgattgactatatgatgttgaatcatttattgctttctgggatacac

SEQ ID NO: 726707 - DNA, 160 bp, Homo sapiens
atagaacacctggtgtcccaagaaagaggggtggtttttttccagaacagccacatccctcccgtgcatgagctaaagagggactctgatacttgggaaaacaggacagtaaaggccactcctgctatccaaagggacaggaggctgcagctgattgtag

SEQ ID NO: 726708 - DNA, 505 bp, Homo sapiens
  misc_feature (7)..(7): n is a, c, g, or t
  misc_feature (21)..(21): n is a, c, g, or t
  misc_feature (55)..(55): n is a, c, g, or t
  misc_feature (66)..(66): n is a, c, g, or t
  misc_feature (92)..(92): n is a, c, g, or t
  misc_feature (311)..(311): n is a, c, g, or t
acatgcncccaactgaaaganccaacaacacctaaccaacctcaatttccccaancctccttaaanaaaaacccacattgaataaaggaaancctttgaaggttgccctatttgtattaccataaataattccccagaaggtttccttgggtgatttaaaaataggatttgggctgggccacagtggctcatgccctgtaatccccagcactttgggaggctgaggtgggaggatcgcttgagtccgggagtttgagaccagcctgggcaacatagtgagaccctgtatttacaaaaaatgaacaaaattncctgggcttggtgatgtgtgcctgtagtcccagcggcttgggaggctgaggcgggaggatcactggaccctgggagatcgaggctgtgatgagctgagatcgcaccactgtactcctgcctgggagacagagtgagaccctgtctcaaaaaaataataaatcaataaaagtaggatttgatttaaaaaaaaaaa

SEQ ID NO: 726709 - DNA, 151 bp, Homo sapiens
gtgcccaggcatgaagtgcaatggcagcttactgcacagctcacacctcctggttcaagcgattctcctgcctcagcctcccaagtagctgggattacaggcacgcgccaaacaacctggctaattctatttagtagaaatggagtctcac

SEQ ID NO: 726710 - DNA, 1197 bp, Homo sapiens
  misc_feature (498)..(498): n is a, c, g, or t
  misc_feature (539)..(539): n is a, c, g, or t
ggaaaatgaaaacaaattcacacacctttttaacatacacagccagttctgcctacccagccaaggcatattcttcttgtgtggaacttcaacctatgtctgcctggccaacatagcaaaaccccatctctattaaaaattttacaaaaattagctgcgtgtggtggcaggcccctgtaatcccagctaattgggaggctgaagcaggagaattgctcaaacctgggaggcgaagattgcagtgagctgaaatcacaccactacactccagccaaagcaacaagagcaaaaacttcgtctcaaaaacaaaacaaaaaaagagtattcattgtgaggacaaacaatacaaatacgaagagggttgtagtacctttacttgtatcacagatacttttgtacccattttgcactagaggaaaaccatgaagcagttgctcaaatgtgttcaacaccagaaaatttatattggagaaaaagcactgtaaatgtaatgcattngtgaaaacattttttaaaaaactacagcttagaaaataccngaggcctcatactaaaatatatttttgcaagtgaagtaaatataaaaataatttaatccaaaattaagtctatataaatatcagagaattcacagtagaaatatctaaggtactgacacttcagacattgctgagtatagaatcagaatgctgagtatagaaaataatttaaaactaaagttggtaggtaaataatgtgtatataactttaaaagaagtagaatttttttgtagatgtataattacattcaaattatattttttcttgaaaaattagtttttgaaaagcaaataatgatgtaattcaactcaaattcatgctcttcattcctattgtattcacatgtgaaagcatgtgattaatttttcatgcatcaaagatatgagaaatcatttctgttaggtcggtattatttatgacactttctatgaaagaataaggacattaaaatgtaagatgcatgatgaaaacctgagtgaagaggctgtttgtgtttaacttataatattgagtgatccatgaagtaggttttcagagcaatattcttctgcattatagtaagagaaaaccatttttaatcttagttaaaattaaagtgaattagtagtatatcattttactatttgtacttttatgtaataaaatgcaatgtgttta

SEQ ID NO: 726711 - DNA, 1088 bp, Homo sapiens
gcagataatttttagcttagggcctggtggccctcaagcataaaacattcatctgccagatcatcaggtcaggccaagaagcatccagcagctatgatccccctctttgtatatcatgaggcaactggagctactgggcagcaacactgtatctcattgcgtctggccatttgtacaatccaagaatgatatgatgggacacgcaaatcaacccaaggagacgcctgggacagaaaagcatggcgctcaccaaactggactccaaggcacacagatagcgaccgtcacgtggaactgatggcaatgacaagacaagcatgaccggcaaggaagcgatcaccagacatacttcaccatggcagactgtagcacgacctactagacgacgtggcaacgaggacagtgagaggcacaggcacagaagcggacaccacgtccgcaacagagcgagaacgagcgtgcacgcccagcgcaacaagtagtcaccgtcccgtcgtaacaagggggaacctgcacaccgcacccgagttagggcacgaatcaaccatagtcagcagcgagacctgcgtacgtgggcgacgaaacgaaccacaggggcggaacaaagcgccgacacgacaacagaaaccaggagacagcgcggctgcgcagagagagaggagacgaacgcagagaaacaacaagagagaggcaacggacaaggcggtgcgggagcgggcagaggcgcgagagcggaagagcgggggcgaagccgcgagagaagcgagaaaagaacgcaaggacggacatgaagcgagacgagcacaccggagagagagaccgggagacgaagcagacgggaagaagacagaggcggcgaagagcaggagggaagagacgacggaggggacagagggcagaagaggggaaagacagcagaacgacgaccgacaagagagagagggaccgcggagggtggggagcagcaggggcgaaggcgagcaagagagacaagcaaacagaagggacagcccccggacaggcagagagaaaagatcagcaagacgagaaaggaagaagaagaaaacatgcaccgaggaaggaaagaa

SEQ ID NO: 726712 - DNA, 1779 bp, Homo sapiens
  misc_feature (52)..(52): n is a, c, g, or t
  misc_feature (958)..(958): n is a, c, g, or t
  misc_feature (999)..(999): n is a, c, g, or t
agaaaccctgcaaatgtgaataatgtggcaatactttaaaccaatcctcaancctcactaaacataagataatactgaaaactttacaaacctgaatgatgtgacaataattttgacaacacctcgaactttctaacataaatcatactggtgaaaaatcctagaaatgtgaaaaatatcacaaagcctttaaatggttgtcacacttgattgtaggtaagaatccatactgaagaaaactcctggaagtgtaaaaaatgtggcaacacttttaataaatgctcaccccttattgcacaggaaagcatttatacttcagaaagattgtacaaatacaaggaatgtggaaaagccattattatctgctcagattttactcaacattagagagttagtacgtaataaaagcattataaatgcaatttttgtcaagagatctttcagaaaatataagcctttaaagtgaagaagaggagccagttgtgctggctcacatctgtaatgccagcactttgggaggccaaggtgggtggatcacctgagggcaggagtctgagaccagcctggccaacatagcaaaaccccatctctattaaaaattttacaaaaattagctgcgtgtggtggcaggcccctgtaatcccagctaattgggaggctgaagcaggagaattgctcaaacctgggaggcgaagattgcagtgagctgaaatcacaccactacactccagccaaagcaacaagagcaaaaacttcgtctcaaaaacaaaacaaaaaaagagtattcattgtgaggacaaacaatacaaatacgaagagggttgtagtacctttacttgtatcacagatacttttgtacccattttgcactagaggaaaaccatgaagcagttgctcaaatgtgttcaacaccagaaaatttatattggagaaaaagcactgtaaatgtaatgcattngtgaaaacattttttaaaaaactacagcttagaaaataccngaggcctcatactaaaatatatttttgcaagtgaagtaaatataaaaataatttaatccaaaattaagtctatataaatatcagagaattcacagtagaaatatctaaggtactgacacttcagacattgctgagtatagaatcagaatgctgagtatagaaaataatttaaaactaaagttggtaggtaaataatgtgtatataactttaaaagaagtagaatttttttgtagatgtataattacattcaaattatattttttcttgaaaaattagtttttgaaaagcaaataatgatgtaattcaactcaaattcatgctcttcattcctattgtattcacatgtgaaagcatgtgattaatttttcatgcatcaaagatatgagaaatcatttctgttaggtcggtattatttatgacactttctatgaaagaataaggacattaaaatgtaagatgcatgatgaaaacctgagtgaagaggctgtttgtgtttaacttataatattgagtgatccatgaagtaggttttcagagcaatattcttctgcattatagtaagagaaaaccatttttaatcttagttaaaattaaagtgaattagtagtatatcattttactatttgtacttttatgtaataaaatgcaatgtgtttaaaaatttttggattatgcgtgaacttagttttttaattaaactttttttaacatgttaaaactattgtgcattcaatgaagtgttttcatgccactgactttacctatcccacattactcaa

SEQ ID NO: 726713 - DNA, 1657 bp, Homo sapiens
  misc_feature (52)..(52): n is a, c, g, or t
  misc_feature (958)..(958): n is a, c, g, or t
  misc_feature (999)..(999): n is a, c, g, or t
agaaaccctgcaaatgtgaataatgtggcaatactttaaaccaatcctcaancctcactaaacataagataatactgaaaactttacaaacctgaatgatgtgacaataattttgacaacacctcgaactttctaacataaatcatactggtgaaaaatcctagaaatgtgaaaaatatcacaaagcctttaaatggttgtcacacttgattgtaggtaagaatccatactgaagaaaactcctggaagtgtaaaaaatgtggcaacacttttaataaatgctcaccccttattgcacaggaaagcatttatacttcagaaagattgtacaaatacaaggaatgtggaaaagccattattatctgctcagattttactcaacattagagagttagtacgtaataaaagcattataaatgcaatttttgtcaagagatctttcagaaaatataagcctttaaagtgaagaagaggagccagttgtgctggctcacatctgtaatgccagcactttgggaggccaaggtgggtggatcacctgagggcaggagtctgagaccagcctggccaacatagcaaaaccccatctctattaaaaattttacaaaaattagctgcgtgtggtggcaggcccctgtaatcccagctaattgggaggctgaagcaggagaattgctcaaacctgggaggcgaagattgcagtgagctgaaatcacaccactacactccagccaaagcaacaagagcaaaaacttcgtctcaaaaacaaaacaaaaaaagagtattcattgtgaggacaaacaatacaaatacgaagagggttgtagtacctttacttgtatcacagatacttttgtacccattttgcactagaggaaaaccatgaagcagttgctcaaatgtgttcaacaccagaaaatttatattggagaaaaagcactgtaaatgtaatgcattngtgaaaacattttttaaaaaactacagcttagaaaataccngaggcctcatactaaaatatatttttgcaagtgaagtaaatataaaaataatttaatccaaaattaagtctatataaatatcagagaattcacagtagaaatatctaaggtactgacacttcagacattgctgagtatagaatcagaatgctgagtatagaaaataatttaaaactaaagttggtaggtaaataatgtgtatataactttaaaagaagtagaatttttttgtagatgtataattacattcaaattatattttttcttgaaaaattagtttttgaaaagcaaataatgatgtaattcaactcaaattcatgctcttcattcctattgtattcacatgtgaaagcatgtgattaatttttcatgcatcaaagatatgagaaatcatttctgttaggtcggtattatttatgacactttctatgaaagaataaggacattaaaatgtaagatgcatgatgaaaacctgagtgaagaggctgtttgtgtttaacttataatattgagtgatccatgaagtaggttttcagagcaatattcttctgcattatagtaagagaaaaccatttttaatcttagttaaaattaaagtgaattagtagtatatcattttactatttgtacttttatgtaataaaatgcaatgtgttta

SEQ ID NO: 726714 - DNA, 1716 bp, Homo sapiens
  misc_feature (52)..(52): n is a, c, g, or t
  misc_feature (958)..(958): n is a, c, g, or t
  misc_feature (999)..(999): n is a, c, g, or t
agaaaccctgcaaatgtgaataatgtggcaatactttaaaccaatcctcaancctcactaaacataagataatactgaaaactttacaaacctgaatgatgtgacaataattttgacaacacctcgaactttctaacataaatcatactggtgaaaaatcctagaaatgtgaaaaatatcacaaagcctttaaatggttgtcacacttgattgtaggtaagaatccatactgaagaaaactcctggaagtgtaaaaaatgtggcaacacttttaataaatgctcaccccttattgcacaggaaagcatttatacttcagaaagattgtacaaatacaaggaatgtggaaaagccattattatctgctcagattttactcaacattagagagttagtacgtaataaaagcattataaatgcaatttttgtcaagagatctttcagaaaatataagcctttaaagtgaagaagaggagccagttgtgctggctcacatctgtaatgccagcactttgggaggccaaggtgggtggatcacctgagggcaggagtctgagaccagcctggccaacatagcaaaaccccatctctattaaaaattttacaaaaattagctgcgtgtggtggcaggcccctgtaatcccagctaattgggaggctgaagcaggagaattgctcaaacctgggaggcgaagattgcagtgagctgaaatcacaccactacactccagccaaagcaacaagagcaaaaacttcgtctcaaaaacaaaacaaaaaaagagtattcattgtgaggacaaacaatacaaatacgaagagggttgtagtacctttacttgtatcacagatacttttgtacccattttgcactagaggaaaaccatgaagcagttgctcaaatgtgttcaacaccagaaaatttatattggagaaaaagcactgtaaatgtaatgcattngtgaaaacattttttaaaaaactacagcttagaaaataccngaggcctcatactaaaatatatttttgcaagtgaagtaaatataaaaataatttaatccaaaattaagtctatataaatatcagagaattcacagtagaaatatctaaggtactgacacttcagacattgctgagtatagaatcagaatgctgagtatagaaaataatttaaaactaaagttggtaggtaaataatgtgtatataactttaaaagaagtagaatttttttgtagatgtataattacattcaaattatattttttcttgaaaaattagtttttgaaaagcaaataatgatgtaattcaactcaaattcatgctcttcattcctattgtattcacatgtgaaagcatgtgattaatttttcatgcatcaaagatatgagaaatcatttctgttaggtcggtattatttatgacactttctatgaaagaataaggacattaaaatgtaagatgcatgatgaaaacctgagtgaagaggctgtttgtgtttaacttataatattgagtgatccatgaagtaggttttcagagcaatattcttctgcattatagtaagagaaaaccatttttaatcttagttaaaatttttaaacacattgcattttattacataaaagtacaaatagtaaaatgatatactactaattcactttaattttaactaaggtcgacgcggccgcgattttagtagtagtcgacccgggattccc

SEQ ID NO: 726715 - DNA, 1319 bp, Homo sapiens
  misc_feature (498)..(498): n is a, c, g, or t
  misc_feature (539)..(539): n is a, c, g, or t
ggaaaatgaaaacaaattcacacacctttttaacatacacagccagttctgcctacccagccaaggcatattcttcttgtgtggaacttcaacctatgtctgcctggccaacatagcaaaaccccatctctattaaaaattttacaaaaattagctgcgtgtggtggcaggcccctgtaatcccagctaattgggaggctgaagcaggagaattgctcaaacctgggaggcgaagattgcagtgagctgaaatcacaccactacactccagccaaagcaacaagagcaaaaacttcgtctcaaaaacaaaacaaaaaaagagtattcattgtgaggacaaacaatacaaatacgaagagggttgtagtacctttacttgtatcacagatacttttgtacccattttgcactagaggaaaaccatgaagcagttgctcaaatgtgttcaacaccagaaaatttatattggagaaaaagcactgtaaatgtaatgcattngtgaaaacattttttaaaaaactacagcttagaaaataccngaggcctcatactaaaatatatttttgcaagtgaagtaaatataaaaataatttaatccaaaattaagtctatataaatatcagagaattcacagtagaaatatctaaggtactgacacttcagacattgctgagtatagaatcagaatgctgagtatagaaaataatttaaaactaaagttggtaggtaaataatgtgtatataactttaaaagaagtagaatttttttgtagatgtataattacattcaaattatattttttcttgaaaaattagtttttgaaaagcaaataatgatgtaattcaactcaaattcatgctcttcattcctattgtattcacatgtgaaagcatgtgattaatttttcatgcatcaaagatatgagaaatcatttctgttaggtcggtattatttatgacactttctatgaaagaataaggacattaaaatgtaagatgcatgatgaaaacctgagtgaagaggctgtttgtgtttaacttataatattgagtgatccatgaagtaggttttcagagcaatattcttctgcattatagtaagagaaaaccatttttaatcttagttaaaattaaagtgaattagtagtatatcattttactatttgtacttttatgtaataaaatgcaatgtgtttaaaaatttttggattatgcgtgaacttagttttttaattaaactttttttaacatgttaaaactattgtgcattcaatgaagtgttttcatgccactgactttacctatcccacattactcaa

SEQ ID NO: 726716 - DNA, 665 bp, Homo sapiens
tcttcaggggtactgccaggtagcaggctttattgggagaagggacaaagcctcaggagctgggtgccccaaaggctgctgggtcttgagccacagcttgcagccaattgcagcagcttcgcgcctccttcttccgtttctgttttccctccttgaggcgcttgcgctccttcttctctaggtcctggagcagctccgtggaagcgggcactccttgggtccacctgtggtagcccaggagctccggggcctcagcctgcagtcgggccctcctctccttgtcagccgtgggccttctcccagttctcccgctgctgctgctgccagttcacaatcatctggggcatctgggccatgcactcgtgcgatgttgctgctcccttctcccgacgcttcggctcttcggccagtgtgtttcacccgcagggactccgtgcattggtcgccaggctcgggttcccattcgcgtttcttcggcctccagctcccgacagctgctccggcgaacggccataacgaaaccggggaacccaccccggaaggcggcgccgtaaacgcgcgaaacggtttagccgcgtaagcgcggtccccgagttgccaccgcggggctcaggaggtccctcggggctctggccacccgggggttcccggccttgcggccgcgg

SEQ ID NO: 726717 - DNA, 266 bp, Homo sapiens
agcaacgatgcagagggtggtacgcgcgagtcacagtgtgcggcgacatccatggacaattctattgacctctacagagctgttcacaagtacgtggcgagtgtccgcttagagcaatctaactcttcagtgggtgcgacatttgtggaccgttgggttctatcgtcttcgaaacgttcctccttgtctgcatgtgtacttcaggttcgcgtatccgtgatcgcaatcagcactgatccgggcgcaaacatgtagagtcgccagta

SEQ ID NO: 726718 - DNA, 399 bp, Homo sapiens
ggtcgacctagctagaggtaaagcagcagcctacttgttgttcatgtttgggtggcttctcagtctcttctcacctgtggaactcattacctgcattaagttttctctgctttcaatattcagtttagccgggcgcgatggctcatgcctgtaatccagcactttgcgaggcggaggtgggtggatcaccttaggtcaggagatcgagaccagcccggccaacctggtgaaaccctgtctctactaaaaatacaaactattggccggacgtggtggtgggcacctgtaatcccagctgtctgagaggctgaggcaggagaatcacttggaccggggaggtggaggttgcagtgaactgagattgtgccactgcactccggtctgggcaacagagcgaga

SEQ ID NO: 726719 - DNA, 353 bp, Homo sapiens
aactaaccctacgactagtagaagtagtaatcgatcacgttaaggaggcaccatggctatgaaattcgcgctcagaagggcttagctcctgctgcactgcaatgtggccgcggcccctggatctagtgtgtaggtaaaggtaaggctaggtggaataaatagataccatcatttcggaccaaagttactggaacctggactggttgccggacccatctccaaccttctcggaatgcagaaatgtctgggacgacacagagcatactctctccacacctgaggaggaaatagaaatcacttaaaaacactttaaaaagcaaagtacatgttcaaaatgagacttcacacaaggt

SEQ ID NO: 726720 - DNA, 258 bp, Homo sapiens
gcttttgtcggcccaaagtcttcgtgaagatggataggtgagcccctctgggggacagtggcaaggagctccatgatcaggatcgccacaaggatgcaaaggacagggttggacccaatcccagaacagaggttagaagacaggagcaggggggtggccagtgtcccgagagcactgttcccagtcaccagtggctgcaaaagggccaccctagccttttaattgctttgtcagaattaaacgttttgtacgcagaaa

SEQ ID NO: 726721 - DNA, 499 bp, Homo sapiens
ttattgtgtgttataatgttataaaatagggaattagctaaaatagattaagatacagaaactctgggaatcaaatttctcttgggcaggcttagaaaagacaaaactgaaaatacttacgggcatagagagcagatgcctagggcccaccttctgtcccagttctgcccagatccaccctctgctgaaccttgtccaggtcttaccccacactgaaatctctcacagaactgcttagaggagatcagagtttggggtggctacccctactgcctctccagagctggtgctcacaatttcctgatacccaaaagcagataaatgaggaaaagcaatatacttttgtgccttaaattcttttttataaaattaaagtcagtgtttctagagacatcctatccagcaacctgttccccatctctgcagtttcagtggtttttttcacaagtctcataataactacaaacacaaaaataaaaaattcctctgaattgcaaaa

SEQ ID NO: 726722 - DNA, 331 bp, Homo sapiens
ccgtttacttccgatggggcgttgtctttcatgggaatcaaaacagtgactccaggctggacacagtgacttatccctgtaatcctagcaccttgggtggctgagagaggaagatcgattgagcccaggagttcaagaccaacctgggcaatattgcgagaccccatctctacaaaaaatacaaagctggccaggcatggcggtgcgctcctgtagttgcagcaactcaggaagctgaggtgggaggattgcttgagcccaggaggttgaggctgcagtgagttgtgatcataccactgcactccagcctgggccacagggccagaacctg

SEQ ID NO: 726723 - DNA, 564 bp, Homo sapiens
ggggcggtcgtgcaacttgcggtcagggtttccccccgtgcctcctcgcgctcggatggcggccgctgagttggacgcagccccgggcgagcggcggcaggccagaggacgccccctgcgcggctcgggccgggccatgggccgcgcgcccccggcgtgggcccctagggtcggggcgggatcggcgatgtcctcgtgggcccctctcgagtcccgcgtcctctagcgtggcaccatcacgcggacctctcgtggcctccctgtgtcgcctcggcagccacgcagttggcgaagaaagattgtgccatggggaaccgtgcctcgacacaggttcgcggcccggtgcgtcgagtgtgatcctagcgcccagcacgggaaggggtttcgcattcgcgatagagacttttttgtgttccggcggcggtcgcggaagccccggattgctcgcacccccgctagcggcctttggggcgcccgacattgccgctgcgcggcggtataggggtcacgccgctggggggcccggaagcaggggggtagccccagggcagggtgcaaggaaga

SEQ ID NO: 726724 - DNA, 101 bp, Homo sapiens
catgccgcagacgccggcccgctcgccgggggcggcaggaagggtttgtggccgtgacggaactgatccgcagcaacgacatcgtcctgatcggattcgcg

SEQ ID NO: 726725 - DNA, 131 bp, Homo sapiens
tgcctagaggacccactaagcagctatcagttgaagagagctgagagatgagaaacagaaccagtgaatgcagtgatctatccatactcaggttgggtggaggatgaaatataacaccagaggagtaaaat

SEQ ID NO: 726726 - DNA, 1606 bp, Homo sapiens
gtgagcgcgcggtggcccctgggtccgcccggccgcggtccggatctaggggctgtggggctggaggcgggggtggggcgtctgagagtgcgtcctgggctcgagggggtcccccgggggagtctgccttctaaggcgggtatgcggcaccgaggtttcctccttcctcagccctcctcggcacctgtgggcggctcaaccttccggcgggtcgccaaaacaggacagagataaggtgaaggaagggcgggcccgggtgaaagcggagtgcgcttgaggtgggcgccttgggggggccccttgaaccccccctaggcgaagcaagggaatttggccggagcggatgggagttatcgcggccgaagtggggcacctgttgcggggggcccacgaaggaacccaaagggcggcaactcccggggtttgcacaggtgtgtgccgcttttgcaaactgtggcgagagagacaggggaacgtttagtggagaggccccgtgaattgggccagagtgtttaccccagagtgttttgcgacaaaaaacatctggggagaatggccgggtatgttgacattggggcggcgcccgccacacgagggtcggccacccccaaaaataggtttcccgcggcccccaaagtgagccagaccgcccttttgcacacagaaaaagggggccgagacgcgactttaagaaaaaagtgtcgcccatacaagtgtgtggcccccaggggggaaggaaccccataaattccgcgtgagttattacaacccagagaaatgcccgcgtgtggaaaacccgccgccaagaagaggacaccgcaaaagaggccaagaagccggcccataagagtggcaccaatatgaccaccgcgggcgaccacggcgggacagcacagggggaacatataagaagcggcccaaacaaagcgcccttgtggggatatttgcgcacaaaaggaggaaagcgcccccccttgtatggcgtggtggcgtcaccacaatgtgttggggggggtcctcatgttggtgcgacacacaaaaggaggcctcccgatattacccagcagttttttctttccccactaatgtgggggccgcccgggaaggcatattgttttgttacgaccccccacaagcccaaagatggtttgccccattttacattgggtatcaattgagcgctcacacggatgataaagacgcgtttatataacagttcacaagagtttataattttggctcccctatgggcccttttgtggttccgccctttcatttaaagactttccccccgagaagtgaccccacacatctccttttaaaatggtttgcccccaagcatggtgtgtggcgcggacacggctgacacaccacaggggacgactatcctttgcggaagaacgtcgttattagatggtgcatctccaccgaataaagaagcgcaatagtgtggaaggatgtccgcctaaaaagagagcccccggcggtatttgtatgtgtttcctgtcactccagcaagagatttcccgtgtatacctagtaagagaacgacggcttttctatgttaacagtcgtgcggggttttctttcccccccacagcgaaaa

SEQ ID NO: 726727 - DNA, 111 bp, Homo sapiens
aacaccgccccggaaatccggaatttggggcaaggcggtttctggggggaaaaccacttccccgaaaaattggggattggggcagggcgttttcagggggaaaaacctttt

SEQ ID NO: 726728 - DNA, 541 bp, Homo sapiens
  misc_feature (223)..(223): n is a, c, g, or t
aaggatcccgtgtcatcccccttcggtacagacaggattaccatgatgccaggctggtctgagctcctggactcaagcaatctagcagccttggctcccaaaatgtagggattacaggcgtgagccacatgccagctaataatttaatatggcagaaattactttatttgcaactgtttgaactttcaataaaaaccaaattagatgccaactttatacaagntaggggacatagtttttaaaaattattttagggagtatgtgagtaaaataaatttcacaaatccctattatagagatctgaaccttaaaacaataaattttgaaggataactgggagaattctctgtttttagaaatttgttaagtttgaaaggactagaaaatgttcaggtgtgcaacactttaatatgttaacttaaaaaaagagtaacaaaacagaatttgaaactttgggcaagtgtatttttttttcctatctcaaattccagttaatagtctaaatgattccaaaatatctttaccagaggtcaccaaactg

SEQ ID NO: 726729 - DNA, 140 bp, Homo sapiens
acgattaatatctgtccccggggcccgtagaggcagtcagtggtcttctgctaaaaagtatggtacatccccctcccccagtgtgacttactatgcagcgagtccttacctgggctcaggtattactgtctggtgagtcc

SEQ ID NO: 726730 - DNA, 1499 bp, Homo sapiens
gggagcgtaggccgcgcagcgctggtcgccagtggtgacaggagccgtgcgatcggcaaaaatacactgggaggccgtcagccgcaaaagagtccgcggtcctctcctcgatagaacgacacgtctcctccaccggtcgcctcccctctccgacatcatgctgcgctcgtcccggtcttgggcgtccacgaagagccgcatctcggtactgctatgttgaccgacgaatgggcttgcagggaggaaggggacagggaatgaagaggctcatccgcagcgagtaaagcctcgcattgcatggaacgcaatggttgtgctgggcccatcgttcgtagcgaggatgctccccttcgttagccttctacgaccgggtcgcccctatatctggcatgctctagtggcgtgcgccgggcttcgtactttcgtcctttccctcggtggactgccccaagaccggccttcgcgtacctcggggttgacctagtgggttgtacggaatgaggagcgaagacgtgtgcggtggaagacattgcgtaccttgccatggatggtgtccttcaaaacaagtgacttgtaatggaaggcagcgcgaacggaaggaaaattgcgccagtggcttgctgacaggggtcggccaagcagttgcacgtcccacccgggctatccccttggtgggccttgtgccgacgcccggcagtgtgagagatgtccgtgttgtggcgttgggacactgtggcaagcgaccctgttttccccttgcgacgccaatcaattcgcccgtgagcttacaaatcccttacgtgatatccgggggatcaaaactggttgacaggcgggtgaatatgccaagacaagttcctgttgacatgcgttcggtggcggggtgaccactcacaggggggtccttccagtgaaaaacacccctttgggggaggcaaatgaacttcccttgtgcccacgctccgaacagggaggacgaggtgtaacagtgcgtccgcgccggactttgggcggcatcccacggggccgctcataaagctccctgggtagggagcccaagtccggccttgagcgaacagggaggcggcacgcgcccggacgtccagccagaaatgagagacgctccccgggcgaaatgggaccggcgcacacctgggtgggtccggcgtagaggttgggttggccaaggggccagacttgcagtcccaggaaagcccgccgaaggttcggcttcccggaacaaatcattggagcttgggttcaacacggcgccgcggttatatatggaggtgtctacgcttcacggaatgtttcccccgataaaactttcctttgttccttaaaagtagcagaacggggccctcttgttcacaggcccgatggccgctcattcacccacggtaggggtaccccccgcccatgtcggctcctcaatggagaccacctagagagcacacatttcgggttcagagaagtgttcccatagtggtggagaccgc

SEQ ID NO: 726731 - DNA, 134 bp, Homo sapiens
atggcacatgcagcgcaagtaggtctacaagacgctaccccctatcatagaagagcttaccacccatgatcacgccctcataatcaccttatctgcttcctagtcctgtatgcccttttcctaacactcacaac

SEQ ID NO: 726732 - DNA, 907 bp, Homo sapiens
agctgggcgcggctggcggctggcggcggctggtgggtgcggggcctgggctgtcagccggcctaggaggaggaaggagcctgctggctgtgcagttgtgatggggctgggacccgtgctgcctgtgctggtgtggtctatgctgggggacggtctgggccaatgctgtgtgggccatgtgtctgcttgggcctgcttggggcccggtgggtggtcaccggccgcgggttggtgctgcttgctgagcggcgtgtgtgtgcctgtgtgcactggctcgcgaggaccatcgttggctgggcttgcggttggcgttcgtcaacgtcgcgaccgtggacgatcacactactctctcatctgagactaacagcttgtacgaccaatgccatgggacctttgaacatacgcagaacagacttgttgccctctaataactcggttactttactgactcccgtttgtactgatacatggtggcgatttcgattctgaagatttgagcctccgcctagggtggcagttcgacgccgaccgaccgtggcagctccaatgtggcattgacgtcgagtgacactctgcccccaagggctggcgaccatcaacctcttgtcctttcagctgcggttcctcttgtcgacactggcccaggtccttcaaccacaaggggcaggcccctggtgtcctgcgggagttccaggtgtcctctgagaacacacttgggacccgacacgccaacgtatcccacgttccacatgttagcccagccgtgcgtgaaagttgtcatttttagaagttctgcctgcacaattatgaaatcttcgcaactccctccaacctggggcgcatcacagcagctatggacattgtgtggttcaacacattcacgtcgcatggtcgcaagtccctccat

SEQ ID NO: 726733 - DNA, 1345 bp, Homo sapiens
tctgtttgttgttgttcttgtgttttctaggttgtcgtgtgctgtcttcttgttgtgttgtgttgttgtttgtgtgtttagtgtctgtgtgtgtcttctgatgtggtgtatgttgttgttgtggttctttgttgtatcttgtagttgtgatggtgtgttcctcgtcggtcgagtactgtggtaagcaagaccacgccgctataatcaaacccttggagtgggtgcaaaaccacacaccgctgttttggggggcccccccttatagagtaactccgccggcaggggaccccaccccaaggggtgtgccccgcaagaacccgggggctgttgtttaaaccccctcccccccctgtttctcttattcctccgcgtctccctaaaggttttccccgggccccgtttggggtggcgaaaatttttccggcccccacggacgctgtggctttttcccacaagacgccaatggtgcgcccttctatccccggggcccccccttccaaggggtgtttcccccgcgggacccccatggtcccccaccccttggggggccgccccctttcgatttctgccccactttcttaagcctccggaaccgggcggtttcacgcgcccggggcccctttggtggggccgaaagattctaattcccagcccgctatctgaggccaagaaaaaggggatttctccgccccttcgctggcccctggagaaggtgttcccttccggggccctctctgagaggagaccacccttgggagctacgtcaccctacccactgtgagccctgtgaaagagtccgagcccactctgtttttccctcgggctcggttggagagtaccactgagaactctccgggccgccgtgtgtgggcccactcggttctgggaaggggcctgagaacgttgggtgagaagaacacggccggcaaagtgattgcttgggggaagagcccactccacgcacgagtttccaaagccacggcacccacatctcgctggggagactttctgcacatttcacgcgttgtgccacaggagacactcacattcactggcacgtgaattcacgtataaaagtgtctgagaaaaggagaatcacgcctattggtttatagccctgagagaaactggttgaactaaccaagtcttgtgctcacatgaactgggtctatatgaaatataagaaggtggagcacccaccacgcacagtctccttcacgcccggcgtggtgtgtccctggacacaccagctctttccatatcccttgacttagaggcccacacgggttgatccattctttttatagagccatatttgccccataaagcttttggaagcccggga

SEQ ID NO: 726734 - DNA, 317 bp, Homo sapiens
  misc_feature (41)..(41): n is a, c, g, or t
ggtgacctagaggattccagcaccgtctgagtaatcggggnaaatcagtgaatgaagcctcctatgatggcaaatacagctcctattgataggacatagtggaagtgagctacaacgtagtacgtgtcgtgtagatacgatgtctagctgatgagtttgctgaatacaatagccagtcaggtccacctgacggtggaaaagcaaagatgaatcctaggtgctcagaagcactgcaagcagtatcatttcatattcgcttccggtggatgtgtggcgatgtcagcgtaaatactttgcacgccggtgggcgatagcga

SEQ ID NO: 726735 - DNA, 773 bp, Homo sapiens
tagagatgacctctacagttgtgataatagcatatgggtaaccgcatccgcacagaaaatacgagaacaatctgcatgtgtgattatagtattaatggacccataagttttgataaatgtgagtatttctgttcctgtttggtaaatatgtgacattccctgattgattgggttttgttgtagtcgtggtgtgtgcagttttgtttttttgagatggagtctcactcttgtcacccaggctggagtgcagtggcgccttctcggtctctgcaacctctggctcctgggtgcacgtaatcctcctgagtagctgggatggcaggcgcctgccccacgctggccaatgctttgtacttttagtagagacagtgtcccgtcagtgtaggccacggtcgttggttgcaaactcctgacctcgaggtgatccgcccacctcagcctcccaaactggtgggattacaggtgtgtgggccaccgagcctgcctgattcagcatggctttatcaggcaggcaccaggtggcacttccagtctccagcctctggtgcctacccaagtggattcatgtgcgtagccttggaccgtcttcatacgttttcctaaatgtacaaattctttataggctagactgaggagatccattaactccagattccatgctttctatcagaactcagcattccgtaaactacataaatttttctcccacttgtggtggcacaccttccctaaaggcttttgaaaaattccccggtacgaaccttggaaatgcg

SEQ ID NO: 726736 - DNA, 809 bp, Homo sapiens
tgatctttatgaggatcattctgtttactaatattcaattctagatcacatgttatatatgctgcatgccaaaaaaaaaaaaaagagaaaactgccttggctgggtgtggaggggaagaaaacctaatattctaccttactagtagagttcaaaacaagttttcactgagaagcctttccagtaagaaggttaaaccaaggttctggtttgttaggagcttttggtcagttattgctatttcagaagagtcaaaatccaagcagcgattgaccaatttgttggaacgggcttggcacacacttgcttaaatcccctgattgagtcctctcgatactgggagagtggggaattgggagtaggatccgtggatttatggtgcccggtagattatgggcaaggactgacaacggggaaggtcgtttttccccaatacaacggcacgtctacgcaacactagggtccaccggtcatggtatctacaacgcctagtacacgagatcaataactggacggcaacgaaggattctccagtttggatggcagacgaccaattggtcaatgcggaggatcgtcaacacacttgcttgagcaatccacgagggactaaatctcttggcttttggactcttcagactcgggacaactcggtgtctcctaaaagctaaggatacttgcgaaattgggtccgaccaggttatgaatcctcggagattggaattgaagtcctttggagaatgctcccgattcgaagggacaggggtgaaccgattccccttggaaactgctgggttacatggcaaagggttaa

SEQ ID NO: 726737 - DNA, 742 bp, Homo sapiens
  misc_feature (71)..(71): n is a, c, g, or t
  misc_feature (186)..(186): n is a, c, g, or t
  misc_feature (292)..(292): n is a, c, g, or t
  misc_feature (329)..(329): n is a, c, g, or t
  misc_feature (363)..(363): n is a, c, g, or t
  misc_feature (397)..(397): n is a, c, g, or t
  misc_feature (446)..(446): n is a, c, g, or t
  misc_feature (448)..(448): n is a, c, g, or t
  misc_feature (506)..(506): n is a, c, g, or t
  misc_feature (566)..(566): n is a, c, g, or t
  misc_feature (587)..(587): n is a, c, g, or t
  misc_feature (596)..(596): n is a, c, g, or t
  misc_feature (612)..(612): n is a, c, g, or t
  misc_feature (618)..(618): n is a, c, g, or t
  misc_feature (620)..(621): n is a, c, g, or t
  misc_feature (623)..(623): n is a, c, g, or t
  misc_feature (630)..(630): n is a, c, g, or t
gtgcggagccgccgtaagatgctctgacctttgacccctgccgttcagctctagggcccgtgcaggccaancatgaacacctccccaggcacggtgggcagtgacccggtcatcctggccactgcaggctacgaccacaccgtgcgcttctggcaggcccacagcggcatctgcacccggacggtngcagcaccaggactcccaggtgaatgccttggaggtcacaccggaccgcagcatgattgctgctgcaggttaccagcacatccgcatgtatgatctcaactccaantaaccctaaccccatcatcagctacgacggcgtcaanacaagaacatcggcgtctgtgggcttccacgaangacggccgctggatgtacacgggcgcggcgaggnactgcacagccaggatctgggacctcaggtcccggaacctgcagtgccnangcggatcttccaggtgaacgcacccattaactgcgtgtgcctgcaccccaaccaggcnagagctcatcgtgggtgaccagagcggggctatccacatctgggacttgaaaacagaccnacaacgagcagcttgatcccntgagcccgnaggtctccatcacgtncgcccncnncnatcccgncgccagctacatggcgagctgtcaatagcaccggaagactgtgatgtctggaatctgagggggggcatttggtgacgaggtgacccaggtcatccccaagactaagatcctg

SEQ ID NO: 726738 - DNA, 141 bp, Homo sapiens
gtttgggttctggtttagcacgtcactcccattatgggttctggttttagcagatcactcccattgttttgggttccggttttagcacatcactcccattattttgggtttctggttttagcagatcactcccattgtttt

SEQ ID NO: 726739 - DNA, 885 bp, Homo sapiens
cggttgatgacgtctcatcagatgacaatggccaagatttaacgcacatacaagcttctccgctgacggcttccacagttcggccccaggagccaacctgtgcctgggctctggtcgtgcacggtggcgtggactggcatgaggaagctggccttccgctaccgggggtgaaggagatgtacaagtacctacattagaacaatcgttggtgggttgataggcaacatcccaaaagggagatctggacatacagcatccgagactgacgctgggaagctctcacagacctctggctgacccactccctgaaggcactaatatctcatcaactcccgggccgaactgtgtctaatgtgctggtcaccaccagctcagactaatttcctgcccttgtgcccaaagtcctggctagtatggcctggggtctgtgttgccgtattgtagaacatctacagtgcaaccaacgaaatgggaaggagagctgcattcgaggaggataatgcgggagattcggctagaaaagcatgtctacggtggtgatcggtgatggtgtggaagaggagctaaggtagcgaaaaaggagtaacatgcctttctggcggatatcctgcacgcagatctggagggactgaggcacgccctggagtcttggaagttattgataggcaggatcagcggcatcttgcatctgacattctcacctttgaaacgcgcatcggcttatcccagcttcctcgagtcgaagaactccagtagatgcagaatgtggggacgaggaagggggcccaaaggccgaacgagtgtcggtgagccatctcaaagccggcttcgagcagttggggttctgagagggagtccatggggttggggtttgactgggacggc

SEQ ID NO: 726740 - DNA, 835 bp, Homo sapiens
  misc_feature (71)..(71): n is a, c, g, or t
  misc_feature (186)..(186): n is a, c, g, or t
  misc_feature (385)..(385): n is a, c, g, or t
  misc_feature (422)..(422): n is a, c, g, or t
  misc_feature (456)..(456): n is a, c, g, or t
  misc_feature (490)..(490): n is a, c, g, or t
  misc_feature (539)..(539): n is a, c, g, or t
  misc_feature (541)..(541): n is a, c, g, or t
  misc_feature (599)..(599): n is a, c, g, or t
  misc_feature (659)..(659): n is a, c, g, or t
  misc_feature (680)..(680): n is a, c, g, or t
  misc_feature (689)..(689): n is a, c, g, or t
  misc_feature (705)..(705): n is a, c, g, or t
  misc_feature (711)..(711): n is a, c, g, or t
  misc_feature (713)..(714): n is a, c, g, or t
  misc_feature (716)..(716): n is a, c, g, or t
  misc_feature (723)..(723): n is a, c, g, or t
gtgcggagccgccgtaagatgctctgacctttgacccctgccgttcagctctagggcccgtgcaggccaancatgaacacctccccaggcacggtgggcagtgacccggtcatcctggccactgcaggctacgaccacaccgtgcgcttctggcaggcccacagcggcatctgcacccggacggtngcagcaccaggactcccaggtgaatgccttggaggtcacaccggaccgcagcatgattgctgctgcgggtatctgtgatccttgatctctaaatctcctgagctctggtgggtcgacctgaggcacagccaagcgttcagattcagccgtgtgtccctgaggttaccagcacatccgcatgtatgatctcaactccaantaaccctaaccccatcatcagctacgacggcgtcaanacaagaacatcggcgtctgtgggcttccacgaangacggccgctggatgtacacgggcgcggcgaggnactgcacagccaggatctgggacctcaggtcccggaacctgcagtgccnangcggatcttccaggtgaacgcacccattaactgcgtgtgcctgcaccccaaccaggcnagagctcatcgtgggtgaccagagcggggctatccacatctgggacttgaaaacagaccnacaacgagcagcttgatcccntgagcccgnaggtctccatcacgtncgcccncnncnatcccgncgccagctacatggcgagctgtcaatagcaccggaagactgtgatgtctggaatctgagggggggcatttggtgacgaggtgacccaggtcatccccaagactaagatcctg

SEQ ID NO: 726741 - DNA, 231 bp, Homo sapiens
gtatccacgcattgcacaggaaaacaacacaattcgttccaaagactatgaaaactgatctgtgtgggtggggggctggtaatacatagtactcggcgggacaaaagtcaaaacaaaaactgaaaaaagaaaaaaaaggaaccaaaaaacccctacaaaggttatcctataaaaagggggtcggtgggcaaattgtatccaatggggcgggatacccttatacagaggggg

SEQ ID NO: 726742 - DNA, 236 bp, Homo sapiens
  misc_feature (21)..(21): n is a, c, g, or t
  misc_feature (38)..(39): n is a, c, g, or t
  misc_feature (71)..(71): n is a, c, g, or t
  misc_feature (115)..(115): n is a, c, g, or t
ggcaggaggggccgctagggntgaaagttaatctaggnncgccttgtaggaaacccagctgcccagctggnatgcctggtacaatcacagctcactgcagcccttgactcctggnactcagtgattttcccatctcagcctcccagtggctggaaccacagttggacaccaccacaccctgctaatttttttattatggggtcttgtcatctgcctctaataaataaataaataaa

SEQ ID NO: 726743 - DNA, 107 bp, Homo sapiens
tatccccaaccccaaatcaagaccaccttttttcagggtcactatttattctttgttcctttttcctgtttgtaagaaacattcccaaaaaccagtgcaaaaccaaa

SEQ ID NO: 726744 - DNA, 798 bp, Homo sapiens
  misc_feature (259)..(259): n is a, c, g, or t
  misc_feature (482)..(482): n is a, c, g, or t
  misc_feature (631)..(631): n is a, c, g, or t
gagcgctcctggcgcaaacgcttgcggggcgcccacccgagcgcggggcatcacaccccacacaggccccacatgcagagcacacaccccacgggaagggccttgacaccataagatggggagatgaagcttgttgaccgcccgaccgcgaccacagcttgggacagcccccccgcgcttaaggaggagttgtccataggacatccccgccagggggtccagctcctacgagagcacgggacacccctatcgcccacgncaccgttgcgtacaggccagacgcctgcaaaaagtagtgcgagaatgcaggtaccacctaagtgggggaccaaccgcgcacggagagaaacccactccgccagcgcatcgtgggagacagccacatagtttgttgaggcgcgcacacacggcgcaagggaaacacacgcaaccccccgttggggcgttcgcacacaccacgcgagggaaggatgattaccccnacccggcacctgtgctctggtgatcatctggacataggagagcacacgcaactcaaatggatcatggggcacagcgagcggaccgcgctggggtgcgagaggcgacgactagcagagagccgcgcgacgctgcatgtgcgaggcggcgntagcccgaaacggcaacatcgttgctgatacacccggcgagatcaccatcagtgggccacgcagggtccggaggaccacacaaacaccgggaccacaccccactcgctcctcgggggtacaaaagaagggagaatatgtattctccacaccaaacaaaagaccaaga

SEQ ID NO: 726745 - DNA, 115 bp, Homo sapiens
gcggcggctaactgccggtagggtctgtgtgcgccgccaagtcggtcgggcggggacgcgaggtgtgatgaggggtcgccttgacctctgcctcaaccagtagcgcagttcggcc

SEQ ID NO: 726746 - DNA, 485 bp, Homo sapiens
  misc_feature (282)..(282): n is a, c, g, or t
  misc_feature (461)..(462): n is a, c, g, or t
  misc_feature (466)..(466): n is a, c, g, or t
acacctgctgtcacaggactgatatttcttaacaagccctgcctctccacccctgcctccaagaccaggactccgccccatcagctggcccctgtgacatgctcccccaaccccaattaattcttcctactgcactcaaaaagacatcgccacaaggaaaggagacatttatataattatttttcctgtactgttggtgcgaagccagttaccaggcactgtgcaggtaacccatgaatatctcttgaatttgctgaatcataaactgtcatcaaagagacncaaaccaacttagctcagcccactgatggtctcgattgagtgatcctataaaaatatcattatttcctcacttttgagttgtccacatgagaaaatgtggttagaggaaagcctttttattcaacatgatcaggatggatagctggttgtttaagcaaataaaatctgttaatgtaagnnctcncaaatacaaaaaaaaaaaa

SEQ ID NO: 726747 - DNA, 246 bp, Homo sapiens
gaaaataatgattcatattaccgggtatttcttatccagtctttcattctatgtaaattgtgtgtgtgtctatatatgcgtgcatgtctctctctacatgtatatgtgcatatgtatgtatatatatgcatatgcacatacatgccacacatgcacatatacacacactcatagagaacaaaattattccgaatatttcatgaggtttcttattataaggagacaatattgatgcaatctaattaa

SEQ ID NO: 726748 - DNA, 261 bp, Homo sapiens
tttataactaaagtttataagttataattaaacagttgcttgtctaattctcccaattttaaaaggggaaacttgttccccttttaaagatgaagaaactgaggcttggagaccttcagcaatcttcagagagtcatacagctgggcagtggcaaagctgggatccagtccatgttaaacagctccagagccagcacttaatagaacccacatttgactctgatgtgaagccaagcttgagaactgatgggtaaacgttcc

SEQ ID NO: 726749 - DNA, 126 bp, Homo sapiens
attatcttcgggaaacagaatatgtatggggtggtaggcagccacacagtactcttctgagccccctcactcacttcctatccccctgtgcctttccttatgtgagtgaaggtgggaggagtacca

SEQ ID NO: 726750 - DNA, 255 bp, Homo sapiens
  misc_feature (78)..(78): n is a, c, g, or t
gctcttttgggggtctccgcggtgtcaggacttggtgagcctggtcgtgggacttgatcaaaaagtccctcgctctgngggtgcttatctggtgactggggccctgaggtctgggacagacactgccagtctttctgggccacacccacggggactgcctgcccccctgggcttggctcagtggtggggagccttcccctcagtgggggtgagactcacccatggccctgggtgtgcccggctctctgcggctgt

SEQ ID NO: 726751 - DNA, 1016 bp, Homo sapiens
gctggtacgctcggatttcgggatcgaacctcttcagccgcccggatgccgctcccggagcccggccgtagaggctgcaagtcgcaggcctgggagccctgcagccctctgcgccccgtatgacccgtgcgtcgcccttcgagggctgccccaggccgcgccatgtgtgaaggtgacgttcaactccctgctctggcccagaaggaggccaagaaggacgatgcccaagagcggcgaggaggcgctcatcatttcccccgacgccgtcgacggtggactgcaaggacccagatgatgtggtaccagttggccaaagaagagcctggtgtaggtgcatgtgcttcggactagcatttatgcttgcacggtgtcattctaggaggagcatacttgtacaaatattttcgcacttcaaccagatgacgctgtactactgtggactaccgtacatcacagatgatgtcatcttacctgagccctctgcagatgccccagctgctctctaccagaccaacttgacagacaacatattcaaatctttgaaaggacagaagacgttgacacttatatcacggtgtgcctgtcccagagctcgcccgatagtgatcctgccaacatacgtccatgagcgtacaaccaacgacaaccttacagacctactctagcactctaaaccttggcactaagtgctcatgtgatccctcgtggaaccacgataccaataggttatagcacaagccacgaaaaacgctaactggcaagtcaccacaacctaagccatccgacgggcctgccacacctaaattcgccatcccgcccccataacattgaacttcaatccaagacaacaactaggccatcattaagcacgaaccacgcaatcgacacaacaccatatcgatcaccaccatcgggaaaacacatagaatcccaaaaccaaacctgatgcaaccaagcaccaagagagacaaaaagaagcaccacctacaacaaccgagcaaggcacacccacaccc

SEQ ID NO: 726752 - DNA, 962 bp, Homo sapiens
gatatcggtctagaaatatgaatgacagggtcacacaatattgaggcgcaattacataggctgtgcaaactctgaggctggtatagtcatgaagctccagtcccgtgctgtatcagctgtaaggaatatgcacatcttccatcgaggatccccaggatagatattaactattgtgtcgacatctaggtataaaaaagtgccaaaccatgtgctcttgttaattaatacatgtacagaagggcaacatcgctccagggtaaaaatcgcgagggggcacagagtcgatcataaccgtgtacctagtgcatgttgttgtaactacaaatagaggaaggcgagtcttcattttttgcatctagggtttaagatcaaggtactgtatagaagtttgtgtaagatcggttattgggagtctcgaaggcaggtgttcattggctaagtggtgacaatgccttgtgagtagtctcacaatgtgaggatggtgggaaattccgggcaaaatatgcaatgtcttgtgcacgcatactacaggggatgcctcatactagtaatggggtctaccagagttgggggcataaaaggtgtattaaaggtaatttctcttgaattatggttcaactctaaaatgaagggcgtggtgtatgggtcacttagtgcaggaatcccttaattccgtttgtatatgtcacacagttgtactgtggagaaccaaggtatgttttggcgtggacacccttactgagtatttctttaggttaaaattaacggccaagggaactgggttttaaaaaagacaaaaggaacaaaaacgttgggggcggcagagggggaaagttacaaaaaccggggcggggcgggcgtgtgtaaaaccgtgtaggctggcaacgaagatgtaaaagggagagtaaaaagcagggggggagcggaggaacacagggatggcgtggttaggacagcgatag

SEQ ID NO: 726753 - DNA, 112 bp, Homo sapiens
gtaacatgtcagccagtaggccagacaacccccagttcaatactttccttccccaactcggagctgagccactgatacgtaggacgaacggacgggccatctactgctacgt

SEQ ID NO: 726754 - DNA, 282 bp, Homo sapiens
cttgttccttattcttcttctccttctttttcttctcccttctccttcctctcctcctccttcgttctttttctttcttccttcttccttctccttcttcttcttagttcttcctccttcttctttcttcttcctctttccttttcttcttcctccttcttcttcttctccttagttctttcttctcctcctcctttcttcttcttagttcttctccttcttccttctccttcttcttccttcgtcaccgtcttctccttcttcttactttcttcttccttc

SEQ ID NO: 726755 - DNA, 297 bp, Homo sapiens
agtttgtggctgggtacggtggctcacacctggtaatcccagcacttcgggaggccaaggcaggtggatcacctgaggtcagaagttcgagaccagcctgaccaatatggtgaaaccccgtctctactaaaaatacaaaaagtagcagggcgtggtggcgtgtgcctgtagtcccagctactcgggagtctgagacaggagaattgcctgaacctgggaggtggagattgcggtgagtcgagatcgcaccactgtcctccagtcctccagcttgagcaacagagcaagactccttct

SEQ ID NO: 726756 - DNA, 255 bp, Homo sapiens
tgaacaaatggcatactacgaactgcgagcggaacatagtgtggatatagatgtggctatgactggcctatgcagagcaaagagtcttaagatatggctatttgggcaaagcgaagcttaaggaactaagcctttgggttggcactatcgatggatgtctcaccaatggccacatttatgtactcaggacgacccaaaaagacataatactcttactgactgtagaagactgctattgaaacttctaaaccctag

SEQ ID NO: 726757 - DNA, 517 bp, Homo sapiens
  misc_feature (26)..(26): n is a, c, g, or t
  misc_feature (59)..(59): n is a, c, g, or t
  misc_feature (113)..(113): n is a, c, g, or t
  misc_feature (115)..(115): n is a, c, g, or t
  misc_feature (180)..(180): n is a, c, g, or t
  misc_feature (188)..(188): n is a, c, g, or t
  misc_feature (194)..(194): n is a, c, g, or t
  misc_feature (214)..(214): n is a, c, g, or t
  misc_feature (228)..(228): n is a, c, g, or t
  misc_feature (319)..(319): n is a, c, g, or t
  misc_feature (395)..(395): n is a, c, g, or t
  misc_feature (427)..(427): n is a, c, g, or t
  misc_feature (431)..(431): n is a, c, g, or t
  misc_feature (440)..(440): n is a, c, g, or t
  misc_feature (476)..(477): n is a, c, g, or t
  misc_feature (486)..(486): n is a, c, g, or t
  misc_feature (493)..(493): n is a, c, g, or t
  misc_feature (503)..(503): n is a, c, g, or t
  misc_feature (516)..(516): n is a, c, g, or t
ccccagccgccagcgcccgtccccgncacggaccccagcggaaccatgcaccccgccgnccacccaacccaacccgaccccagaagcccccccccgcccccggaaactcgggncncaacccccgtaacaaccgaaaaaacaagtcccgaaacagagaaaaaagaagaaaaaaaaaacaangccgaagnggccanaggaaatccccatgccgacnggggtcggcccagncagatgtggcaaccaaatttggaggaagcccccgaaggcaataaggaagaaaccccaaatgaaaaacaagaaggggttgccagagtagaangggaacagcaccccgacaaagcccagagaaacaggaaaagcaaaaacccaacccccaaatcggcccgaaaagggangaggatgaagagagaaaacagggggcagcgancagngaaagcatnggcagaatacatcaggcaacaaaaaagggaccccanncaagaaatncgggacncagcagaaancaccacacccganc

SEQ ID NO: 726758 - DNA, 319 bp, Homo sapiens
  misc_feature (193)..(193): n is a, c, g, or t
  misc_feature (199)..(199): n is a, c, g, or t
  misc_feature (214)..(214): n is a, c, g, or t
  misc_feature (222)..(222): n is a, c, g, or t
  misc_feature (240)..(240): n is a, c, g, or t
  misc_feature (308)..(308): n is a, c, g, or t
gtcggaatctcgctccatcacccaggctgaagtgcagtggcacgacctcggctcactgcaacctccccctccgaggctctcgccattctcctgcctcagcctcccgagtagctgggacggaggccaggtacttccctgacacttgtcttattcctaatccccatcttgaatcaaaaaaaaaaaaaaaaaaagncacccnctatgcaattacagnggcaaggncttcgttggggaaaaggntcctgggaactctgtgttgcctttttggggaggaggagagtggtttaggaaggggtattatgaatttntaatttgaaat

SEQ ID NO: 726759 - DNA, 405 bp, Homo sapiens
tgtgttttttggctgaactccagaagaaacatttggcttggcttgcattttacacaaacacacacacacacacacacacacgcaaatttttttgagagacaaggtcttgtgctgttgcccaggctagagtgcagtggtgtgatcatactcgctgtaccctcaacctcctgggctcaagctatcctccctcctcagcctcccaagtagctgagactgcaggcacatgcaacactccagctaattttttaaattttttgtagagatgaggtctcattatgttgcccaggctgtctcgaactcctggtcttaaatgatcctcccactttagcctcccaaagtgctggaattacaggtgtaagccacctcacctggactgcattttttttaaaataaaaaagtatatta

SEQ ID NO: 726760 - DNA, 198 bp, Homo sapiens
  misc_feature (40)..(40): n is a, c, g, or t
  misc_feature (88)..(88): n is a, c, g, or t
  misc_feature (111)..(111): n is a, c, g, or t
  misc_feature (148)..(148): n is a, c, g, or t
  misc_feature (162)..(162): n is a, c, g, or t
attcggcacaggttcgtgaccatggccgaccgggcggcantgaagagggcttgcaaagacccgaaccccatcatcgacggccgcaacnagccgttgaacctggcatatctnggcgccaagcgcggacctccagacgggctttgcattngggttcagcagctncaccaccttgatccagcggacttacgggcttacccc

SEQ ID NO: 726761 - DNA, 1167 bp, Homo sapiens
gctgagggtcgcccggcggtagctgagccaacgcggctgtggtcttggagcccccatcctcctgccgggcgaagatgttccgagcctgtgaccctgcagccttcaccgtaccgtgctgggtgactaggagacgttccctggtggatgggcccgtctcgtgactcgacctcgagtcctggaacatcgatgcgcctcgtgcgatgcccaagcattgcatcaacggagcgtgatgggcttgccgtgcgtgtcatcatatgctgtgatataccacattgtgcacgcggagtcacattatgagggctcaggggcatggttccgtttcgcctctcgtcccttggcttgccgagtcgtggtcccatcttcacctgcctcttagtggggcccaagggtgtgcacgttaccactattggggcattggcagacatccgatccagatttccgtgggcgcttctgcagtagggagacccagggcccagtccttggtacagcaggccccaagggtctcgtgtcaacgctatctcgatccatgaagttgacgcacatgacattgtcccttatccagtttggatgagttgcccttgcttgaatccctgtgtgggctcgtaggatgccggaccagacccttcccattccaatgcggctgttgcacacatgaacctttagttaccaaacttcgggttccattgtaacaagaatacttttcagcatctttgcgcaagcgaaggactgttccttgagtcgtaacgcacattgacgttccaacgggagtaagccgagtgggggttccaacaagggttgtgttccaacccggatgtggacaggggaggggcagaagggcagcttccttggaaagccccttccgaggttccacggccccttcagagcattgttgcaacggaaaggtacatgggtgtcaaagacagattctattgggggtgcacatcgcttggaagattttaggtccttaaaggccattccaggcaggaagtcgcaccgtttttggcatgggttcccaaaggggccgcatacaattgcggcccatgatggagggggtggcaaggaacgaaccacacagggttggcccgtgggattctccaacttatccatggttcaggcaatgggatcccccagttccaaactgtaatttaaacgtcggcgccttaaggg

SEQ ID NO: 726762 - DNA, 117 bp, Homo sapiens
aaaaagggaaaaagggttttccccaagggctaaggggggggggattcccccccccccccctgggggggaccaggggggggggtttgaaaaaaaaaaaaaccccgcctttggttccca

SEQ ID NO: 726763 - DNA, 167 bp, Homo sapiens
cgcggcttagcttatcgtgtgtcagatatgttaaagccactttcgtagctctatatagtgtcgactggcagttatccacaactcacgtgagatttgagcttgtatgggaggagtggggtgatctaaaacactcttgacgccggccttctatagactcgtggttaact

SEQ ID NO: 726764 - DNA, 176 bp, Homo sapiens
agaatggcaaccccttgctgaaggcttgatgcgccgctggctgcctgccggtagacgccttgttgcagatgatcacctatcctacctgccctcccctgtgactggcccagtagagtaccgctgcgcagctcctgtagcgaggggcccccgtgacgacgagtgctgccatggggcat

SEQ ID NO: 726765 - DNA, 582 bp, Homo sapiens
ggcgtatacagactcaagtgtcacgaatgaagaatgtatagcatgcatgcctctgttgattctgttttctaaacctccacatgtcactcctaccttaccactccagatcctcgccgtctcctctggaccaaagcaatccatcttttcctaactggctttcctgcctctaagcctcacctaaaacccatcctctatatccaaaatgaccattcttttccttttctgtacttattttttgtagagataaggtctcaccaagttgcccacactgttcttgaactcctgaactcaagagatcctccagtctcggcctcccaaagtgctgggattacaggtgtgagccaccacacctggcctgtcaggacatcttcacctgttcctgtgtccaagatggtattgcctaggttgtcttctggggtttttatagcttggggttttacatttaactatttaatacatcttgagttaagtttagtatatggtataaagaaggggtccaatcttctgcatatagtaagccaggtatctcagcatcatttattgaatagggaatcttttctccactgctagattcagtaaggt

SEQ ID NO: 726766 - DNA, 383 bp, Homo sapiens
  misc_feature (351)..(351): n is a, c, g, or t
  misc_feature (376)..(376): n is a, c, g, or t
gcaagagtagtaatgaaggcatattgttataatcattttattttatctgtagttattgctgttaatctcctactttgcttgatttattgatttatttactgagatggatcttgctctgttgcctgggctggagtgcagtggcacgatctcggctcactgcaacgtctgcctcccgggtttaagcgattctcctgccttagcctcctgagtagctgggattacaggcacgcaccactatgtctggctaattattgtatttttactagaaacagggttttgccatgttggccaggctggtcttgaactcttagcctcaagtgatctgccctccttggcctcttaaagtgctgngattataggtgtgagccaccatgcncagccgg

SEQ ID NO: 726767 - DNA, 342 bp, Homo sapiens
gaaacttatctatatccattaagtagcattaatagttgtcatcatcttgtcaatctttattttaattatggtaaaatacacataaaatgttccaccttaaccatttttaaatgtatagtatagtaatgttaactatatgtacactgttgtgcaacagatctctagaacttttttatcttgtcaaactgaaactctataccattccctacttcttatttttgggtggaatattacagagcaaatcataggatatcatcttatttcccaacaggtaaggacttaaaaaataacaatatatcagtatgcacatttaataggaataataacttctttaatattaat

SEQ ID NO: 726768 - DNA, 1490 bp, Homo sapiens
  misc_feature (1)..(1): n is a, c, g, or t
  misc_feature (823)..(823): n is a, c, g, or t
nggtggtcgtatcatctgttggtgcgacataaatataattgatgtgtgtagtttgacggttgttcgtcgtcagctgacgcggacacaataatacgaacctacgtcgggtggtttgtatgatgattttgtgtctcattccactccagtgtggttgtgtgacgatctgtgtttagtacatcagcgtgtggggtcgtcaccaaaaagtattgtgggtggaccacaatcaattattgttcgatttcgttcgcggcatcccctgcgtcagtgggttggtttttgcaacaaccccaatagtatggggggccgccgacgtataagtttatgttttatattaaactccgcgctccaaatatgaagtgcgtgcggatacccacagaggcgttgcgtctcgttgtaatgttggtgcctccccgggctctttgtgcgccaggaagatttttgccaacggggggttgtctcactttacaactcagggacccgcctccgtttttttgttggtgagcatggggcttctttgtgccccccaacaagtgttttccgcggctccatgtagaatatggtgcgtttttaataatatggtgagaattgttttagtgcctccacctcaacgtgtatatccttctccgcgcaagttgtagatagtgggggcccacggggggcgcgcggggggggcggggtaaatttttggggttagcggtttggggccccccgccttttttattgaaacgccgcgccttacaccacaagatttgtagatactccacttatacccccgtgtaatatgtgtaagttccaaataaacacacacattatcggcaacatnttatatagtgtgtggacacacacttatatatgagaaatctctcgcagaagggagattcgcaccacacggtgtgtgttacacacacaatataagccacggcgctgtgtttaataacacgcagccgggcccacgctataactaatttaccggggtcccttataagggttatgcgcgagggcccctcgtgggttggcgcagaatttcgggccacccgaggcccacgctgaacaccactgagatcacatgccaccttgccacctccacacgctttataacgctgagataagaagtgagagacactctgttttcttaaaaagagaagcctcgggcgccggtgggctacaatgccataataaattcccacgcacctcttgggagaggtctcgaaggtgggtggaatacacacctcgagaggtccacaggagagttttcgagagagaccacgcctggccacaacactggtgaaaaccctcgttcttctaactataaaaataccacaaaaattagccacggcgtggtggccaccgcgcccttgtagtccctttctaacttgggagaggctgaaggcccggaagaaattgctccaaccccggaggtggagattgttgcagttacctgagactgtacccctgcactcccgcctgggcgacagagtgagactccctct

SEQ ID NO: 726769 - DNA, 169 bp, Homo sapiens
gagcagcctgggagcaggcaggggatctgctgtgggaagggacggcacacccattcctgtctgagaccttagcaagaccatggcacagtctgggcatccacgtgaccagctgaccaaagacttatgcaactgagagcactctgatggctcctcagacgagcagatcaga

SEQ ID NO: 726770 - DNA, 260 bp, Homo sapiens
tccataagtagctgttaatggaccaagggttggatataaagttattcaaatcttcagaactttggcccagaatggaatcacaagctttacaaagtttttccttacacaataaaaccagggataggggcaagctggcggaggggaccaaccatagcagtacgtagcatcggcaaacaacatacaaacactcacacaaccaacaacacaccaccacaaccaagcaagaaacaatacacaacaataaaaaaaacaaacaaggg

SEQ ID NO: 726771 - DNA, 341 bp, Homo sapiens
  misc_feature (129)..(129): n is a, c, g, or t
  misc_feature (254)..(254): n is a, c, g, or t
  misc_feature (269)..(269): n is a, c, g, or t
  misc_feature (312)..(312): n is a, c, g, or t
tctgcctcgcgggttcaagtgattctcctgcctaagcctcctgagtagctggaattacaggtgcttgccaccacgcccgactaattctgtagttttggtagagacagggtgtctccgtgttggtcggtntggtcttgaactcctgacctcaggtgatgcgcccgcctcagcactctgggaggcccaggtgggtggttctcgtgaggtcaggagttcaagaccagcttggccaacatggtgaaaccccatctttnctgaaaatacaaaanttagctgaaaatacaaaagtggcacatgcctgtaaatgccagntactgggggaggcttgaggtaggagaatt

SEQ ID NO: 726772 - DNA, 149 bp, Homo sapiens
tgctggcatttaggcttctggggaacaaggtgatgtttgcaggtctcgccttagacagggggagttggtgcctggttcctcctagaccctggccattagattccagatcagctgatttcatttgggatccttaactgtaaggaagtgta

SEQ ID NO: 726773 - DNA, 152 bp, Homo sapiens
  misc_feature (58)..(58): n is a, c, g, or t
aggcccttcttccgtacgccctcaccctgggcgccgtggacctgtacgagtattcgtncggggatgaggacctggagccgctgtgacgccgccccgagaacgccgccacggggccgctccccacgtgccaccaccggccaccgcggctcgtg

SEQ ID NO: 726774 - DNA, 872 bp, Homo sapiens
  misc_feature (215)..(215): n is a, c, g, or t
gtgtgatccgtcctgcgcgttgtctctggagcagcgtctttatctccgccgccttctctcctacctaatgtgtgtgccgccacccgatgaagattcgatgacatgccatgagccccctgaggccccagaactatctttgcggtgtgtgaactaaaggccgacaaagattatcacttagggtggatactgctgcaccaatgagcaccagttatctntaagaaccggccagtaaaggggctgtgccaacggatgcagttgcacttttgttgacggcaggaggcaattgaataacgaaggccggtcccattagtggtacccctggcacttttgaaattgtcttgtaccagccaccgtttccccttgggggctttgaaataacaccaccagtgttctaagggtggaacgtgtgtcccaggccagttgcctattagtgacagcaacttagtagcctgtggaggaagatgcagagtcagaagatgaaagacggacggcaggacctgttgaaacctctaaagtatatctgaaagcggtctgccctggtggtgttacaagtgtcccacagaaacaaagttacactttggttgtgatgaagatgatgacgatgatgttgagaaggttgatgatgacatgcttgatgatgactgacttgatgatgagggacgtgaagaaagggtctgtgaggaatctatagggatatccaggcaaaatgtcaaagttcattcgagggagggtcaacacttttcacccgtttaagggaggacttttgaaggagaattttaaccaagctttttgtggagctttgcaatgtcgggtataaggtgtcacgggcgcaatttaggtcgggccagaactcggggggaaaaagagatttg

SEQ ID NO: 726775 - DNA, 194 bp, Homo sapiens
tcgatctagaggatcccggctaccacttggtagcagtggttaaaatgagccttgatccctccttggagcccctacttccttgtatggagggcactagatatagagcctagtatctacccattaagtctagcacgctccctgagggcccagaccagtgtcacaatagactcaatacaaccatttttacatgagca

SEQ ID NO: 726776 - DNA, 885 bp, Homo sapiens
cgtcaagacatgcgcgcgcattccttcgtgtcgatgctgggggcgtttccgcgtcgagggccgctgaccgcttcctggagccgcgtgcgcgaggtgcgttccccagccctgtgtttgctctggtgctctgacccgccgccgcgaatctcctgctcgtaactccgtggccgtgaacctggaggagggaggatttcctctgtgcagcatttcgagcggtagaatcaacctgccaggcagacctagattggcataaccagagatcagttccagttgtgatgcagtgggtgtctacacacttctgatgacaccttttatttcaacagcttgattggttccaaggttaaagccggggattctcaccggtgttagccaggactggctctcagatctccgtgacctcgtagatcactgcccatcttccgacctctccaagtgctgggacttacaggcatgagccaccgctgcccggtccttgtatcttctaaactttgacctttatggagacgaaccaccatcgttttgctgcaacacttgaacacatgatgcaccgagccacagagttggccagacctgtttcgcaactgctgtgcaaccggtcttctctgtcttctttcatggccagtaacactgctccagaaagagatttctgcgcagccatccactcccagtagtttctgcatcagtggcgataaggccacacgcacattgtcctgcctatttcccaaacgcactgtgactgcttcccactattcccagctggctacatcgggaccggtcgtctgaatggatcctgcgcacacagtccatcaacgaaagtacgcactttgaccctggaacacctttctctggccctacccctcgtcactcacgcgtcaactcactgac

SEQ ID NO: 726777 - DNA, 319 bp, Homo sapiens
taagtgtctcggggcaagtgtaatgatgctgctatagccaagcaatacaaggattgctgggagccagcagaatctagaaaaaggcaaggaaggattcttccctagagccttcaaaagtaacaaggcgctgctgaacatttcagatttctagcctccaaatctgtgagataattaaatttctgccgtttacctaaccaagtttctggtaatttgttactgtaggaaaataatatagtggtcaagggacctagttaagccaagatggcccaagggcaattttactgggtcttttgtcagctattccttcctagtaacaaaa

SEQ ID NO: 726778 - DNA, 342 bp, Homo sapiens
ttcagctttcccgttgctttacaaagttacttaatgctcttttaaaaatttaaatgttttggctgggtgcagtggctcacacctgtagtcccagcactttgggaggccaaggcaggcggatcacttgaggtcaggagttcaagaccagactggccaacatggcaaaaccccatctctacaaaaatacaaaaatgagccgggcatgatggcgggtgcctgtaatcccagctgttcaggaggctgaggctggagaattgcttgaacccaggaggcagagcttgcagtgagccaagatcgcgccattgcgctccagcctggctaacagagcaaaactctgtctca

SEQ ID NO: 726779 - DNA, 327 bp, Homo sapiens
acaggctctgcagaaactcgggagtagcaagaaagcagaggagagagccaagatcatttcggccatagatcaagatgtggaggagaaaacgcgtgttcctggatggccttgaagaagaggactacaagactaagcttttccagtttctgaaactgcggaaatattccatcaaagttcactgaagagaagaggatggataaggacgttatccaaaaatggacattcaaagaccaagtgagtatgtgacgattctaacagatgcagcatttcgctgctaccttacaagcttctcttctgtcaggactccagaggatggaaagggggact

SEQ ID NO: 726780 - DNA, 95 bp, Homo sapiens
agacaaagggaagcgccgccgccgaccgccccgcctcggtcctccacctgtcctgctacgctcgccggggctgcggccgcccgagggactttgaa

SEQ ID NO: 726781 - DNA, 157 bp, Homo sapiens
aggaaggtactgcaccatactgaaaataggtgtaactaaagctagaagaggcacagaaaactagaatctagtagataacgagggagaatagaattgtcatgaaaaatatggggtatagatatttatagtaatctacttgtggtactacgcttaggca

SEQ ID NO: 726782 - DNA, 448 bp, Homo sapiens
  misc_feature (12)..(12): n is a, c, g, or t
  misc_feature (60)..(60): n is a, c, g, or t
gggagcccccgnacccaagggtgtaccctcccccctcttcggggggagtttccaaaaacncgggtgacctttccctggtggtttaaaggttttttttccacccactttcccttggaggtggagagcaatggggagccggggaacaataaaaaaacacgccttccggtgttgggctccggggggtctttttttttttttaaaaggtttcccgggggcaaaagaaggtgggagcaggggaagtttttttttttttccgttagggatgggggtttggccaccccctaaacgcaaaaaagctttttctttttcccggggtaattgggggggggggggggaagcccccccttcccgggttttttggtttgggggggggggtttgggggggtcccctttttattttttttcggggccccgggatggaaataaggcccccccccctgccctggga

SEQ ID NO: 726783 - DNA, 895 bp, Homo sapiens
  misc_feature (3)..(3): n is a, c, g, or t
  misc_feature (61)..(61): n is a, c, g, or t
  misc_feature (66)..(66): n is a, c, g, or t
  misc_feature (72)..(72): n is a, c, g, or t
  misc_feature (91)..(91): n is a, c, g, or t
  misc_feature (120)..(120): n is a, c, g, or t
  misc_feature (213)..(213): n is a, c, g, or t
  misc_feature (282)..(282): n is a, c, g, or t
  misc_feature (452)..(452): n is a, c, g, or t
  misc_feature (472)..(473): n is a, c, g, or t
  misc_feature (549)..(549): n is a, c, g, or t
  misc_feature (643)..(643): n is a, c, g, or t
  misc_feature (652)..(652): n is a, c, g, or t
  misc_feature (669)..(669): n is a, c, g, or t
  misc_feature (685)..(685): n is a, c, g, or t
  misc_feature (701)..(701): n is a, c, g, or t
  misc_feature (747)..(747): n is a, c, g, or t
  misc_feature (749)..(749): n is a, c, g, or t
  misc_feature (767)..(767): n is a, c, g, or t
  misc_feature (773)..(773): n is a, c, g, or t
  misc_feature (775)..(775): n is a, c, g, or t
  misc_feature (781)..(781): n is a, c, g, or t
  misc_feature (783)..(783): n is a, c, g, or t
  misc_feature (815)..(815): n is a, c, g, or t
  misc_feature (875)..(875): n is a, c, g, or t
ggncggggatgggaacactgtacagggagaactcacagctccaagagcttccctccaaatnatgangaagtncctgtcaataactagattncctacagcctggtcctctgcccatggganggaggggaaatggatgtgaaaagcaatgtggtctgcccccctgtcattcaaagatccagtcctgagcacagcccgtgtaacccaccagtcccncagggtgaaacacaagccgatctccttctctgcactctccacagaatcactgccatgtataaagttccngccaacttgtatgcagaagtctccacggatggccccaggcttggagtctgcagggttgggctccccgagcatgactgggcccgtctccaccacactcagccccccccagaccatggcaaccaccggccctgagtgcatgtctctcaccaggccggcaaagaatggacggncctccaggtcaacgtagttnnccttgagaagagctccggaagcctgcatgaatttcagaccaacaaggcggaatcctttctgcccaaaacgcttganaatctctcccacaagaccccgctggaccccatctggtttgatcgcaatgaaggtacgctcacagttggccatggttcctgtttcacagcttganataggaggnccctcgccttgaaagangatccctaaagtaganagttgcaccatctctnggccccatcttcctgttctttagttaacctcttcttacagcatctnancactgtagttcaattttntgtttntntttttncntcccctgcacaccaggttgacttagttctgtntagagactctatggtacctagccacagggccctcccagccgcctaggtttgaaccccttnttcctctccatccccctaaa

SEQ ID NO: 726784 - DNA, 191 bp, Homo sapiens
cggtttgaaaaggggtcaccactgagggggtctatggaggctgcctatgccatgtcagcacctcctggggaaagccctgaggaccggccacaagggtgtgcctggaccacgtgcctctgcctggcggagcctctgggaggaggaagaggaggaagggggagacgaatttctctcctggccctggtggcgcg

SEQ ID NO: 726785 - DNA, 310 bp, Homo sapiens
gccaacacatgctcggggcatcccacccactagggtctacatacagaccctcggaggcctagccacaactgtctcgttgaccagactgggtataggcaaatagggggttgcatttctgttcagggatactggatagggctgaccaggtgacaaacatggtgtagagggtgatgaccgaggcctgcagcagacccgagttgggctgggcgtcctggaccttgggcaggacagcagcgatggacacgcagacacagaaggtgaggttgcggctgatgaagaccttgccctcgtggcagccgctgggctcagt

SEQ ID NO: 726786 - DNA, 926 bp, Homo sapiens
gcccggcgggcccagcgtggagagctgaaggtcaggccaggacagtgagacctgactccttgctcctacacagactactatggcttacagagccagggtctagggtcccggtcgatgtaacgacgagcagaggaccagcagatgaatggacgccttgaagcagtaggagcagcaggagcagaggccagaacaggagctgaccgggtagctggggccacagggcctatgaagctaccatgtgtcgagggcctacaggccagtggtcgccggacccgctacacgacacgtgagtattgccaggcacgcaccgtgtccgatccattgcgacgaagcttatggactccttacgtacatgaccccgaaggaactcaggcttttgactcatcaatcccctgtagcaataccagcaaaggggttcactggggaagcaatcatcgtcgccgagcttggcagacgctcacaataaatcacttggcatatgcacaacgggcgcaccagagtgtgatgggtcgcttgtctacccacaggttcgagacctggacgggtatatcaaggagggcgtggcataagaaaactcgcgttagcggaaaagtcaccagacagtgcacacgattcagaaacgtccaagagtggccctatacaatattctgtagcttttcataaccaccccttgaacaccgcgttcggggggacccagggacaggcggagggacccacgtgattgcccaggaagcacaagagttcggcgaaaacaatgctcggtgtgtccacgaaaataggaggtggacgcggccgaagcctttcacgaacacttatgcaaaccctggggcgcctgtaggcacgcgctaggggtgcttggtgccatattgggccccattcaaaccctggatatccgggcacccccggagaggattggcccaactggg

SEQ ID NO: 726787 - DNA, 174 bp, Homo sapiens
catccggatgtatggcaaaagtctcaagacatatggtccacgactgatgatcatctgatattatttaagttatgttttgttctatgttttcagagacggagtctcacatattgtcccccaggctggagatgcagtggcagcgatctcagactcactagcgcacctccgacctcc

SEQ ID NO: 726788 - DNA, 111 bp, Homo sapiens
gctcagcacagacaagttcaagacagatttttatgatcaatgcaacgacgtggggctcatggcctacctcggcaccatcaccaaaacgtgcaacaccatgaaccagtttgt

SEQ ID NO: 726789 - DNA, 109 bp, Homo sapiens
agtcagaagtcccttctcgtggtgcctctcctccctggattggtcgtacacccagcttaaaaccccattcttgccgcaggcgtccatgtgatcaccatggggatcctct

SEQ ID NO: 726790 - DNA, 880 bp, Homo sapiens
ctgctgacttctttgctgaaccggttagtccccaatgcaacagatctgcatagtgcctgttgcaggtattgtgctgactgctagatggggacagggatctactgtactaaaagcctcccgtacaaatgtggttgatcaggattactgccctccgatgcctttaacggcccaagtcagtacagggggcataattcgatcctcttcacttggcatatagaagttaccggcggtgcgtctgacacgcttagcaatcatcatggcctggttgcatgatgggtgtttgccccagttagctgcgagtagttgtgaattcagtgagatcgacagtgggaatgtggcctatcccgatcaactaacgaacagatgatgtccacgtggtaggaagctgttggaatgcaaattattatcacaaatagaggtgagagattgggacatccgtagtgtcggggaagttttcaggtacattgaacagagcagggtctgatatgacgccacagggttcactctccggttgatcaactaggaagaggctctccacaaggtaggtattgaatagactggtcctcgtttgccactagtaattgcaacacgatcatagaacgtcatattgtccaagaaatatagtattgccctcacgatcagaagagagaacacgtttggactccttattcccatggaaaggccttaacaaaaaagctggaatctggagttctccacagctaggcactataaagcgtgttaggaatgtatctgagccccgtgtatgacaggaactttctagtcctactatgtattcttcctaagtgggacatgtttaatgtaactgtcgcaaaggggtgatgcaggctggttgcatgcccaccttttttcagagtactgt

SEQ ID NO: 726791 - DNA, 370 bp, Homo sapiens
  misc_feature (135)..(135): n is a, c, g, or t
  misc_feature (152)..(152): n is a, c, g, or t
  misc_feature (158)..(158): n is a, c, g, or t
gtcccagggccgccgtcaccatgggccgcgagtttgggaacctggcgcggatacggcaacgtgatctcctacagattgtcgccctttgagcagcgcgccttcccaagctatttcagcaaaggcatccccaacgtntcgccgcactcgctgangcatcnctcgcgtgcgccgccgtttgtagtggtctacctgatctacacatggggcaaccaggagtttgagcagtcgaaaaggaagaatccagccatgtatgaaaatgacaagtagacggcctgcacctgggtgacagtcccctgcctctgaaagacccttctctgggagaggaatccacactgtagtcttgaagacaataaactacttatggacttcc

SEQ ID NO: 726792 - DNA, 291 bp, Homo sapiens
tcacaggaagcacatccataggaaaagggggagagtactacatcaaaggaataccccgtgagacaaaagaatctgaacagcagccttcagcctagaccttccctctgacagataaaaggttagttattaaattgaggcaccaggaaaaggcaaagcccaatgcaaggaactccaaaaaatgatacaagaagtgaagggagaaatattcaaggaaatagatagcttaaataaaaaacagtgaaaacttcaggaaacattggacactttgcatccagaggggtaccgagctcg

SEQ ID NO: 726793 - DNA, 1141 bp, Homo sapiens
gctggtgaacaggaccgttgccatgggccgtgtgatcccgtgcgacagtaggaagggcgccgggtcggtgttccgcacgcagagtgacatgcagccgtacaagggcgtctgcgtcgccgtgagagcaccgagggatttcggcgtggagaacgggacgcggggtacattcaccgggggcatcatcgaagtgtacatcatccagcgaagcccggagcccggcaaggagtcgcgcgccatcgccgaaggatgggatcttccgtggaagtccgatatcggatcgaagcaagcggtacagagacgcctggtgcaattgcctgccagaagggacaattcacagcgaggccaagtaaatgatgtacttgactgagcagatgaagggcccagactcaaccatgggacgacttgatgctccctgtgaggctaccatgccctgagggtaccaactcagtgttgctaagccatgcgagagaggaaacgacacttgaggacgcacctgtgggctgaggggtgtgaccccgaggacaatcaaggggagaacgtactgcacactcggtaaattcattcccaagagaacacttgtagagcgcagttgaaggaacctcggaaggttgaaagtcgtgcctctccctgggtatctgcaagcaaccgggtttacttcgatcgcattcaatggacccctatgatcaaagatggcaatggttgtggccacaggagaggtggtaacagataggaagccatagaggaaagcgttggtggcccggaacaagatttggaatcgaaaaaaccacgccatatttctttatgtaacatcgagctgtcgcgcaccagtagtgctagtttagcccaaaacgaaatacatcttactgtcatacgggggcaccgcacactcgcatcgcggcagcaccgttggcttaagggggctccaccacagagaaattttagcccgtgggagggtttgtttagggcacccaattaagaataattcccgatagggttagggaaacggcagaattccctgttttcatgggaagcagttggggcgaacacccaaaccccgagaagccagaccaacatcgcagagacacaggcccccatccacaaatccatgttcacagggcaaggaaggaatacgccccaccgg

SEQ ID NO: 726794 - DNA, 354 bp, Homo sapiens
  misc_feature (351)..(351): n is a, c, g, or t
tcagataagcagcagcgcagtgtagcacaaacgaagggcctgcctgctgtatcaaagaatggggtgggggcccggcgcggtggctcacgcctgcaatcccactactttgggaggccgaggcaggcggatcacttgaggtcaggagttggagaccagcctgaccaacatggtgaaaccttgtctctactaaaaatacaaaattagccgggcatggctgcatgcacctgtaatcccgactacgcgggaggctgaggcacgagaattgcttgaacctgggaggcggaggttgcagtgagccaagatgacaccactgcactccagcctgtgcgacagagcgagactccatctcanaaa

SEQ ID NO: 726795 - DNA, 385 bp, Homo sapiens
cttgatagcacttcgcactcaatgggctcgtccaggtagacatgacgctcttgaaacgggtgcaagttcggccgccaagtgaatatggccaagtctgacggcatcagagaatagtctgggggtgtctctcctaccagggacaaagacaagttcctccgaatccggagtgcccttcacaagcatatgcccatatcccacccaaaattttaaattacacacaaactgcacattgtataagcataaccagtgacacatcaactcttcacttgggtgggaacacaagacagcgcaagccccatcacctcctttaacacgctgcaacgctgtgatcacaaagagtccacatctgacagctcacagtccatctcgtgccgaattcctacag

SEQ ID NO: 726796 - DNA, 260 bp, Homo sapiens
  misc_feature (13)..(13): n is a, c, g, or t
ctatccagactgncatccctcgctgtcccctaacagcgacatagcccatccctgcctggtcacagggcatccccctggcactctgcggaccccagctgtgagccttggttgttggcagtgagtgagcctggctcttgtgcttggatggagcccaggctgcagctgtggccttgtccctcccacctctgtgacctcgggcactagcctttgctctggaggacaatgccccagagcagggtgtgggggatactgcaggcccc

SEQ ID NO: 726797 - DNA, 105 bp, Homo sapiens
ttgagctgcgagattatagtagggtcgtggtgctggacgtttaacgtttgacgccgtacggaactgcggtacatagttacggataactataaactagttacaatt

SEQ ID NO: 726798 - DNA, 948 bp, Homo sapiens
aacagttcggcggtcccgcggctctgtctcttgcatcaacagtgttgggacggacacagatccggggactctcttccagcctccgaccgcctccgattctcctctccgattggcaaactccggagtaccatcttctacggccatctcctgcttctgggacctgccagacaaccgtattgtggttagctccttcttgcaaaccaatcatgagctcccagattcgtcatgactttattccaccgatcgtgtaggcagccgtgcaacagtcctggtcaatttgtaacctgtaggtcatcataaatcatacctctctctgggcttctatttcgaccgcgatgactgtggctctggaagtgcgtccgcccaagtttctctccgcgaaattggtcgtggagagtaacgcgccgagggtgctagcgacggcggtgtcctgaaagattgcacacacacactagtcgttgccagtgtagcgcatcctctttccagtgacttcaagaagccagtttgacctatgagcgtgtggtaactatcccccattactccatgaaagcttgccagtggccctgggaacaaaaaggctgaaccacggccttttttgatctttcatgacctggttccttgccgtgagataacccgcatctctgtgacttcctgtagactcacttcctagatgaggaacgtgaagtctatcacgaagatgggtgccatcttgaacgatctctagggtgcgtggaccgagctggatgagcgagctctgtacgaagggtcattctaagccgaattaaactttggcccagaatttaggccctgaggataggcttgggaacttcctcctccaagggattttttcccaagcgggccacgcgaatttttaacagaaaaacacaatggcccgccaaaaaaatgtggcccgaccaaagctacactttttaaacacaggcatgtaga

SEQ ID NO: 726799 - DNA, 585 bp, Homo sapiens
cggtcctcatacggtccaggctactagggaggctgagtcaggacagttgcttgaacctgggaggtggaggttgcgatgagccgagatcacaccattgcactccagcctgggcaacaagagtgaaactccatctcaaaaaaaaaaaaaaatatgacacaaaattttatgtataaagtcccaggtaccctgccctgcgaacctatgtcataggttcgcaggggatctgaaaaattatgtaatagggagtgggaataaaactacttaatccctgtgggcgggttatattttaagctcaaatgcttggctttacccttgggttacttttatcctgtaaaacaaaattgaaaaaagattataataccaaagtgtagtaggttagggtgatggtaaaaactcttgtattaaaatgtcatggtggttgttaccttttttcagattccaagcttataaaaagcctgtatttttttaaaacacatcttaacctccacgctttacgattattataaaagttgaatggtccccctttggtaaggattttggtttacaattgctaggaaataactcactgatacctgccaaccttta

SEQ ID NO: 726800 - DNA, 860 bp, Homo sapiens
  misc_feature (23)..(23): n is a, c, g, or t
  misc_feature (158)..(158): n is a, c, g, or t
  misc_feature (174)..(174): n is a, c, g, or t
  misc_feature (201)..(202): n is a, c, g, or t
  misc_feature (228)..(228): n is a, c, g, or t
  misc_feature (268)..(268): n is a, c, g, or t
  misc_feature (286)..(286): n is a, c, g, or t
  misc_feature (292)..(292): n is a, c, g, or t
  misc_feature (333)..(333): n is a, c, g, or t
  misc_feature (430)..(430): n is a, c, g, or t
  misc_feature (432)..(432): n is a, c, g, or t
  misc_feature (460)..(460): n is a, c, g, or t
  misc_feature (467)..(467): n is a, c, g, or t
  misc_feature (474)..(474): n is a, c, g, or t
  misc_feature (479)..(479): n is a, c, g, or t
  misc_feature (491)..(491): n is a, c, g, or t
  misc_feature (507)..(507): n is a, c, g, or t
  misc_feature (514)..(514): n is a, c, g, or t
  misc_feature (517)..(517): n is a, c, g, or t
  misc_feature (520)..(520): n is a, c, g, or t
  misc_feature (527)..(530): n is a, c, g, or t
  misc_feature (544)..(544): n is a, c, g, or t
  misc_feature (546)..(546): n is a, c, g, or t
  misc_feature (550)..(550): n is a, c, g, or t
  misc_feature (560)..(560): n is a, c, g, or t
  misc_feature (575)..(575): n is a, c, g, or t
  misc_feature (593)..(593): n is a, c, g, or t
  misc_feature (619)..(620): n is a, c, g, or t
  misc_feature (639)..(640): n is a, c, g, or t
  misc_feature (660)..(660): n is a, c, g, or t
  misc_feature (670)..(670): n is a, c, g, or t
  misc_feature (672)..(672): n is a, c, g, or t
  misc_feature (684)..(684): n is a, c, g, or t
  misc_feature (704)..(704): n is a, c, g, or t
  misc_feature (707)..(708): n is a, c, g, or t
  misc_feature (726)..(726): n is a, c, g, or t
  misc_feature (731)..(731): n is a, c, g, or t
  misc_feature (761)..(763): n is a, c, g, or t
  misc_feature (771)..(771): n is a, c, g, or t
  misc_feature (773)..(774): n is a, c, g, or t
  misc_feature (779)..(779): n is a, c, g, or t
  misc_feature (787)..(788): n is a, c, g, or t
  misc_feature (797)..(799): n is a, c, g, or t
  misc_feature (827)..(827): n is a, c, g, or t
tacaaatattaaatctctccatnatgtctcaaacagtatcaaacaccatttcatatctctaacacagagcagagtcggcattcagtataagaaccaagtgaaaagtgttaaatttcaagcatctgatcacatcacataggtaacccggtaaaagattnagattgtacaatttancccaaaatccaactaatagcatctcanncaatatcctccactaagtaaaaaaanaaagtatctttttcaaaattgattaagagcaggaagttgngagagataaaaataaagnaaaaanacatcaatctaaaaaaaactccgattaaaaaccagaaaaanaaaaaaaaatttgtttatatccgggaaaagaagagaaagagaggtcaaatggggttaaaaaaaaaacatgaccaagggcaagacaaaccatataggnanacaaagatgatagccccagaaaagaaanaagtcanccatggntattntaacccatcacngtgggctattttgtgnggtattnccnccncttattnnnnatatagtgaaacantngttnctcgtttttnataattcaccacagnctttttcctttttaaacnccttgttatagacccaccaaaaaacnnaatttaaaagcgccctttnnagggacaaaccccacccccncaaaaggcanangcgtgcttttgnatctaaaaatatggtgggtnggnnagcccaaggctggggtcnccccntaaatggttacgtacagccttgatcatttnnngagctttntnntccantagctccnnccgaagttnnnactggggtttttggttggaatttagaanccgccacttgcctccctgatatcatccaatctt

SEQ ID NO: 726801 - DNA, 265 bp, Homo sapiens
gccacatctgccagagcctcgagtctgcgagggccgggacccggttccccggcccacagtggggggtgtgcaaacccgagagacctgggttgcaaattcgtgagagtcagcatcatgtttggcagctgcagtataggagccagaggcctcccatgaaggttttagaacagagtcctgttttaggagctggcagcagcatctaagccaaggggagggtattattccaggggatgtagtccaaggaccagctagctgccatcagttt

SEQ ID NO: 726802 - DNA, 204 bp, Homo sapiens
ggacggaatccacatgaaaaaaaccccacaagacaaagcaacatatctttgttgagaaggacaaaaaatgagagggataaacaaatgaggacaggccaggcatggtggctcaggcctgtaatcccaggattttgggacgcggaagcagtcaaatcacttgacgtcaggagctcaagaccagcctgtccaacatggcaaaacccc

SEQ ID NO: 726803 - DNA, 149 bp, Homo sapiens
ctgttgttgggacgggagcgagctggtccccaggtctcagtctggctgatcaggtcagcacaaagtcgcagccagcaagtactgccatgcgtccttgagtgcagtgacacagaccagccccgtgtggaggcgcctccatggcctctgct

SEQ ID NO: 726804 - DNA, 887 bp, Homo sapiens
  misc_feature (1)..(1): n is a, c, g, or t
ncatctatacagttatactagatatgccgccggatgcccttatatttcccgcaatgcgttcttcgcggggtttttcacagactcttcgttgtcgccacggtttttccccgcccgtcggattgcccttccccctcaatgttcgcgagtcctctacgcccccctgggagcccttatttaaatcatgttacggaggcaccttaaagacccgcttttggggaaaacaacgcgccaccttggggcccctccccggacagcctgtttgctaaccctgcacacgccgatccggggcgttttctactgcttccaaacccgccagcctgttcaagcgatatggcaccaccggggccgaccaacaatttactggtggggctccggacccttctctcggaacggggatctatcctggagttctccccttccccaagcactgcgtgggcggccccccccacaagttttctggcttccccggggcatgcaccaatacacgtgttccctctggttcggcccaaaaacgggtccccaccagcgcgagtttccacccacaccgagatgttgtacgaaggctcgccccccccttcggctgtctcaacgcgaggcgcgacgtcgttgccgctccccgtttgcccgcgtcaacaaccaggttcaacgcccttcatgcgccagatacaccacaccacccccctcatttgttctgggcccgactacacccccaagcccctttttggcgcctccaaacacccacatgtggctgtggggccccacgagctgtgtccgcacaacacccggctcggcccagaccacagatgcgctcccgggcaggtgggtgttggaaaatcctgtttttttgggggttttttttctcaaaaaaaatttcctcccccaacatc

SEQ ID NO: 726805 - DNA, 1074 bp, Homo sapiens
  misc_feature (110)..(110): n is a, c, g, or t
cggtgaaagcgaactcggtggtttattgcaatttttgtactctgtcccatgtaaatcggcaacggatggcttaccgatgcggggttagtggtgaaccaccttgcgtgacntcttagatcgatgcgtgcggtaattactactggcaaaatcctgcattgaatctgccaatctatcgttgtagaattactggtttagactcttatattgcattaaaggtgaatgcgtgatcacaagtattcccgacattgcgagggtgtaacaaggtgacctgcactgcaatagttgtgtcgttttcgtagcgttcttaataatgtcgtcaggagaaatagtcgaggagtgacatagcatcgggagtaagactagcttgaggcgatttttggaactactgtgtctctggatacccaattcagaagacgcagggggtgagacaggttcccagcacggaaggccaatggaagttattgcatctgctgaaagagcagctcgacgagatggggcttatcagatgtgaccttaagtgagaagggcactttgactggcgacgttaccggctaacgtccctggcgatatcccggcgagtggcttcatttctcatgtcggatacctcacgcggatggcagcgggaaaaatgtgaatccgcaaattgttgaaaactatcgcggtggccgatattgcgctgggtatcggcgatgacagttttatcagcgggttatgttcccggtgctgcatcaggtaatgggtcaaaacgctgattaacaccggatggtaaaaccttggtaaggttgccgatgacaaaacaggggatggagaaatcatgaacgggcctggcggcatgcgcaccagaagaacagattccccgggagggggggcatcacgcagggtcgcctttacccccggagtgaggcagctgtgcgcaaacgagggggaaaatattgtgcggtggagcctctcagttgcccatggaggtacaatagagcaaggccgctgcaaagcaacactcgacgtgtagaaatatcagaggcgagaatacagaaaacaaagcgagaagaacacaccggagaagagagcagaaaa

SEQ ID NO: 726806 - DNA, 106 bp, Homo sapiens
ttcatgataaggaaagagtgtgagaaaatggcataccagtgaaataaataagaggtctggtggcaagcggacaagagatgagtccgtcaaccccgaacacggaagt

SEQ ID NO: 726807 - DNA, 363 bp, Homo sapiens
  misc_feature (358)..(358): n is a, c, g, or t
gggacactgtatgttaaacagaactttgacacctgagtcttgagtctgaactgatccacacagctaagaaggcgcttgtatgccctcatctgtataacacacggaattgcacactgcacttgccgtgagaccgtagtaacaagactgcagatgtccgatttataccagcactggaatggactgccatactcccactgagatgtacactatggggctgaaatgcattctaagtatggtggctacaatcataaccagtctacacattgttacattcaaccatctttttagtagtgattcttaacttcagacttggactctagagcgtgcacttccaacttagtgggcactgtacttccgncagat

SEQ ID NO: 726808 - DNA, 422 bp, Homo sapiens
gctagtggtaagagcagcgtcgcagttgcaggcggcaggaagtacaaggcgggcgtaaagaaagtccgtccactacaaagaccgagtatgggtagaaaggagtgctgcagaaactgtaaccaaaggaggcataatgctaccagaaaaatctcaaggaaaagtatggcaagcaacagtagtcgctgttggctcgggtactaaaggaaagggtggagagatccaaccagttagcgtgaaagtaggagatgaagttcttctcccagtagtatggaggcaccaaagtcagtctagatgcacaaggattatttcatatcaagagatggtgacattcttggacagttcgtaaactgaaataagtcactattgaaatggaatcaacatgatgctgcccataccaatgaagttctgaaatctttcgtcat

SEQ ID NO: 726809 - DNA, 356 bp, Homo sapiens
ctaaaaatagtcaaaataaaataaaatagagatggggtctcgctatgttgcacagattggtctggaactcctgggatcaagcaacactcctgcctccgcctctcaaggtgttgggattgcaggcatgagccactgtgcctggtcaatggtgatttttaatctcttaagcatctaccaggtgtcaggcccttgctagaacgtccaatacttccaatgatcccaacagctctccaggggaggatgaacaagctcattttactgatgaggaaactgaggctgagagacttaacgtaatcccagtttgaccacattagaacacaggaattaaagaaaaatttgggaaagcctggagcatt

SEQ ID NO: 726810 - DNA, 132 bp, Homo sapiens
  misc_feature (7)..(7): n is a, c, g, or t
  misc_feature (130)..(130): n is a, c, g, or t
ccgtggntgcacctatcacagacttgaaattgtatgcctcagctttctctgaaagataccttgggatgccatctaaggaagaaagcacttaccaggcagccagtgtgctacataatgttcatggcttganag

SEQ ID NO: 726811 - DNA, 682 bp, Homo sapiens
cgccgccccttggtttctgggaagggccctctttcccgcctcttgtgggagatctcgctatttggcgccccccacgagaagaattatatgggaaccgcgcctttccagaaaatatatgagaagctccgcctatatgggagaaacacacggttcacacccccaactgggccacagactgctatagctggagccacatgcttacacagccccttagccacgagaggtgttctaccccccgtggaggccaggcctctcactgcctctcgctcacagtcacgtgcacgctaaccccccacgactgcccggcacagtggctgggttttcccaccacgaagtggtgttctagaatttatcacgagttacgaggaagacccaaactccggcacactgggtttgctcccctgagttataaagtggccttcacgccccaagagccactctttccctccctggtgaagatgtgacattcgaatatagatttgcacattccttattggaaggttagagccccctgctccattgtcattaagccccgaggccttggagtggccaacccagagcccaactgaagacccacctctctgcctgttcctcccacagaggcccgggtggccacggggtggtgagggccgttctgcacccagcccaacacattaccattaaaacccaacttctgtgtcca

SEQ ID NO: 726812 - DNA, 1009 bp, Homo sapiens
ccgcgtcgtgtccgctgggggcctcctcgccggctgcgcggtgaagtgatcatctgctggaccgaccgatccatccttttttctcgaacggtggcccgggggggtggagtgtgcctgcgtctgtgggccgaacactgggtgtgtgcatgggtgtcgagagccgcccggctggtcggacgctcgttgcgcggaacaagggtgctggggggggagagggttgctcagaccgccttgctccccacgcggttgtgggatcgaggccgcgcccgccccccagccttttttttttgtgggaggaagcgcaccgctgtgtcggcgcgagaccacaggggtggttgtgccccccttgttattttgccgtctgtaaacaattgcaccgcctcgtggggtggaggcaccgccgccacaccggcagggggagtggttgtttttttctgtgacgatggcgagaagtggtttgttcagcgacggctttttttttggggcgagcgtccacccacaggggggcccccctgctgtgtgtgtgtggttgctcgctcgcacccctccccacgacagcactggtgtgggggccgacgcccccccccctgcgtggtaggagggggtgtcctccccctcccccccgcgtggtggtgatctcttcggagggggtgtgttgggggcgcgccctcccctccctccccgcctgccccccctcttctagagtgggcgggccccccttctcctccgtgcgcggatccccccgcgctcctatagatgatgggcccgccgtgtgttgtggagggcggccctcgcaggctcccccccaccccggtggtcccccctccgtggggggcggccacccctttctgtgaacgatgcggtccccccctgtagcggcggtggctttttttggtcttttttcccccccgcgcgggggccagagggtccccccccccccccccttcttttttttttttttgtgtttttttttttttttttttttttttaatcctttgtggtggggaga

SEQ ID NO: 726813 - DNA, 874 bp, Homo sapiens
ggacgttccgggagcgccggtgttagcgtcggcggttttggcatggcgactttttctggcccggctgggcaattcctgtcgcttattccgcagaagatgtcgagtttcacacacggagggtggcactaggttcgcaaggcgcttaacccagcgaaaaataaccaatgaacaatttactccgtggagtagtctatgtgcgccaaccatacgcgtaaacctacttgacgaaaacgccagatctttgcatattgctcccagtttggcactgtgacacggtgcaggcttgtccacagaagtacagggacctggaaattatgcaacaggtgaatgcatcggtcgggagttggagtctgacggaatgttgccacgaataagttgcttggtatccaactgaagcaaactacctgttgtggtgaaagaactcttgggagtgtcagtttaagtgccacctgacataagtacataaagaactctttaaagactgaattatccatttaaggcagccatcatagtccatcaagtgagaggagtatgaatccgggaactcggggagacctaacaacgaaaaaggctaacgggcagtgggtgggagcgattttcaacacaggaaagtgagatgatttactcagggtacgcaaattcaggcttagaacaggcatttgaccttatgactcttcccttcttgtgcatttacaggaacaccgggccaggtatgtgcacaaactaatcgtgagacgttacgagagggcaaggtatcacgtccgcacgagaacacaagtgccgggaactctgcccaccctgagaagagttggatggccagcccacacagtggtcccaactttgggcagcgaactccacggttactgctctgtgc

SEQ ID NO: 726814 - DNA, 124 bp, Homo sapiens
tcggctcattatggatacacttaaaacgaatctcaagagggggaccattgtgtttcagataccatccctaaggagagtggttaacaggaagattgccagtgttactgaagaaaagagtgcttgg

SEQ ID NO: 726815 - DNA, 449 bp, Homo sapiens
tgggcatgtcccatgttcgcataaccactctactaggcgtggagcgatgtatagtgttccctggaagagacttaccttatgtcgggacgtacgggatcctagggagtccctggagacagagtaatgggccctcatccgataacttgcgagtggaggtataggggttgtggtatcaattttttttcctacaaacagtattattaactgccagcgcttaacccagaagtcatccactgcagagggattaaagtgcagatataaaatgctctcaaaaacttgtaacatgcatgggcgcgggtgggacgttcctctggactgcagaatgaataaagtgttgaatcctttggcatttgaaatcaagtaagtatgtttgggaagcagactactctttccctcatccaggtgtttaacatatccttatagtgctccgggatatatatctctggggc

SEQ ID NO: 726816 - DNA, 187 bp, Homo sapiens
ataaaaaaccccggggccgtttcccccttcggatttttgctttggccccgggggggtttccctttttcccccgggacccgtttttcccctttggccttttttggttccccttttgacccatttttttccaaaaacccggttggtcccggttcggattttccggggtttttttcccccccgggttcca

SEQ ID NO: 726817 - DNA, 152 bp, Homo sapiens
gccatgagcagatctgccactatgagctagcctcataggcgctcccagaacccacaacatagaaagaaatggtgctacccagctcaagcctgggcctatatgaatctaggacacaataaccctactagcttgcgacactgaatactgctagc

SEQ ID NO: 726818 - DNA, 731 bp, Homo sapiens
ctctatactaatctccctaaaaatctccttaatgataatatacacagccacgagaactagtcgatatttatgatctacttcgaagaaccacagttatccccaccttggtatcatcacccgatgaggcgaaccagccagaacgcctgatcgcaggcacatacttccttgattctacaccctagtaggctccgctacccctactcatcgcagtaatttacactcacaataccctaggctcactaagaacattctactactacactcacactgcccaagaactatcaaagtcctgagccaacaacttagatatgactagcttacacagatagtcgttataagtagtaaagatacctctttacggactccaacttatgatccctaaagccgcattgtcgaatgcccccatcgctgggtcaatagtacttgccagcagtattcttaagaactaggcggctatgatataaatacggcctcacagcgtcattcgtcaacccccctgagaaagacacatagcctaccccttccttgtactatccctatgaggcatacgttagtagcaaagctccatactgcctacgaaaaacagacgtaaaatcgctcattgcatactcttcaatcagccagatagccctcgtaaataacagccatatctcatgccaaaaccgctgaagcttcagcggagcaggcaattctcataagtcgccccaacgggcttacgatcctcattacta

SEQ ID NO: 726819 - DNA, 957 bp, Homo sapiens
gaacttgatgacgaaggaaaggtcatcaacagatataactagctgaaaatcctaaagagttagtctcacatcccagttcagacttggaaaggatagtctccagattcccttttcagaggttggttctcatcccttggaggatttaaaaccttagtacaaatagtcctagccatacttggcgaggtttgccttatactcccagggtctcttacccctcattgtcaaatacatatccaaacagcctatagaggctcttgtggacagacaggactaccacacgactaatggccctaactaagtattgaacccctgccacgaccaagagctacttcctcttgaagtacacatcgaagatacgtgatgctttctcttaaactttcacttcataatacacatgcatctaagaggcggggcaatgaagcacggaaatataagaacggaaaaacaagtaaagggaatacaagtcctttcctgaccagtctgactcactccaaagtcctgctggagctatgataattatctgctaaggccaggcaggggctccgaaggagtgggctccaggagcagggatgagaaaaacaagttctccttatcagtttccctgtttgaaattctctccccataacattattcttggttctgctctcacaacgtattttgtgtaactatttctgcaagtctgtaaaggatttggtaagtccttggttcgctttctgtagcaatggcaaggtcacaagacatgtctaagtaaggtaggctcatgttgcaaatcctgtgtcaaacctgtcaccggtatgattaactgccttttgtcctgcttctggtaagacttgcttttctcacctcgcaggttttgcgccaagaacccgacttgcccttgccttgatgcatgtttcaccagtcaagccctgtcttggtcccagggctcaggccttggcatgttatcccgctgggcca

SEQ ID NO: 726820 - DNA, 1817 bp, Homo sapiens
  misc_feature (1088)..(1088): n is a, c, g, or t
  misc_feature (1542)..(1542): n is a, c, g, or t
gccccttccgatctgcgtgttgttctgcaccgcggctcgcttgctcgggagggtggttgttgctcccctcctctgtggtatcctttgtggctccatcgtaggccgcgggttttgcttggcgggagggggtgcgaccacacgatgttctccctctctgggtttcttccctcggatgggctggtgctgtctggtgggaggtgagcccaccctggggctcgcctattgctcaccgaggggggggactcgtgcggggtcaaccacccttcttctccccggggtgcatgttgtgggtgcgcccgcgagcgcgttgtatttgtggttgttgcggtcgcgcacgccgtgttgctgtcggggacacagacgagggagcgtgctccatctcgatcgtagtgttatcccgtgctccccctgggtggcacccaacatgggtggggttcgcccggctccagcttgtggaagagggggggtgtttttggtgtgtgtccccccacaatggtgcgccgcccgctttttcaacccgccctccttcggtgagtggataattttgtggggggaggtcgcccccgcgtggttggtgttgtgccgccgccccatcggggtgctcctcctgctgcgtcgtatgtgtcggctccccaccattttctgtctatggggggcgcacttagtctacctttctggtctcctcggcgcaccgcttccgcggaatgttgtgcttctcctcttttggtgagaagcaccctcctgtgagagatttccagctcctgcggcggagaagcccatctgttgttgttttccgccgcttcgtgtgctctgctagaagaatagtctgcgtaggagaagaggaaaagtgatcatagaggagcgtccttctgcaatcaggaagtttattaggtagtattattaattaggaggaagcaggcgcgagaggcgctgtcatgtacttcgtcgtctgccagcaggcaggtcgttcggtctccatcagccagctcccaacatgctggtggacgcccaccagcttggtggacctcatcccccggcggcgttgcttcctctgctggagatgagctgggttgttctgtcttcttgcntcatcaccacagcggcttcgtgggttgatgacagaaggtggcgttgtgtagggtagcacacctgctgactctgcgccctcctgtttgtgtgttgtcgcgagactctggagagaggaggccacacagagagcgtgtgtgtgtctccttgccccctttctcccctttgttgagaccttgtaatagagaaccccctgagacctgtgtggtgttgtttgctgctgctcacacaaggcgcgacaccgcatgctcacactgtgtgtgttctgctgtgtgtgtgtctcgcctggtatagcgccacatatatatgtgtgagaggagagggtgtgcggagagagctcacaccgccacccgcgccacatggtctcacaccacatgagcccgctctcttctccacaccgcgtgagaccactgtgtgtcgctctccgctctcccacacattcactgtctctgttcnctcgttgtgtctcacgcagagaagagttgcgggcctcgagaggtggttctcccacttcttctcgttctcacaacttccatggggcacctcgagagctcgtgaaacttgttttcctctccctccattataaaattagaacacctcgaggtgatataaatttatctctttctcctaaatttcttgcccctcgaagaaggttgactgagttaaattaaaaggagaaaagagtttccttaaaatttgagagacccacaaattaatggaccccctgagga

SEQ ID NO: 726821 - DNA, 263 bp, Homo sapiens
agaggatccccgcttcaagtgatcctcacaagaaggcccactggaaaaaagactactggctgggcatggtggctcacacctgtaaccccagcactttgggaggctaaggcaggtggatcaggagatcaagagatggagaccatcctggtcaacatggtgaaaccccatctctactaaaaatacaaaaattagccaggtatggtggcacgcacctgttgtcccagctactcgggaggctgaagcaggaggatcacttgagccca

SEQ ID NO: 726822 - DNA, 290 bp, Homo sapiens
aatcttctattctagaattttgcatgcttgtgaagtttttagaaactgcatcatcattaagcaattaactgtggaaatgactttaaatagttatagttaaagacaattgataaggaaatttggttatctctgtggtctacaataacttaataaccataattagggtggatgtggtggctcattcctgtaatcccagctctttgagaggccgggttaggtggatcacctggggtcgggggtttgggaccagcctggccaacatggtggaactctgtctttgctgaaaataa

SEQ ID NO: 726823 - DNA, 219 bp, Homo sapiens
aagtaaggtactcagtcaacaaacgtcactctatgcactgaagaatctcagctcaccaagttcaaactctcttcttgacgtccaggaactggtattccatcactgcggcaagcgcagagctgaagttccataagtccacaagaaagtctgacaatgggtgtgtctgaccgacctgagaggcctgaacctgggtttcaactggaaaatgcctggcattat

SEQ ID NO: 726824 - DNA, 416 bp, Homo sapiens
acctcccggcttcacaccattctcctgccgcagcctcccaggtagctgggactacaggcccaccacgcgcagctaattttttttgtatttttggtagagatggggtttcgccgtgttggccaggatggtctcgatctcctgatctcatgatccgcccgcctcggcctcccaaagtgctgggattacaggcgtgagccaccgcgccgggccactcatttttaaataattaataattaacttagggaggaaaagatattgacaggatcttgataaatagctaatacattatacaggtgaggagtgtcacttctagctggggtggtcagagaagacttgggagaagaacatgaaacttctatgggctttacagagtgggaaactatgagtagcagtagacaagggaaacaccggggatc

SEQ ID NO: 726825 - DNA, 415 bp, Homo sapiens
atacataccgttcaggcttgagtgtctttgacgaccagcgtctgccagtctctatccaggttgttgcgcgccgccggcgtcacgcgcaaggccttgagccatagtgaaaaagggcgttgccggtcgctttgaatactgtcgagcacccgcgcacgggtacgctcgcctaagccctctatggtagcaagctcggccgcatcaagtgtcaaccaatcgagaaagcctgcgattagaccggcctggatcaatacgttccaggtttcgcgccccatgtggggcaaggccaggccgtgtttaccgctcagccaggtgaggcgtgcgagcagttgatcttcgcagccagcgtccagttgccagcagctcaaggcgtgtaaggcttgagcgatgggtacctgcacgtccacgcgtgtctcgt

SEQ ID NO: 726826 - DNA, 269 bp, Homo sapiens
aaaaatacaaaaaattagcctggtgtggtgatacacacctgtagtcccagctattcaggaggctgaggtgggaggatcacttgagctcaggaggttgaggctacattgagccaagattgtgccactgcactccatcctgggtgacagagtgagaccctgtctcaaaaaaagaagaaaaattctgtgatatttgttactgtcctaatctgagttgagatgaaaatatgcagtatatgatatagctacattatgagactatcatgtcagaa

SEQ ID NO: 726827 - DNA, 675 bp, Homo sapiens
  misc_feature (183)..(183): n is a, c, g, or t
ctatggaggtggggggggggccaaggaaatctatcagtttcccaagctttccccatcaccatttgattgatctccttaccctgttatttccccttcttgtcgcttacctgcagcatctttcccacccaggcctgccttattctttctaatggaaagcatgttttttttgggggggggccccgncccccctcttgctcttcctgaacgctccccccccgtcccttcgccgggcggcccggcctttatggttcgtttttttgtgttgtttgcccctctccccccttcctcgcctccaccctttcacggttcgcccctttctctcggcttctttctgcgagttttcttgtttttttattttgttttttttcttttcgtttctctctttctccctccctctctcatctccttccctcctcccctctccccccgtcccccctccccctcttcatcctcttttcttttccacatttctcgtccttcgttgtctttcttctttcttcctgccctgcctcccgtgccgtcgcttgttgtgtcctgaatttacctccttacttcttttctctcttctcacacctccttcctgtctctatcacccccttctccatcatctctctgccttctcccgaccgctttcattgtcagtgttcaaatcatccgatattatatataaataat

SEQ ID NO: 726828 - DNA, 567 bp, Homo sapiens
  misc_feature (465)..(465): n is a, c, g, or t
  misc_feature (563)..(566): n is a, c, g, or t
cctccccccaaatccccagccccccctaaggatggtccttgtcccaggcaaccagaaaatgtttttttgggccttccacaacccaagagggtttggtttgcttcaagacttccccccccccagaaaatagccatccattcttaacttattcccaacccaaatagggttcaactccaattgagggttataaccaatcccatttcttttctggttattataaccaaaaaatctttcctcttctcattaccagaaaaggctcttggtatctttctgttggaaagatttctaagaacctgtcttattttaaaggggggttttttttctggtaaaatttaaacctaaatcgcctcatgcccacttgtggctttgagactattcatcaagaatgaggatatagtagccctgacatagcttgagctaaagcctttaattccctactttggctatgggtggagggtgagtttnaaaaggtttttattttcttgtaacctgggaaaaccatgaccttgggccccattctttcaaattgctttgggtaataaatattggtggtggtttttttnnnna

SEQ ID NO: 726829 - DNA, 407 bp, Homo sapiens
cctgtgggtcaggctgttcttgaactcctgacctcaagtgatctgctcgccttggcctcccaaagtgctgagattacaggtgtgagctaccacaccgggccaggggtagtttttctttcttttttttttttttaaaagagggggggtctcattatatggcccatgtgggcttgggtctcgggggtccaggtgatctttgggcctcagttgcctaaccacaattttaaaggtgcacatttccttcataatcaagatcctttcatctcctttcttggggaaggtcatctatcattaaaggggcggctatccaggggcttttctcatagggggggatgggcggacgatgctggaagaaggggtaaaatatttgacggataaaaattattttttttggagacccggtctcc

SEQ ID NO: 726830 - DNA, 423 bp, Homo sapiens
  misc_feature (24)..(24): n is a, c, g, or t
  misc_feature (74)..(74): n is a, c, g, or t
  misc_feature (78)..(78): n is a, c, g, or t
  misc_feature (140)..(140): n is a, c, g, or t
  misc_feature (190)..(190): n is a, c, g, or t
  misc_feature (199)..(200): n is a, c, g, or t
  misc_feature (202)..(202): n is a, c, g, or t
  misc_feature (204)..(204): n is a, c, g, or t
  misc_feature (234)..(234): n is a, c, g, or t
  misc_feature (260)..(260): n is a, c, g, or t
  misc_feature (294)..(294): n is a, c, g, or t
  misc_feature (309)..(309): n is a, c, g, or t
  misc_feature (412)..(412): n is a, c, g, or t
tgtacaggaccgagcgggtggggngtgtgcacggggacgggggagagaagttgcccaatcacgccacgagcgtnggcnttcagggatgcggctcgcgcgtaagcatgagggtataggtgcgcaggcgcgggcagttcgcncggaaggcgttcagcaccgagtggcttaccacgcagaaacaatgcacctngcgcagggnngngnagcgccgccagctcctccagcgcggcgttnagctcggccgaagcggctgccgcacnttgagcgcgcacagggttgcggggtagtggtgtnctgcgaaggacaccnggggcctacggtgtcgcctgagaggttgaggcgcaggcagccaaggggacggctggctgcaggacgcgcgttacgctctcagcgggcagcgcgggctccagcnccagctccact

SEQ ID NO: 726831 - DNA, 856 bp, Homo sapiens
  misc_feature (30)..(30): n is a, c, g, or t
agaatagcctgaacccgggaggtggaggtngcaggttgcagtgagccgagatcatgccactgcactccagcctggcaacagagcgagactctgtctcaaaaaaaaaaaaaaaaaaaaaaaaaaggtacttgggggtttcccccggggtagggccctccagggggtttaagggggtttcccgggcgaaggcatttccagggggttgggcatccactcaaatttaggggggaaggaaaattatctctccaaatttaaaataaaaccctttatccaagaaaaatacccattccaagaaatccggcgagtcccttacccagggtgcctctaaaataaccttctcgagggaacattggggaaacaatcagtgtcgttgtcaattggcaacacctcaaattcttgtaattctctccaaacattaagcgcgcggaaggggtacacacgtgcgtgggggtcactaaaacagccacagccttataactttaggggggggtgtcctcctcctacgggagggggagggcattattaaaaacgtgggcgacacacctcggggttttaaatatcattagggtaattacccattaggtaccttattaaacccttttatcaaagttgggtctattgcggcacggggtggtaacccggcgggttatcaactcaaaggcctagtaggagtaccatatacacggacagcaacactacaacgtttcacaacatctggtcggggtcagggacacacagatacttttcgaattaaccgagggctccactacgaacacatagggacacaggggtcaggattccgcgaatcccattgtgggccaaatgtcgaccgcacaactgcgcgtcacgatcatag

SEQ ID NO: 726832 - DNA, 673 bp, Homo sapiens
gcaattttaaggataaaaactaacattggccaggcacggtggctcacgcctgtaatcccaacactttaggagaccaaggcgggcagatcacttgaggtcaggagtttgagaccagccaggccaacatggtgaaacttcatctctactaaaaatacaaaaactagccaggtgtggttctccagtgcctataatcccggctactcgggaggctgaggcaggagaatcacctgaacccgggaggcaaaggttgcagtgagctgagatcgtaccactgtactccagcctgggcgacagagcaagactctgtctcaaaaaaaaaaaaaaaatacaattaagaggggtatacggatgattcttcccactcattggttggtccagaagtaaataacatggtcggaagttgccaagtacctattggtttttgggggggtttctaagttagagtctggatctggtcacccaggctggagtacagtgggcaggatctcagcttactggagcttccatctcccaggtgtcaaggcgatcatgtggccaaagcctcctgagtagctgggatcacaggtgtgtaccaccacgcccagcggattttcggtcgttaccagtaaagacttcgccaggtgtccaggcatgtctcgaacgcctggcctaatgatctgccaaacatcggcta

SEQ ID NO: 726833 - DNA, 302 bp, Homo sapiens
gcaaccacattttttttttttaaacggcgttgggctcttgtagcccaggctgaagtgcaatggcacaatctcagctcactacaacctccacctcccgggttcaagcaattctcctgcctcggcctcccgagtagctgggattacaggtgcccgccaccatacccagctaattttggtattttaagtagagatgggatttcaccatattggccaggctcctctggagctcctgacctcaggcaatctggctgcctcaggctcccaaaattcaaggcgtacagatgttgaacaaccacgcccgt

SEQ ID NO: 726834 - DNA, 158 bp, Homo sapiens
ccgccgaggccagaagcggtgagatttgcacagtatttcaacacacccagctctgaacagacaaaacaatacctggggaggggagaccacaagagaatgttgcccaaagtgaaacaaatccacccaacaccttcatgtgactaacgtcacggtacacc

SEQ ID NO: 726835 - DNA, 2520 bp, Homo sapiens
  misc_feature (63)..(63): n is a, c, g, or t
  misc_feature (66)..(66): n is a, c, g, or t
  misc_feature (72)..(72): n is a, c, g, or t
  misc_feature (74)..(75): n is a, c, g, or t
agcgggtttcttaccgtaggtttctccctgttgaggcgaacgagctaaatgacctctccgggnggnggcggngnnctggccggggcgggcggcgcgggggcggcatgagggcccgcggcccggggggctgaggcgcccgccgcctgccgcgggggccgctcgcgtcctccatggaggccggagaggaaccgctgctgctggccgaactcaagcccgggcgcccccaccagtttgattggaagtccagctgtgaaacctggagcgtcgccttctccccagatggctcctggtttgcttggtctcaaggacactgcatcgtcaaactgatcccctggccgttggaggagcagttcatccctaaagggtttgaagccaaaagccgaagtagcaaaaatgagacgaaagggcggggcagcccaaaagagaagacgctggactgtggtcagattgtctgggggctggccttcagcccgtggccttccccacccagcaggaagctctgggcacgccaccacccccaagtgcccgatgtctcttgcctggttcttgctacgggactcaacgatgggcagatcaagatctgggaggtgcagacagggctcctgcttttgaatctttccggccaccaagatgtcgtgagagatctgagcttcacacccagtggcagtttgattttggtctccgcgtcacgggataagactcttcgcatctgggacctgaataaacacggtaaacagattcaagtgttatcgggccacctgcagtgggtttactgctgttccatctccccagactgcagcatgctgtgctctgcagctggagagaagtcggtctttctatggagcatgaggtcctacacgttaattcggaagctagagggccatcaaagcagtgttgtctcttgtgacttctcccccgactctgccctgcttgtcacggcttcttacgataccaatgtgattatgtgggacccctacaccggcgaaaggctgaggtcactccaccacacccaggttgaccccgccatggatgacagtgacgtccacattagctcactgagatctgtgtgcttctctccagaaggcttgtaccttgccacggtggcagatgacagactcctcaggatctgggccctggaactgaaaactcccattgcatttgctcctatgaccaatgggctttgctgcacattttttccacatggtggagtcattgccacagggacaagagatggccacgtccagttctggacagctcctagggtcctgtcctcactgaagcacttatgccggaaagcccttcgaagtttcctaacaacttaccaagtcctagcactgccaatccccaagaaaatgaaagagttcctcacatacaggactttttaagcaacaccacatcttgtgcttctttgtagcagggtaaatcgtcctgtcaaagggagttgctggaataatgggccaaacatctggtcttgcattgaaatagcatttctttgggattgtgaatagaatgtagcaaaaccagattccagtgtactagtcatggatctttctctccctggcatgtgaaagtcagtcttagaggaagagattccacttgcacggcaacagagccttacgttaaattttcagtccagttatgaacagcaagtgttgaactctttctgcttgttttgattcaaagtgcagttactgatgttgttttgattatgcaactaagtaggcctccagagcctctctagtggcagagcagctcacactccctccgctgggaacgatggcttctgcctagtacctatccttgtgtttctgatgcagtggtagcattggttcaagttctctcctgctgtggtcagagttgcttcgatgttggccaagtgcttttcttcttgggctcccttctgacctgcaggacagttttcctggagccatttggtatgaggtattaatttagcttaactaaattacaggggactcagaggccgtgctcctgaccgatccagacactattactggctttttttttttttttttaacaatggtgtgcatgtgcaggaaatgacaaatttgtatgtcagattatacaaggatgtattcttaaaccgcatgactattcagatggctactgagttatcagtggccatttattagcatcatatttatttgtattttctcaacagatgttaaggtacaactgtgtttttctcgattatctaaaaaccatagtacttaaattgaacagttgcaaagatgtcttaattgtgtaaagaattggtgtagtcatgactttagctgatactcttatgtacgagatctgtctctgctgtttaacttcattggattaatcagctggtttcaactctactgcgaaacaaaaatagctccttaaaagtactgttctccttcagtggcatgtagttatctaatcaagacacctcattcaaacaaaacctgccttaggaaaatttaatatattttaaattattttaaaagaaatacaacatcttattctttagctttc

SEQ ID NO: 726836 - DNA, 579 bp, Homo sapiens
cggacgcgtgggtcgacccacgcgtcgcggacgcgtgggaaggctgaggtcactccaccacacccaggttgaccccgccatggatgacagtgacgtccacattagctcactgagatctgtgtgcttctctccagaaggcttgtaccttgccacggtggcagatgacagactcctcaggatctgggccctggaactgaaaactcccattgcatttgctcctatgaccaatgggctttgctgcacattttttccacatggtggagtcattgccacagggacaagagatggccacgtccagttctggacagctcctagggtcctgtcctcactgaagcacttatgccggaaagcccttcgaagtttcctaacaacttaccaagtcctagcactgccaatccccaagaaaatgaaagagttcctcacatacaggactttttaagcaacaccacatcttgtgcttctttgtagcagggtaaatcgtcctgtcaaagggagttgctggaataatgggccaaacatctggtcttgcattgaaatagcatttctttgggattgtgaatagaatgtagcaaaaccaga

SEQ ID NO: 726837 - DNA, 1059 bp, Homo sapiens
  misc_feature (63)..(63): n is a, c, g, or t
  misc_feature (66)..(66): n is a, c, g, or t
  misc_feature (72)..(72): n is a, c, g, or t
  misc_feature (74)..(75): n is a, c, g, or t
  misc_feature (1039)..(1039): n is a, c, g, or t
  misc_feature (1041)..(1041): n is a, c, g, or t
  misc_feature (1045)..(1045): n is a, c, g, or t
agcgggtttcttaccgtaggtttctccctgttgaggcgaacgagctaaatgacctctccgggnggnggcggngnnctggccggggcgggcggcgcgggggcggcatgagggcccgcggcccggggggctgaggcgcccgccgcctgccgcgggggccgctcgcgtcctccatggaggccggagaggaaccgctgctgctggccgaactcaagcccgggcgcccccaccagtttgattggaagtccagctgtgaaacctggagcgtcgccttctccccagatggctcctggtttgcttggtctcaaggacactgcatcgtcaaactgatcccctggccgttggaggagcagttcatccctaaagggtttgaagccaaaagccgaagtagcaaaaatgagacgaaagggcggggcagcccaaaagagaagacgctggactgtggtcagattgtctgggggctggccttcagcccgtggccttccccacccagcaggaagctctgggcacgccaccacccccaagtgcccgatgtctcttgcctggttcttgctacgggactcaacgatgggcagatcaagatctgggaggtgcagacagggctcctgcttttgaatctttccggccaccaagatgtcgtgagagatctgagcttcacacccagtggcagtttgattttggtctccgcgtcacgggataagactcttcgcatctgggacctgaataaacacggtatgggaagtgaaggaactactcggcaactccaaaaatactgtatttgctttctccactttaccagtgtcatttttatctaaaacagtgtttcttgatgtttttttctgtgattgccccttaaggagccttttagacagttttttcctaatcgcccctgcccgccccaaagataatactataccaaatagagtttaataccgaacatatactgtgtgtctatttaggctattttaatatcgaagatatattgtatatctacttatgtgctgaatgcatgtctatgctttgtatgtaaaaaaatgttaanantttnttggctaccaaaaa

SEQ ID NO: 726838 - DNA, 295 bp, Homo sapiens
gtgcatttccaaaggagtagcagggcctgtggtggacccagcagaaccacaggagagtgccttgcctgtctcagtggaagtgtcttattgtcttaaggatagaaccagaggccctgaaggcagccacgacataactcccagcctgtgtaatctactggaaggcacattctcatttttgatgcagccaatttgtggaggcagcttttatcctttctctctgctgatatgatgaagtaatagggttttttttaacctctcgatgtctcgtctgtggatgaaaaaaaagtggcggccg

SEQ ID NO: 726839 - DNA, 505 bp, Homo sapiens
acaaaattttaaacagtggcaagacagaactgctaacaagaagggtctgatttacaattcattagtttctttgcttcaagaatgaagcctcctgtcctaaccatccttaaccccaaagcaggctaccttctccacagcttctcagctgggggataatgtaagttacctctatgcacaaacaagtgtatctctgtcaggatatcatgcagtgccaaccccttcagagttttcaactctgtaatatctagaggagcagttaaggcaaagggaacaagttccagaacaaacatactgcagagaattttgaatccaaacccgggcaagagactttttaaagtaaggcttttaatcccaacacaactgtttctctttcaacttgaagctgcacgtgttggactccaattctttatttttctttgtttcatcttcagtaagggctttctgaaagatagagttgtaactccttctagtagagaataaagccaactgcgttttcttttaaaaa

SEQ ID NO: 726840 - DNA, 5419 bp, Homo sapiens
  misc_feature (63)..(63): n is a, c, g, or t
  misc_feature (66)..(66): n is a, c, g, or t
  misc_feature (72)..(72): n is a, c, g, or t
  misc_feature (74)..(75): n is a, c, g, or t
  misc_feature (5083)..(5083): n is a, c, g, or t
agcgggtttcttaccgtaggtttctccctgttgaggcgaacgagctaaatgacctctccgggnggnggcggngnnctggccggggcgggcggcgcgggggcggcatgagggcccgcggcccggggggctgaggcgcccgccgcctgccgcgggggccgctcgcgtcctccatggaggccggagaggaaccgctgctgctggccgaactcaagcccgggcgcccccaccagtttgattggaagtccagctgtgaaacctggagcgtcgccttctccccagatggctcctggtttgcttggtctcaaggacactgcatcgtcaaactgatcccctggccgttggaggagcagttcatccctaaagggtttgaagccaaaagccgaagtagcaaaaatgagacgaaagggcggggcagcccaaaagagaagacgctggactgtggtcagattgtctgggggctggccttcagcccgtggccttccccacccagcaggaagctctgggcacgccaccacccccaagtgcccgatgtctcttgcctggttcttgctacgggactcaacgatgggcagatcaagatctgggaggtgcagacagggctcctgcttttgaatctttccggccaccaagatgtcgtgagagatctgagcttcacacccagtggcagtttgattttggtctccgcgtcacgggataagactcttcgcatctgggacctgaataaacacggtaaacagattcaagtgttatcgggccacctgcagtgggtttactgctgttccatctccccagactgcagcatgctgtgctctgcagctggagagaagtcggtctttctatggagcatgaggtcctacacgttaattcggaagctagagggccatcaaagcagtgttgtctcttgtgacttctcccccgactctgccctgcttgtcacggcttcttacgataccaatgtgattatgtgggacccctacaccggcgaaaggctgaggtcactccaccacacccaggttgaccccgccatggatgacagtgacgtccacattagctcactgagatctgtgtgcttctctccagaaggcttgtaccttgccacggtggcagatgacagactcctcaggatctgggccctggaactgaaaactcccattgcatttgctcctatgaccaatgggctttgctgcacattttttccacatggtggagtcattgccacagggacaagagatggccacgtccagttctggacagctcctagggtcctgtcctcactgaagcacttatgccggaaagcccttcgaagtttcctaacaacttaccaagtcctagcactgccaatccccaagaaaatgaaagagttcctcacatacaggactttttaagcaacaccacatcttgtgcttctttgtagcagggtaaatcgtcctgtcaaagggagttgctggaataatgggccaaacatctggtcttgcattgaaatagcatttctttgggattgtgaatagaatgtagcaaaaccagattccagtgtactagtcatggatctttctctccctggcatgtgaaagtcagtcttagaggaagagattccacttgcacggcaacagagccttacgttaaattttcagtccagttatgaacagcaagtgttgaactctttctgcttgttttgattcaaagtgcagttactgatgttgttttgattatgcaactaagtaggcctccagagcctctctagtggcagagcagctcacactccctccgctgggaacgatggcttctgcctagtacctatccttgtgtttctgatgcagtggtagcattggttcaagttctctcctgctgtggtcagagttgcttcgatgttggccaagtgcttttcttcttgggctcccttctgacctgcaggacagttttcctggagccatttggtatgaggtattaatttagcttaactaaattacaggggactcagaggccgtgctcctgaccgatccagacactattactggctttttttttttttttttaacaatggtgtgcatgtgcaggaaatgacaaatttgtatgtcagattatacaaggatgtattcttaaaccgcatgactattcagatggctactgagttatcagtggccatttattagcatcatatttatttgtattttctcaacagatgttaaggtacaactgtgtttttctcgattatctaaaaaccatagtacttaaattgaacagttgcaaagatgtcttaattgtgtaaagaattggtgtagtcatgactttagctgatactcttatgtacgagatctgtctctgctgtttaacttcattggattaatcagctggtttcaactctactgcgaaacaaaaatagctccttaaaagtactgttctccttcagtggcatgtagttatctaatcaagacacctcattcaaacaaaacctgccttaggaaaatttaatatattttaaattattttaaaagaaatacaacatcttattctttagctttcttaatcggtgctttatggaggccagtgtaacgttacatgactcgttgagaaagttgaggaatttcctctaccacctttgttgcttgaagaaaaacatgtcttttcaaaatgagaggctttcattgaagaaaagaaaaaaacaacagttaaaagcttttggctctctgtttcatttttttccattaagaaaaaaaaaagtccccttttaaaacaagcagggctgggtgtgacggcacatgcctgtaatcccagcactttgggaggctgaggtgggaggactgcttgagcccaggagttcaagatcagcctgggcaacagagtgagataagacccaatctttatttaaaaaataaataaataaatagccaaaaaaacttagtgtggtgctggtgtgcatggtagccccagctactcagggggctgaggatgtggtggcatttacctgtggttctgtggttccggctactcaggaggctgaggtgggagaactgctcgagcctgggacatggaggctgtagcgagccacgatcgtgtcacggtattccagcctgggtgactgacagagcatgatcttgcctcaaaaaataaacacataaaacaagtagtacagcagaagagctgggaatggattggccaacgtttacatttcatggttatcttgaagttccaggtacagcagatgctgagcctctgggtggtttgaggcctggttggccatcagatatttagcttcatactttgccgctgtccttaagggggtgagtcctccatgaacaaagggaatagtgactttttccatttgacagtttaagaatttgacattttttaaagaacagcatctaaagaaagtttattctgtgatattagagacagaaggttttcatataaatgcaagtttgacaaagtcagcatctttctagctgtctaaggaagagtcacttgtaacacagccagccaggaggctgctttgttttttattataaagaacactaacacaaatgcagcatgattgctgtaaaataaatgtgaaatttgtacaaaagtcccagtccttccgcagttctaggtttacagtcaggctcaaccttacttgccccgctcctgcatgaaaacaagtgcgttttatacagcctctgccacccagtggcatagtttaaggctctatattatatttaaaattaaggtttttttcctatcatacacatcaatttggaacctgctggtgactcttctaccacagagggtaaataaaaagaccagtttttaaagtaagaggattcagctcatcttataaaagtataatagtttcggccagacgtccattaacatctgtttaaattagatacagacacaatgccaaatattagaatcataaatgtaattttggagataatgtttaccttgagtaggaagacacttggaccatattaaatttgaaagtcttctgttccagaccaaaatggggtaggctaattccctgtcatccaagcaactaaaaggtaaaaaccttataactttaaaataaaaaaggttatttttttcccctataaaagacaggcagtatgagttaatacattaaaattattttgtacatccctgctccaaacaaccacaaaaatggtactttttaaatgcctgcccatcctctcctggaagggggtttttccaagattcggggtgactgattcatcccacagccccaggcagcagtttatcctggaactgtcctctgttctcccatcactgctgagccctgagaattgtgaatggccctcagagcatctaggcctctgcaacaatcaggtctctggtgacttgaaatgcagcaatgagggagctcagctggatcttctcgttggtgccaacagaaagcctgtactcaatgtctgccattttggtcaataaatgtattcgaactgaagatggaaagtcaactctatgcacaaacaagtgtatctctgtcaggatatcatgcagtgccaaccccttcagagttttcaactctgtaatatttctgtaggctgtggtgaaatcttgattcaacatccagtccaggatgttggcaatgtctgacttgagcgggtgcccggtgcaggtgtagacagtctcctctgtcaccttcccaaaggccatattggtgctctgcaaaatgttcagagccctacgcatgtctccactggaaagagtgactagtgctttcattccatcttcacttatatcaactttctcttcttccacgacatgttccaggcggggaaccatgagttcaggagtcaggggaccgaaccgaaacctcgtgcagcgggactgcaaggcagggatgatctttgacagatagttacagatgaggcagaatctggtattttctgtgaatttctcaattactcttctcaaggcattctgggcgtcctgagtcatggcgtctgcttcatccaagatcactagcttaaagcctttcttaaatattgtccttgtgctagcaaagctcaggatcggtcctcgaatgatgtctattcctcggtcatctgaagcattcagctccaagaccatggagccaaattcnttgtctttatatagctgtttcgcacaggctaggataggtagagtgtcttgccgtgtgccctgggggaccgtagagaagcaagtgtggcagtcggtccttcagttgactaaagcttctgaatggtacctcagaagtgctcctagactgagcaaatagaagatcattgcagggtcatgtggccggtatcttttcaacccagggcaggtatcctgatctgtggtcggccgcgggcatgctcctgcatgcgttgagctgctgaggtctgccatggcggggagacgaaggtgaccagatccgctgagatcgtcgcgtcacaccaagcgcctgcacagtgac

SEQ ID NO: 726841 - DNA, 4793 bp, Homo sapiens
  misc_feature (63)..(63): n is a, c, g, or t
  misc_feature (66)..(66): n is a, c, g, or t
  misc_feature (72)..(72): n is a, c, g, or t
  misc_feature (74)..(75): n is a, c, g, or t
agcgggtttcttaccgtaggtttctccctgttgaggcgaacgagctaaatgacctctccgggnggnggcggngnnctggccggggcgggcggcgcgggggcggcatgagggcccgcggcccggggggctgaggcgcccgccgcctgccgcgggggccgctcgcgtcctccatggaggccggagaggaaccgctgctgctggccgaactcaagcccgggcgcccccaccagtttgattggaagtccagctgtgaaacctggagcgtcgccttctccccagatggctcctggtttgcttggtctcaaggacactgcatcgtcaaactgatcccctggccgttggaggagcagttcatccctaaagggtttgaagccaaaagccgaagtagcaaaaatgagacgaaagggcggggcagcccaaaagagaagacgctggactgtggtcagattgtctgggggctggccttcagcccgtggccttccccacccagcaggaagctctgggcacgccaccacccccaagtgcccgatgtctcttgcctggttcttgctacgggactcaacgatgggcagatcaagatctgggaggtgcagacagggctcctgcttttgaatctttccggccaccaagatgtcgtgagagatctgagcttcacacccagtggcagtttgattttggtctccgcgtcacgggataagactcttcgcatctgggacctgaataaacacggtaaacagattcaagtgttatcgggccacctgcagtgggtttactgctgttccatctccccagactgcagcatgctgtgctctgcagctggagagaagtcggtctttctatggagcatgaggtcctacacgttaattcggaagctagagggccatcaaagcagtgttgtctcttgtgacttctcccccgactctgccctgcttgtcacggcttcttacgataccaatgtgattatgtgggacccctacaccggcgaaaggctgaggtcactccaccacacccaggttgaccccgccatggatgacagtgacgtccacattagctcactgagatctgtgtgcttctctccagaaggcttgtaccttgccacggtggcagatgacagactcctcaggatctgggccctggaactgaaaactcccattgcatttgctcctatgaccaatgggctttgctgcacattttttccacatggtggagtcattgccacagggacaagagatggccacgtccagttctggacagctcctagggtcctgtcctcactgaagcacttatgccggaaagcccttcgaagtttcctaacaacttaccaagtcctagcactgccaatccccaagaaaatgaaagagttcctcacatacaggactttttaagcaacaccacatcttgtgcttctttgtagcagggtaaatcgtcctgtcaaagggagttgctggaataatgggccaaacatctggtcttgcattgaaatagcatttctttgggattgtgaatagaatgtagcaaaaccagattccagtgtactagtcatggatctttctctccctggcatgtgaaagtcagtcttagaggaagagattccacttgcacggcaacagagccttacgttaaattttcagtccagttatgaacagcaagtgttgaactctttctgcttgttttgattcaaagtgcagttactgatgttgttttgattatgcaactaagtaggcctccagagcctctctagtggcagagcagctcacactccctccgctgggaacgatggcttctgcctagtacctatccttgtgtttctgatgcagtggtagcattggttcaagttctctcctgctgtggtcagagttgcttcgatgttggccaagtgcttttcttcttgggctcccttctgacctgcaggacagttttcctggagccatttggtatgaggtattaatttagcttaactaaattacaggggactcagaggccgtgctcctgaccgatccagacactattactggctttttttttttttttttaacaatggtgtgcatgtgcaggaaatgacaaatttgtatgtcagattatacaaggatgtattcttaaaccgcatgactattcagatggctactgagttatcagtggccatttattagcatcatatttatttgtattttctcaacagatgttaaggtacaactgtgtttttctcgattatctaaaaaccatagtacttaaattgaacagttgcaaagatgtcttaattgtgtaaagaattggtgtagtcatgactttagctgatactcttatgtacgagatctgtctctgctgtttaacttcattggattaatcagctggtttcaactctactgcgaaacaaaaatagctccttaaaagtactgttctccttcagtggcatgtagttatctaatcaagacacctcattcaaacaaaacctgccttaggaaaatttaatatattttaaattattttaaaagaaatacaacatcttattctttagctttcttaatcggtgctttatggaggccagtgtaacgttacatgactcgttgagaaagttgaggaatttcctctaccacctttgttgcttgaagaaaaacatgtcttttcaaaatgagaggctttcattgaagaaaagaaaaaaacaacagttaaaagcttttggctctctgtttcatttttttccattaagaaaaaaaaaagtccccttttaaaacaagcagggctgggtgtgacggcacatgcctgtaatcccagcactttgggaggctgaggtgggaggactgcttgagcccaggagttcaagatcagcctgggcaacagagtgagataagacccaatctttatttaaaaaataaataaataaatagccaaaaaaacttagtgtggtgctggtgtgcatggtagccccagctactcagggggctgaggatgtggtggcatttacctgtggttctgtggttccggctactcaggaggctgaggtgggagaactgctcgagcctgggacatggaggctgtagcgagccacgatcgtgtcacggtattccagcctgggtgactgacagagcatgatcttgcctcaaaaaataaacacataaaacaagtagtacagcagaagagctgggaatggattggccaacgtttacatttcatggttatcttgaagttccaggtacagcagatgctgagcctctgggtggtttgaggcctggttggccatcagatatttagcttcatactttgccgctgtccttaagggggtgagtcctccatgaacaaagggaatagtgactttttccatttgacagtttaagaatttgacattttttaaagaacagcatctaaagaaagtttattctgtgatattagagacagaaggttttcatataaatgcaagtttgacaaagtcagcatctttctagctgtctaaggaagagtcacttgtaacacagccagccaggaggctgctttgttttttattataaagaacactaacacaaatgcagcatgattgctgtaaaataaatgtgaaatttgtacaaaagtcccagtccttccgcagttctaggtttacagtcaggctcaaccttacttgccccgctcctgcatgaaaacaagtgcgttttatacagcctctgccacccagtggcatagtttaaggctctatattatatttaaaattaaggtttttttcctatcatacacatcaatttggaacctgctggtgactcttctaccacagagggtaaataaaaagaccagtttttaaagtaagaggattcagctcatcttataaaagtataatagtttcggccagacgtccattaacatctgtttaaattagatacagacacaatgccaaatattagaatcataaatgtaattttggagataatgtttaccttgagtaggaagacacttggaccatattaaatttgaaagtcttctgttccagaccaaaatggggtaggctaattccctgtcatccaagcaactaaaaggtaaaaaccttataactttaaaataaaaaaggttatttttttcccctataaaagacaggcagtatgagttaatacattaaaattattttgtacatccctgctccaaacaaccacaaaaatggtactttttaaatgcctgcccatcctctcctggaagggggtttttccaagattcggggtgactgattcatcccacagccccaggcagcagtttatcctggaactgtcctctgttctcccatcactgctgagccctgagaattgtgaatggccctcagagcatctaggcctctgcaacaatcaggtctctggtgacttgaaatgcagcaatgagggagctcagctggatcttctcgttggtgccaacagaaagcctgtactcaatgtctgccattttggtcaataaatgtattcgaactgaagatggaaagtcaactctatgcacaaacaagtgtatctctgtcaggatatcatgcagtgccaaccccttcagagttttcaactctgtaatatctagaggagcagttaaggcaaagggaacaagttccagaacaaacatactgcagagaattttgaatccaaacccgggcaagagactttttaaagtaaggcttttaatcccaacacaactgtttctctttcaacttgaagctgcacgtgttggactccaattctttatttttctttgtttcatcttcagtaagggctttctgaaagatagagttgtaactccttctagtagagaataaagccaactgcgttttcttttaaaaa

SEQ ID NO: 726842 - DNA, 227 bp, Homo sapiens
ccttgcttcgcttgttgctcgctctctcttctttgcagcattttctagcacgacctgctgtcggacggagatagcctgttctgctgcagcttcgcacgcctcctttgcctcttcccgggcagctgtttgctcagctgccttcttcttgacagcttctttacactctttttgtacttctacctgggccatcttccaacggttgctgattccatagatctcggttgatg

SEQ ID NO: 726843 - DNA, 693 bp, Homo sapiens
ctcactgcacattttgagaacaccatgaatctttacgaacaggccttgactgaagtcttgttgggcaagactgagcttttcaaattttatgacaccttgaagggtctatacattcttttatactggttcacttcggagtatagtacttttgggaactctatagcattcttagattcttctttggggtttgcgaaatttgactttaacttccaacgattaatcaggattgttctttacgtttttgattcctgcgaactagcatcactagaatatgccgaaatccaactcaaatatatttctctagttgtggactatgtttgcaatagaacaatttccacagccctggatgccccagcgttagtttgttgtgaacaattaaagtttgtattgactactatgcatcattttttggataacaagtatgggctcttggataatgaccccactatggccaaaggaattcttcgactatattctctttgcatttctaacgatttctcaaaatgctttgtagaccacttcccaattgaccagtgggcagatttttcacaaagtgaacattttccgttcacgcagttgactaataaagctctttcgattgtatattttgatttgaaaagaaggtccctacctgttaagctttaaagtacgataataagttcaacatctgggtataccgatcggagccggact

SEQ ID NO: 726844 - DNA, 4702 bp, Homo sapiens
  misc_feature (63)..(63): n is a, c, g, or t
  misc_feature (66)..(66): n is a, c, g, or t
  misc_feature (72)..(72): n is a, c, g, or t
  misc_feature (74)..(75): n is a, c, g, or t
  misc_feature (4624)..(4624): n is a, c, g, or t
  misc_feature (4633)..(4633): n is a, c, g, or t
agcgggtttcttaccgtaggtttctccctgttgaggcgaacgagctaaatgacctctccgggnggnggcggngnnctggccggggcgggcggcgcgggggcggcatgagggcccgcggcccggggggctgaggcgcccgccgcctgccgcgggggccgctcgcgtcctccatggaggccggagaggaaccgctgctgctggccgaactcaagcccgggcgcccccaccagtttgattggaagtccagctgtgaaacctggagcgtcgccttctccccagatggctcctggtttgcttggtctcaaggacactgcatcgtcaaactgatcccctggccgttggaggagcagttcatccctaaagggtttgaagccaaaagccgaagtagcaaaaatgagacgaaagggcggggcagcccaaaagagaagacgctggactgtggtcagattgtctgggggctggccttcagcccgtggccttccccacccagcaggaagctctgggcacgccaccacccccaagtgcccgatgtctcttgcctggttcttgctacgggactcaacgatgggcagatcaagatctgggaggtgcagacagggctcctgcttttgaatctttccggccaccaagatgtcgtgagagatctgagcttcacacccagtggcagtttgattttggtctccgcgtcacgggataagactcttcgcatctgggacctgaataaacacggtaaacagattcaagtgttatcgggccacctgcagtgggtttactgctgttccatctccccagactgcagcatgctgtgctctgcagctggagagaagtcggtctttctatggagcatgaggtcctacacgttaattcggaagctagagggccatcaaagcagtgttgtctcttgtgacttctcccccgactctgccctgcttgtcacggcttcttacgataccaatgtgattatgtgggacccctacaccggcgaaaggctgaggtcactccaccacacccaggttgaccccgccatggatgacagtgacgtccacattagctcactgagatctgtgtgcttctctccagaaggcttgtaccttgccacggtggcagatgacagactcctcaggatctgggccctggaactgaaaactcccattgcatttgctcctatgaccaatgggctttgctgcacattttttccacatggtggagtcattgccacagggacaagagatggccacgtccagttctggacagctcctagggtcctgtcctcactgaagcacttatgccggaaagcccttcgaagtttcctaacaacttaccaagtcctagcactgccaatccccaagaaaatgaaagagttcctcacatacaggactttttaagcaacaccacatcttgtgcttctttgtagcagggtaaatcgtcctgtcaaagggagttgctggaataatgggccaaacatctggtcttgcattgaaatagcatttctttgggattgtgaatagaatgtagcaaaaccagattccagtgtactagtcatggatctttctctccctggcatgtgaaagtcagtcttagaggaagagattccacttgcacggcaacagagccttacgttaaattttcagtccagttatgaacagcaagtgttgaactctttctgcttgttttgattcaaagtgcagttactgatgttgttttgattatgcaactaagtaggcctccagagcctctctagtggcagagcagctcacactccctccgctgggaacgatggcttctgcctagtacctatccttgtgtttctgatgcagtggtagcattggttcaagttctctcctgctgtggtcagagttgcttcgatgttggccaagtgcttttcttcttgggctcccttctgacctgcaggacagttttcctggagccatttggtatgaggtattaatttagcttaactaaattacaggggactcagaggccgtgctcctgaccgatccagacactattactggctttttttttttttttttaacaatggtgtgcatgtgcaggaaatgacaaatttgtatgtcagattatacaaggatgtattcttaaaccgcatgactattcagatggctactgagttatcagtggccatttattagcatcatatttatttgtattttctcaacagatgttaaggtacaactgtgtttttctcgattatctaaaaaccatagtacttaaattgaacagttgcaaagatgtcttaattgtgtaaagaattggtgtagtcatgactttagctgatactcttatgtacgagatctgtctctgctgtttaacttcattggattaatcagctggtttcaactctactgcgaaacaaaaatagctccttaaaagtactgttctccttcagtggcatgtagttatctaatcaagacacctcattcaaacaaaacctgccttaggaaaatttaatatattttaaattattttaaaagaaatacaacatcttattctttagctttcttaatcggtgctttatggaggccagtgtaacgttacatgactcgttgagaaagttgaggaatttcctctaccacctttgttgcttgaagaaaaacatgtcttttcaaaatgagaggctttcattgaagaaaagaaaaaaacaacagttaaaagcttttggctctctgtttcatttttttccattaagaaaaaaaaaagtccccttttaaaacaagcagggctgggtgtgacggcacatgcctgtaatcccagcactttgggaggctgaggtgggaggactgcttgagcccaggagttcaagatcagcctgggcaacagagtgagataagacccaatctttatttaaaaaataaataaataaatagccaaaaaaacttagtgtggtgctggtgtgcatggtagccccagctactcagggggctgaggatgtggtggcatttacctgtggttctgtggttccggctactcaggaggctgaggtgggagaactgctcgagcctgggacatggaggctgtagcgagccacgatcgtgtcacggtattccagcctgggtgactgacagagcatgatcttgcctcaaaaaataaacacataaaacaagtagtacagcagaagagctgggaatggattggccaacgtttacatttcatggttatcttgaagttccaggtacagcagatgctgagcctctgggtggtttgaggcctggttggccatcagatatttagcttcatactttgccgctgtccttaagggggtgagtcctccatgaacaaagggaatagtgactttttccatttgacagtttaagaatttgacattttttaaagaacagcatctaaagaaagtttattctgtgatattagagacagaaggttttcatataaatgcaagtttgacaaagtcagcatctttctagctgtctaaggaagagtcacttgtaacacagccagccaggaggctgctttgttttttattataaagaacactaacacaaatgcagcatgattgctgtaaaataaatgtgaaatttgtacaaaagtcccagtccttccgcagttctaggtttacagtcaggctcaaccttacttgccccgctcctgcatgaaaacaagtgcgttttatacagcctctgccacccagtggcatagtttaaggctctatattatatttaaaattaaggtttttttcctatcatacacatcaatttggaacctgctggtgactcttctaccacagagggtaaataaaaagaccagtttttaaagtaagaggattcagctcatcttataaaagtataatagtttcggccagacgtccattaacatctgtttaaattagatacagacacaatgccaaatattagaatcataaatgtaattttggagataatgtttaccttgagtaggaagacacttggaccatattaaatttgaaagtcttctgttccagaccaaaatggggtaggctaattccctgtcatccaagcaactaaaaggtaaaaaccttataactttaaaataaaaaaggttatttttttcccctataaaagacaggcagtatgagttaatacattaaaattattttgtacatccctgctccaaacaaccacaaaaatggtactttttaaatgcctgcccatcctctcctggaagggggtttttccaagattcggggtgactgattcatcccacagccccaggcagcagtttatcctggaactgtcctctgttctcccatcactgctgagccctgagaattgtgaatggccctcagagcatctaggcctctgcaacaatcaggtctctggtgacttgaaatgcagcaatgagggagctcagctggatcttctcgttggtgccaacagaaagcctgtacctaacagaaaccaaacacagggtaagaaaaaagacaccaaacacagctgccttttcttaagggaccaagagatctagggctgaaaatctgttgaaggagtggggatgggaattgatagaacaaatgtgccctggatggcaatcttgtatgtgtccccctaacattttcttctctgccctacacattgatttataaatgtgatgtttcaaacttgtaaggaccgantcaattttnaaaattattaggtatcaggccgggcgtggtggttcacacctgtaatcccagcactttgggaggcgggcc

SEQ ID NO: 726845 - DNA, 134 bp, Homo sapiens
acccccccccccccccccccccccccccccccccgacgaacatattacaattgcagtccgttaccctttgtaattgtcttctctcaaaacatgattacaggacatctcaggctgactgtgctgtcctgacttgt
